United States Patent Application Publication US 2026/0058010 A1 - sequence listing, part 17

SEQ ID NO: 198 - DNA, 526065 bp, Homo sapiens
  source 1..526065: mol_type = genomic DNA
ctgttgtagcatgaaatcagccatagagaatgcaacaacaaatgggtatgattgtgccccaagaaaaccttattacaaagatatgtgtctggccacgtttgacccagggtccactctttgctgatccctgttctagactgctgttcgcgttttgtcccgggccacaggagctttcttttgctttctcgcaggtatattggtcacttaagaaggtttttaaaaaatattttaatgaacatttttagatgttacatagcagaaaatctttcaggatctcctttccattatatcattagaagtggaagtcctgcattttaaatttctacttgtttgaataatttaggacaatgcttttctagcagatctgatttttcccacaagtccagtctctttagtaggccataaaatgtttatgatttgcccttgttttcttcctggaacctttcccacctgctgcctctatataacataccttcctattaaactcagttacctcaagggccctgctctttccatgctatctcattccctcatgccttcgcacatacttttctattttccaggttgccttccattccttcccccaagcaaagctggtaaattcccgctacttctctagccttcatgaaaatcctcctcctctgtggagctctcccttcccaaagctgctgctcggccctagatgcgctccccataattatgcccatcattatatctattgtactccactgttattgctagtgccccacaatgtccccttgttaggctgtgagtaacttgagagtgggagtgagttcatttatctttaaatttccagtgcctatacgtatttgtcactcaataaatgttttatgaatttatttactttggaaaaatagaatatatggctatataaatgatgactatttaggaaatgggattttaacaactcatttgatacggtttggctgtgtcctcatccaaatctcatcttcaactgcagttcccataatccccacgtgtcgtgggagggacccagtgggaggcaatggaatcatgggggtggtttcccccatgccattcttgtgatagtgaggaagttctcatgatatctgatggttttacaaggggcttctccctttgcttggttctcattcttcactctcctgccaccttgtgaaaaaggacttgtttgctttcccttctgccacgattttaagttttctgtgagtcgattaaacctctttcctttataaattacccagtctcaggtatacccttttagcagcatgagaatggactaatacacacttatgtaaatccttgagattttaatcttatctctataatcaccagcccaattagaacctcctaaactcagtctcgtttattattctgggttagtcaaacctacataagtctgtagtgaaacacagaaatacacagaccactgcatgcatcatacccaaccagcattggggaggtcatttattgtctctaaaataaaacaaaagacacagtgttttgtttctcttttattgcaacccactgcaaggtcaaagattcacggaaatatagaaactacaaaccgggtgaattttctttatccactcaaaaagacattaaagacaaaggaccagaattttccactacagcaatatatttcatagtctttattctgaaaatactgttgacattttggagagaataaaaagccctgcattaaacgtgttcacatgtatttatgacattctaagcaaaaaaaagaaactctatattgcccagaaaaattattttaagcctcatttcaaagcatctaatgagaacacattcaacaaccatcacaggaccactcaaggtgatgcttttttctggctgtttttttttttttttttttttttttttgagattaatgctttgaggctggatatggtatttctacggatttctacaaatgtaccaaagcagttttccagattatgttgcatcaggctttctggattagtcaacattttagagaataagtgcaagtccccaccccacccccacccccccaagctaaagcatgttatagtgctgtactttagattcaaacaatgcaacatttaaaaaaatcaattatacattctgaaaccatttgacaaccaaactgtaacactccaaaggttattacaactttgaactgaaatggtaccatctatatcatagatggctctcccttcttttgtcttttttaactatttaaaatatagtatgacatatataaaaattaaacttttgcatattcactcaagctactattactatacatactgtcttataaattagttttggattaaaaatcagttaaaatattgtgaaataagatatttcagtggtggggaagtggatatgaaaatgatacagttcaatgtgtaagaagaaatatagtttattaatgttaaacagcttttttcttacacaaattttattcccttcaaattaaattagaaacccatttagttatgggaagaatactcatggcgcttactgactagattttcctaaccgattgggattaaaacaaaaatgccacatcagaaacatgttgacataatcaaaggaaacagttgtttacaaaaaaagagaatcattagaaatcagtaaatggcattcaaatgtaaagctatcttgtttcttacagctaatgtcatgttagcaatgtgagacttaaagaaagtgaaactcaaacctcagtatatctgttaaagaccaaataacagttatattcactcagggaaaaataaatagcaacttcacaagttagggttttgtttctagttctactgtgaaagataatcactctttagcttaaaaaggctccctgatgtcctcattataaatctagacacaggaacagttatttgagcctgagtccctattatgaattaattgtaaagatgtgttaaatcaaaacatatattcatttactgataggtcttgtcttaactgaagctggcaatccttaattaaacaaagaaatgcttatttctgacaagtgtaaacagaatttcaatgaacagattttctaattttctttcttaactcatatattagctagcaatagatctttgcagtagcatgagaactagtccaaaatgacaacatgcatatatccaaaaaacctgttcaagaacccaaagcaaagcaaaaagagcaacaacagtagaaagattgtctacttatatctcactcatgaatcttctattaatgtgactaccctctcgtatctcagaaatagactttaataattaccaaaattaagaaaataatgaaatgatctgtagtttttaaaataactgcacaccattaattacattggtggcttcaatgctaagattagtttcaaatatcattaaaatatatcctgaccagttactatccaggaaataaaagctaacacaatgttaacataaaaccaactaaaatatttagtgctcaacagaatgcatttgtagaataatgtataattaactttcgtgagctggccaggagagttcagactgttgcctctatataacaaatttagaaaaggctttattctttctagtccccaagtcacccaccagatagcaagttggccacccgaggatacacggagttaggcagtgccacagtggataacatgctaccttagtggcctggaagaaggcttctctgtcaggaaacgatctagagtagatcagagccctggtgtagatgtgcacacgtgtgaatatgtgagagagtgtaagtgcctgtacgtataacatcacttctgctgtagtcatcatcagtagaagtgcacaattcatcccatgtaaaaagaaggccttcttacttggacatctccaagtggcagcaattagaagctcaaaataatacatccaattttttgactctatattaaaaataatttttttttaaagagaaagaagcctttgaagttaaaaactaaaaagtttgtggctttcataatctttaatttctaagaaaaaaagccagctcacttgggaacaaatgacaactgcacttttggtatgcagtatgcaaacaagacacaaatacacatacttgaacacacacagacaggtgacagttaaaacccttccgagagatcagctccccaaatgtacaattctcctctgctctgctgaatgatcccagtggactaggcgaggcaggagcgctaggaggaggcggcagacatgttgggggtccagcccatctgataggctctctccaaggtcctcttgcagtcctgcaggacggtgctgaaggtgatgtgggggtactgctgcaccagctgttccaccgtcacttcgttgacctgcaaacaaagaagagtcaccatcacgcacagagaccaccaacaccacgccgctgcccacgctcactgatgtgctgcagctggctcactgtgacacgaagagccctcgccttgttcctcctagcgatgtgaggaagggttttgtgaggagatatgtgtcccatttcatctgacctctctgatctcccagtaacacacctgcccttagggatttttaatgtaacatcaagaaatcaaaagtgttttctagaagcataaatgactgtgatttgtcaagatcttaacaatgtccattgaaaatctagtgcttgggaggtaaagaagcagtaagatagctaatgtgcatttgacttcatcatcaacccgacagcctttttaggacaaaaattgtggaatgccggagaggacacactagattccagacagaagtgttggggaagatgtttatttttcttccctttaaatgttaaggtacggcaaacttcaagttcctttgtgaaaagggctgaaatgtgaggaatcaataattaaaacatacatggctggcaggtcagagatggccccaatagaccttaaccatcaaagataccaccttgattcttgattagacaaggcaatcagacaggcctaattaaaactaacacctttacaattgctgtgctgtgaagggattaatttgtcaattatttttaagatgattgcagttcatatcacagaagtagacagttttcttcatcctttagataaataaatgattaacctaagaaccacaacttttaggtagctttatttaaaatctttattgaacacttgagcattttcaaatacatcaatatttcatttataccgagtaagctagtctgaaaaaagggacttgtgatacacatttttgagcacacttcttgatgtccattattggaaaagatcaggaccactaggaaaaacctgaaacaacatcaaacccttgctgtttgctttgaaagcctgcttagaagtatgatgatcatgaaattcagctatctgcacttttctgaaatagcatgatgttttctaagtgatctagaaaactatgttatctgttaattctttttacattattgagagttgatatttcaacattgtgttgatgatactaaatctttgccagagcatttctctacttaagacttgcttgcgtttaagtgaacttttattccaaatttaaccaagccacataactaattccttttgtgataaagctatgatttataacgttttattttcaaaagctaaaacaattttgaataaaaaaaggaaaactgatacacatatcggagttgaaatatgaactgatgaatttaatataatttaaatgcgtgctctaagtctagagttcagacagcttataacagtacatttaggagtcatgtatcatctggccttgcctattcctctagcatatttttgatactatccagccacttggcctagtttcagtttattaagttgttcaagttccttctggtcttgggatctttacacatccctggaatactttttgccccacttatccattatgacccctttcacatgcctacttcctactcatctttgagttcttagcttcaatgtcattttcccagcaaatttggatcactgccttatctctgctcccctcactaagttacataagtattccagatcattcactctttcaatactccctacttttcccccatagtacttattattgtactaagtttatgattgcttagtttaatgtctatttctcttgctccaatctaagatctataagaactatcatgagccaggaatagttattagtgagtgaatgctaaaacaaatacaaactacaaataaaaaatagaaatccaagaataaggcaaagccagacactaacatactaatcaagaagactaatgatttcttgaggaactcacattcagctcaagaatctccttcttcagggaagccctccctaagcaacccaacccagaaggttgagttaggcaccccttcccagtgcaccatggcaggcaccctgcaaggtatgtccgctctttgagcactctcacactgtactacaattatctgtccacttgcctatctcttccacctgaataaaagcctatggagattaaagattgccttttatctttgggctgttcaaaatagagaaccaaggcatgttacttctttaagacttggtttttctaaactgtaaagacaggataaaagtacatatcataggactgttatagcgattaaatataataatatgcctcgcactgtgactgatataaaaagcccaccatacagtagctctcactattgaaggagacactcagtaaatggtcactgaatgcaagagttaattcatgatctcttagggccaccaattctctatagcattaatcaatattgttccacctctaagttatctcataaaataaaccttgttaacattagttgtaatgtttaaaataaattaatcaccaagcaaggaataacttttagaatgttctccatgtacaagaagaatctattttttcttaatggtttcttgagcagattccagaactctccttaataacatagtccaggttttaagtaactactttggcatggtttggatatttgtccccttcccatctcatgttgaaatgtgatccccaatgttggaggtaaggcctggtgggaggtgtttggttcatgggggtctgcccatcatggcttggtgctgtcttcgagatagtgggggagttctctcgagatctggttgtttaaaagtgtgtgtggcacctcccccaactctctctcttgctcccagcctcaccatgtgacatgcttgctccccttcgccttccaccatgactggaagtttcctgaggccctcaccagaagcagatgccaacactgcacttcctgtacacctgcagaaccatgagccaattaaaccccttttctttatgaattacccagtttcagctattcctttatagtaatacaaacagactaatacatcactgccaggaaatttttccttttttttaacagatgttccccatgctgcagttagatgacttgccttccttctgccataaacaaacaaaagcatgcaggtttcactaagagatgaagtcatttcgtcagagaggaaccttggaaaatctgcatcacattgcaaagaagtaaatgtagtccaagccacttggcattcaaggaagtactaactaaaaataaatgagaaaagaatggagcagagaaaacattcaaaaccactgttaacgatatgaactcttttctatggtacatcttttccaatttatacacaggtttgtacagagttttgtacctagggttgacaggcaatttgttttggagggccaattaatttaaaaatagaaaatatctctatgtgataactgttttccaggaaaaggcacataattcaccttaagcaaactggatacatgaagatatggatttatgaagtatacaaattagaaaataattgttcactttagtaaataatttcatggtagggttaatttattttgccagctcccccaagtgtattttatatatcctttgatttcccaaaatgcaatttacctattttggcggcacaaagtaaaatacatctgtagttgagaatacagatgatgatgtgtttgttctctggctttcataggtttggggtaagaatagacaataatttgactttgtgtaactgtatgaaaaatggcaccagtaatcctctgtgcatataatgtatcttctaagcaatccttttgctaactgtactctgtaaattctaggaaacaaagcagtggggaaaatgcaaatatttcattttagagctctgttgcgtagaagttattcaggggaaattcatgggctcctacttagggagggttattttacttataatctctcctggcaatagtgtgacaaatattatactacagttatgttcatttactccacagaagtacaaattatgctcaccttttctttgtatggactccataagtgctttggtgccatagaggattcagcgtaagacaccagcagagcccaaatccttttacatcgttatgcctacatgcacattcctgcagatattttgtcatgcacaactccacttgctagaatgaaaagaacctctctctgttccaactcataaaatatatgtaatataaaaagggaacattaaagatgaagttttttttttttaatttccccatgatccctggttttctgtattcaatttcttttcctcttgctgaaaactatcaatggcaactcctatatgacacatgagatttaaaaaatgcaatgtatcttcttaaagaaatatgccgcactgtcattggaagaaattactgtgattaaagggggaaaaaccatgtgccacaaatttttttttaatataagaaagactggattttatacttctctccaaatgctgcataaccataatttacattttcaaaattgttgtaactctttttaaggtggtagcaatttgtctgatattttaatctattttgagttaacatctattagcactttgtgaaaatgtgaggcaaattgctatgctaatgaaggtaaatcacaccacagtttcatgatatggctgccgctcttaacggaagggtgaggagagaaacttcagagttacagagagtcggtgtaacaaatttatctaggccattacagtccctttattaatttccgcagaaagttccagataagtgtaaacccaggcctgacttatctcctcaatgatacctactgttcaataaaagtaatttctgataaaatttgcagaagaagccatttacattaaatgatggttacttcctttttgactcaggttttaagagaagacatatttatgatgggggaaaatatttgacatctgagtatattaaaatcacatttaaaactaaaccacttaaagttcctgacaacaaggagaatttcagtcatctctttgttgttagtcctataggcactgtctggtatattcttgcccattagaatacaggctctatgagacagatattcttgctggttttgttcactgtcaaatccctagcacatagtatatactcaataaatatgtgctggctaaattcatatagggattgttcaatgaatatttattgagtacattaaaaaaagcaccaaatagtactgtaccagaaattgtagagataagctcaccttgctcccagactgctcagctagagtggtagcagtctctaaagtcctgataatatggcagccccaaactcctttaatcctctgaagttcatacccatggtgattctttgggctattgtcttttccatctgacatcaccagatacctctttctggatacatcttccctagagtttctaataattttgcacaggagaccaaagcagctcatgatggtagtttaacaagttttgctgggtcatgtggctgtcagggagtacttggaaaataactaagctacactttggataacctgatggcaaccctccatactggagatcattcttaaaccaagtgtgtagactaaaaggcatgctaatgatcctggacgtgagtcggtttccaaaacttggcaaaaccccacacagttcagaggatttgactctggtgtttacagcatcagcagcctgctcaggatggcaggcccaggagggcagaccatttggaaattttgtgacatttaagctcccttttaatgtcatagttatctgatggcaaagaataaattgtggacaggtctcctgactcaaagcaatgccattcctatcttctgatttcttgggctttgggagttggtatgccttcacccctatgtggtggcaagtgggaatgtgaaggtctatctttttttggttggttctgctgtcatggtagtgtttagtatctggtgcctcaggagcatgcaataaatggcaatctcagataaggagaaattctgccaccaaaactgctccatgctcccactgctaaacacgtagtattaggctttcgtgtgttaagagacaatcaaacgcttctcttcagcatggtttattttggcaaaatacttgaaaacaatttgttaatattttactcaaataaccaaggcaaaataaaagtatgtctctgttcaggtaaggacggggaagacaggaaaggaataatattcagtgaacatctattatttcccagacatctaagcatgaatacccctactcagatggaattcctatttcacacagctagcaaatggtagctagaatttgaattcaggaccccagcacacagtgctctttgcactgtaccacattgcctggccccttaggtaagatggtgtggtgtggaaagtgtcagactggggcctggctgatctcctgccctgtaaaatgtttactgacattcgtttttttactgaacataaaagagattgcagtttgcatataaatacatttcaaagtccttgataatgttttcaaaatgggtgctctaaatgtaaattataatggatctcacttggcctgcagaacagtctgttgtggagctgtgggttgcatgagactttgaagcatgatggaaatgcgatgaagctgcaggcctgaccacgggcctttggataggccatccgtgactacgccagaaaggggcactgcttcctttcccgtctctcacccataaaaacactttcccttgttacggaggtaggatggcctgcaagccagatatggtccctgccctcttgtagcttataacctagcaggggaggaacaatgacaccaccaacagcgaagcccaagaagtgctttctagggaagtgcaggttgctgcagaaggaagcctgcagtaggcacctgacctgttccttgagggctggaaagggctttccaaatgaagtgatatttcagtggacttctgaaggacaaagaggtgtcagcctgtgtaccacatgcacaaaatatgcacatatttttcagagaagaaaggaaaccagctcatgagctagaataaaacaactcatcatttgtaagctatgcaatgtttctcccaccccatccaacaaactcaagtgtatacctgcagtaagttcttgtgtgaaatagctctgctttgagaaagagaggggtgaagaagatggacccctttatttgcaggtgggaaaagtaaagtgcccacagtatatctgtgaaggcatcacaaatagcacactcagcgcctgcctcctaattcagggcttgggacttcacactggtctgtcactcttcacagactccctgggcaatgtcaatgactgctaacagccccagaggctgactcctggtggcccagaggcagagtgttgtctctgggacaatacgcctctggagcctgcttctctccgcgtttcttggctctctgggaaactgtagcagatatccatggaacctggtattcaccaggtgccagcaaaagtcatcgtgaacaatgcatattcaaacggaccttaatgtgctttcagctggtacccacagactctaagatgggcacatattaaaaaggatgaaatcagggtaatgtgaattttagtaacaccccaaatttgcatgtaaatgaggtgagtcatctaagtgcagtttaaaatattttaaataggacactaagaaaagaaaaaaagagcagatgatatattgatttttccaggatcctgcacagctgacaacatgtgcctgctctctgctggcctgtgtagatttttataattctatctctctccctttgcagcaggacttcgcatgtccctgtttgggtgacatgccacattctgctgaggtttgctgtggtgagagcagggaactaggaatccagtgccgcttttcaatctctcacctctttctcttcagtggagaggctaaacttcctaccttagcacttggatcctttgttctctcgtgtgatcagcttcacattcccttccttccctcttcctttctcagacaaaccaaggccttctgccataaaccctacagtgactcatacatagcaaacttatgataaatgtttactgacatgggatgaattaaactgtgtctacaatggcaagcaagatacaaacaagaataaagtggttgtcaacccaactgctcattagaattacctgaagatcttttaaaaatcccaatgcccaggccatatcctagagcagttatatcggagtcttggtggagagggagccaggcatcaatatttgtaaagctaccaggagagtccaaaacatagatcaggtgagaactactggtttaaagccaccgactgaaaagctcctagaaggcacaggtgatttctgttcttggggatctgaaggcaaggtctgaactaagcacctgcccacttcccatgacatgacacctctgagctagaggttctggggaaaaggaactgttgctactatagcttattagcccttcttttttcaaatattcaccactgtctgaaacaaaatgtgtattctttgaaagtggtaaaaatggactggcttcctcttcttcagcatcaagtcttagatctctaattaggcaaagccaaaggtggcttccatctgatcttcccaacagctaaggggaaggaaaaaaaattctatccccagttctcacatggacctagtgcttcctcagtggaaaacccatgatatggaaggagagggtactcacgattaggtatttaataccttttttttttttttgagatggagtcttgctgtcacccaggctggagtgcagcagctccatctcagctcactgcaacctccgcctcctgggtccaagtgattctcctgcctcagcctcccaagtagctgggactacaggcgcgtgccaccatgctcagctacttttttgtatttttagtagggatggggtttcactgtattaaccaggatggtctcaatctcctgacctcgtgatctacccgcctcagcctccccaaagtgctgggttaatacaattttaagataagaaattttaagaagaaaagttgactatgttactggagcctaaaagcgacctgctaaatatgggaataagctgaccacagaacatccatacaacgcttcatgcatgaacctcataccggtagcctggggtctttaaggatgcgtttttcatacagaggtaagaaatattactcttgggcggcaaaaaaaaaaaaaaaaaaaaaacctcatctaaaaatctcaaagtatacagtaagacagatactgagaatgcaatgaacctgacagaggcaggctcataaattcagtcaactttgtcaaacgcagtcattccatttcagaatctgtaatgattggaagtgctatgctctgtcaatatcacaacaggcctggcttcatgctgtctctttttcatgaaatgtgtgttgcctgttaacactagcactgcttctattcacttgaattagcacagtgagaaagcagcaaagaacttgggaggatggggatcacagaaacgcctgcagtgttaagtgagaattggggcttgctaacctgaagcctctaattaaagattagtgtgacaggaagtccaacaaccagactgtcagagagaaaaattagtgacattttcattccctgtatcaccaagctatcctccactgagaaagatgtttccagccaagtgcatgcaagctccaggtacacaaccatgtgttggccgctctaaggccacaaaccactggccatggacttggccatgctcaaatctatgcatatgcacgtgtggtgcagatgagaaccagaacatacatatgtgggacaccaggatggagaaagttgcttgggggagtcatctgcagtgctaccaatggttcggcaaatgatcagcaatttgaaaaaaaaaaaaaacaacaacaactaggccctaataagataattaatatagtcactaagtaagtggtaagtgcaatgtatttatggaacacatctgggtatttctaaattaaactcatgaagttaagctgaaaaacataattgagggggaaagctctctgaactaaaagtctgttttcttttgtgcataatggctttcttggtttcagttattactttcttacataaaggataaggtagtggtaatcagcaagtgcacacttgatgaaaaaaaatctttctaaaattgccatttccattatgcagaatttaggaatttgacccgtttcctaagacaaatttatgatcagcaaaaatttattctgcattaatgtgatcggtaaatccgtagattcaaaaacctgaaaataggtgatattcttggttttcagaagatgaactgtacataaatcagggcattgcagggctgggctctgaaagatgccaagttcaaccatgcagcagatgctgagctcatctgaatgtcctgatccccaggggcttgcagctgccgtcacaaccccccagctatatagaattcatatgaaatccaaggggggaagctttcttacttatttattttcctctgtctaggtactttttacaatccattaaattattaagaggcagtgggatctgacggttttcaaatttacttttagctgtataatactttcacaaaccaaaactgtagatttcaaatacataaagcagtaagaatggggctgctctggttgaagagaatgcagatgagaaacacaatccaatctatccattcatccagcatgcaatacatatttgtctagcaactagtatgtaccagccactgtggtaggtcctggtaatataacatagaaggagaaacccacagatcttatattctagtaaggagaaggaaagagacgaaggtaggaagggtaaaaattcaccaccacaacaagagctaacgtttattgcttgcttcataggaggaacactacacagattaattcactcaactctctcaatgtgagacagatgctattattttcattttacagatgagggaatggcggcacagggagacgatggcgaatgcagagatagcagcaaagctggcagtctggtgaaatggaagacaagagacaaacattctctggcaggacggagtggttaccatatggatgctgctgccaagagatgggggaagtgagaagagaaaaatggccacaacatttggtgacacagaggccactgctgaccttgaaaagagcagcatcagtggcatggtggggatggaaatagatcataacaggtggcaagaaagtaaggaaaactgttcctggacaatccttttcagaaattaaatagaatggcaagaagagaggcttagaggaccacagctgaaagctgatgtaggatcaaagtgaggctctttgttcagaagaagcataaccttggctgtcatttaaaaataaataatcagcaattttacagtactgtagctgcccatttgcttgtcctctcccaagaggctgcaggccccatggggtagggagtatatcttgttcactgttttttctgacctatcacctatcacagtgactggaatatagtaagccactcaatagatatttcttgaaaaaataaactattaataaaatatatgataaaaattggaggcaggagaggcttagtttttctctgaaaaattccttgcaaacaggaacaggattttctctaggcacagcatggtaggccctgaagacctgctgctgctggatggccaggcctggcatgtgggctgagccattccttctccacctgcagtagtccctcagtcacctggtcactgcaggctggtcttgttgctacttggtgaagtcaggtgattaagagttctgggatctcatctgagctctgttgaggaattgctgctacctattctatttttaaattcaaaaaataatatgatcctacaatctaattctctcatataattactgaaaccaaatcaaagctccaaggagattatttactgcaaagcaatgacgctccagggtgccttcaggcaaacttcaacacagcaatctattcaccctacagtatttggggaacagtaggctctctccttctcccttttaaaagcaaacaatttcactatccatcaatcccataacagaggccagcaaaacataagcagctacttgcagcacgttcccttaaaaggttctacacagatgttgattttcctgaaaaaacaaaccaaacaaatctcagcctggacattgactggctgtttgacttggcaggtcttcactctctgctcaaaagaaaggactgacttctaccggttccaggtttcttctttctctgcaagtctggctgtaatttagtgagtcctaatgattaaaaaaaaaaaattctaacattttcaagaattgctgccttagtctcaggaggctagtttttctatgaagatctgagcttgtgaatttatattcatggctagaatattatgaacctgttggacaggtgattaatataccagatacaagattccagagcaggtatgtatatgtgaataaatataatgataatgctaatagtagttaacacttattgagtgcttatagtgtgcctgacttcgggctaagggctttatcacaatatttcatttaattttgtaacaaccctatgagataaatgtcattatcatccccatttttcagttggtgaatttgaggcttttagagattaagctgcccaaggtcccagagacagtaaaatgatggaggtagaatttgaaaacctagcaacttgacactagtgctcaaccatttcacctcttttataaagttccacatcagtgtttcttggtttcatatttaaataccggaaaggacttttagttaccacttcttagaagttcaggtgaacagggttggaagaggaggagatgggaacacttaactaaaatgaggttgaaaggtaacctctgaatttcagctgatgtgtttttccctgtttcaattaccaggaataatcaggagagggttgtaaaatgtgttttaaagtgctcctatgtgaaaatcacctggagaaactgtttcatcagcaaaaggaacaagatgctgatgcttcaagtgaaggacttaagttcagattttagagccccagctgcactctcaccatttctcattgcccctttcttttggggcacatgtcatgtgggctgtctgagtaagggttatgtcacccacaacagaggactgcacagtctgacactcctgccttatttggatagaatgttttcttttctttctttctctctctctctctttttttttttttactttattttctttgatatggcatcaattttaaatcttacattttggctatgggcaacctggaaacagctgtgcagacaaggcagggaagaggagagtccctgcaggtatatgctttgtttcatggctgaattgctaccaaaacagtcctggacacagtgccctcaaattatttttctctgaaactgatttttccagttagttctgtacattagttacagagtcctatattattttccccatagggctttcctgctcatgattcctaaacaagctgataaaaactccattttctccacagaaatatttaggttgttgaggctttctcttaccataattacttcctgaaatatgcagtggtcaatttttcctgaatatttttacattaaattgggcacccaaaacttggccctaggtattttcaggtggtaaagcagactcctggctcgaaagagctgattggtttctattacttgctttctgtattggcttcttatggatttgattttaaaaaatctctctcccatttaaaaatgtggaactccatgtgaaaaccacgatttcttatgtcctgtagaatacagcaacatttactaaaagaaatcactatttcactcctcaactaagaacttcaggaattggggcaggtaaggagaaaggtcttggcaatgtcagtttgatgagaaatgaattaattcgattattttcatggtgtggatcaatagcagtcggcctccacagaggtccctggcctgaaggcagctggataatcaataggctcacacagaggcggctctcctccccagcagcctctctcatcttttctgggcgggctcttcacgcctgtgtaattctaatttatgtcaactagaaatcaaagaaattccaagaggctttggtcataggacattagggtggacctttcacaatctatttatgtctgttccttaagtaacgtggccctcacagccctccaggcgcctctactggccaagaagaaaaaacctcccaggagaagggtagccatctgctccgggccatggcagaggcgtggggttaggtaaaccgaggcacactttctctttcccatctataactatgcagggacataagaaccaagcattttaagcaaaatgctttgccaagagtggctccctcaataacgctctttaatgataccccagacgctggcattttcaaatcaaatgaacagtgtataaaattagttctgcatgaagttaaaaaaaaatagaaagtgaaagggagcttttaaaagctccagcatttctccatccaactgcttttcacaagggtttggcatttgagaattgctacgtttatgatgttattcactgctcataattcaggcctgcatctccaaacttctgtattaacacacactgcagaggtttccaccacgacacttttatcaccgaggcctcgcaaacagccagcctgcctccagtgagggctgttttttccgccagtgccaggccacagtgcctcctcccttctcatcaaccttgtcaccccaaacatttttcattaaccttgaacactgcatttccatttgccctacagctttatcatgattttttttggtcctttttagttttgttctccatccaaactgccttataagaaaaagaaaatataatacaattataagaaacagatctatagagaatctagaattcactgaagtcacaaaaataatttctacgaccaaagccgctgtttataattgcggaaaacagagggaacatactgctcttattagagtgtcccgttgattacacaagtatttttaagtaaatcaccagataaatgtgagttaagttgataggtgatttcgggtcaactctaattcccaaggtcaagtaagcctttgaacagtctttaagaatataagctcaccccaattcatcaaagccgtctcacacagcgttttcttctcttggttcttacaatgcactaaagtttaggagattaagtggcgtcagctccaaaaccctccaacatgcttatccatccaggaatcagaaaagctactcaaacaggggcttcttaatgcacttcctgactttacaactgcctggggaatgctgcattgttgcacgactggaggactcctccccaggaatcaccaatgttgcagccaaacatatttactgcagtttagcttagcccttgtttgacaatccaagtacatgttgctttcatctgcaacgaatacgtttaacttttcccatttgttctctgctaacctaaccaagagagacggcgggtgggggtcgtggggggaaacactgttttcctacaacaaatacaatgcattttgttattcttacaattcctcaaaaggtgaaatgaggaaaaaagcatcagtttggtaaagtatagcctccaaattaaatataagtggccctcaataaaactgactgtgaaagaacatgcaactagaatgttctttctcagaaccacaggatcacggaatgccagcgcaaggacacacagacttcacaaaccacatctctctctagtgcagggatcctactgacaccattcctgaccaaggggtttgttgagtagatgctgaggttccctgcctcctccactggctccactggtgtgcagaaacaagaggagaactctaatgggttttcttggtggttagcagatttggttaaggtagggagaaaagtgacagggccaaattaattttgttctttaatgctttgctggcacagatgatcacagactgccaggagatggtgtatcttcttctccgttccctaatcatagtttttctgtttcctgtctctattcttatttttcactattattttgttactttctgttaccctaagtacttgaacagtcttatcttcaactcacccttttctcccactgcaaatctttctgcatccctgtgctggagtaagatggttaataaattcataccaaatactaagtgtcctacggaggcattagtttttccattgcaaagtgtgtagaaagtgtaattactgacatatttgtataaaaaataatcttaattttaaatttaggtgaggaaaaagcacaaaggcaaagcattctctagtctgaatttatttttttcctttctttttaattgtctttcaaaatgggatagtaggcaatataatttttttttctcattggaaaattccagtatcacaacacaggttaatataatgatatggatgataagactaatcagtaacagagcattttatatataatagacattattctaagtgctttatgtatgttaactcattcacatgctcacaattctacaagataggtactagtatcatcctcattttgcaaacgagggaacaggcactgagaggttagtaactgcccgcggtgacacaactagtaagtgcaaagcccagatctgaacctgaactctggctctccgcagaccataccgttgctactaatttcttttctttgttactcatatcttcctttgaatcttgatggtaacttaaaatctggagatggatggcatgatacaaaatctgaaaactgaatagctactttagatttccatccaactaaaccaacaagcaggcttttctgtgcaaggctttacttgtgctttgtgtgtggtttggaactgtcttccatcctcacagagcctctcgtgtttggctctgagctgctttaagtctgaggaagccagacagcaaggctgggtccagcatctccctgggctgcactgcagcaggctctgaccagacggcgtcgtgctggagccaatgggttctcagagtggctctctggttagagaaaggattcagaggcagcccaggaaaagggctaaaaccctcagggatacagctaatctgaatactgtctctatttaattttggactaatttgcatttgggtagaaaataacccatttcttaactaaaaatcagcaaaatgctggtcagcaaatatgtctggaataacattctcctgtagtaactgtaacatacaacttctacagtgtatctccgaagatggagctgatcttaaccatctaaagattacaggttagaaatatgacaatttctgagaatggctgcggacacatatgtatgaatgtgtacattttggtagctttagttagcattcatgtggcagttccttctgctggaagctgaggagttctgctgtcattgattcctgtttctagaggactatgcctatggtggaccctttaacttgtcttaaaagaagtcattttaaagtggcagggttagcagcggcattaggttggttagtggaaagatttgtgggagactcgcaagccccggatctcagtgctgttgcttagttacaaagtaagtcgcttctgggctgggctgagaatatataataacatttctctaaacataactagctggcaaaggtctcgtataagttgggattctaaagtgtttggagaaaagaattagccaattaacaaaaaatcacaaaggacacaagagctttgggccatacttcatttgcccccacatttgctacatttagaagatgcatgccctttgaatggcgtgtctatttagtttcacattattttgctagatttgttcctaatcaccatttacaaaagtagcacacatgtgtaaattagtacaagatggcggcactttctgagcaagtatctgaactggaccttttccaagggaagcagtccccgtggccacagactgccccctgggttgtgccagcagcactggatacagactccaaagacccggcatgaagtcttgccagagtatcctggggccactgactggtctttctgagcctccattttctccccttcacaatgcaaataactatttcttagacttgttataggtaaaacatggaataaacaaagaagaaaacacctgtggagtgcctggtgtccagtataggttttttttgtttgtttgggacacagtcgtgctccgtcatccaggctgaggtggttgcggcacaatcacggctcactgcaacctcggcctcttgagctcaggtgatcctcccaccttagcttcccgagtagctgggactacaggtgtgtgccattatgcctggctaatttttttttgttgggggagagggggatagagacagggttttcccatgttgtccaggctggtctcaaattcctgggctcaagtgatccttctgccttggcctcccaatgtgctgggattacaggtgtcagtatagatttttattatctgttttctcagtcttcaaagggtcccacgttaaatgctacaccatttcctaaactcatgctcacatccctggctggttctacaggccttccaccaggacctctggaaccacttcttatcatgtgctgggagtggcatctgatgtatggggagatgcaaattcccacatacccccttactggccctttgttggtcccgaatggccagaatacatagatgttcagtaccaaaattacacacttgtgaaaaaccaatttggcactgttctttccacctttactgttgctggaaacttgaaacccagaatacaattttacggttagaccctgcaaattgcagtttgtcatgtaatcttttacattttggtccatggacttatgaataggatgccaaactctagttgactatgtatatgattactttttctttctacttaagcacaaaattcattattaagtggggaaatacaaagataatctcagattagtttacaaaagcaggcaaacaatgcatagctataattgcatatatacatataaaatgtatatataatatataatacacgggggtggagatagagaaggagagaggatatgacatcaagctattaactatactgatatgtagaaagcaaacaacttgatagtcaactcttactttatcacatctcatcagccccaaatatctcagagacttgctgctctgtgcaatcagggtggctccttggtctgtgatttctttacaccatccgacatccacagtctctattgtcatgctgtatcgcccaatggctatcagtgctgcaagaagggacgcagagaaagcattaatgttagcagtgtaagggagctctatcttattatgactattcatctcatttcctcactaaatttgttcctgaaattttgtgtgtaaatgaacgttttataaactaaactaaatttgaaatgctttaggaaagcttccctatgacaaacccatttgcaaagtgaataatcattccataatttccctttcattgaacacaaccttttatcagttttattcattacaaggttacctgtactttcaaacattcagctctgcagaaggaataaattaaaatgtattacagatacaacatttaaaaaaacccaagtactaacttaattttacccaagataactttaatttttttttaaagaagaacccacgtaaacaccattttgaggagtgttatactgcaagtgaatgtctttaccaattggcataattttttccatctgttcatgacctgtaaaatgtaaaagtataaaatatttttcacattagcgcttcttgggactgttaggaattaagagtacatcatacatactgctgattttaattggtgccatgctagagtgcagtaaacagaatgcatttgttatggtgaatttcctcatcctatcagaagtcttccttctattaacatacaaaatgaagcctgtcgtctgtaaactatgagagtatctgtagtcttctcggctgtttagcattgtaccaccactaaagtgcagacacttatcccataatctatgatgtgcactactaatcactgcaaagtcccataacccatcaccccatcacagcgaccaagtggtgaatgtggctcttttctaccgactttgataaatgtgcccacctttatatttaaggagcccagaaaacaaatttcaataccccagcaccagtttatggtgcactggtttgtgaatcaaaaccctgaaaacagtgccacaaatatcaaaaagaaaagagaaatggttttctgataatttcctcattctaagatagcataagttgatttctgtgacaataaaggtgaatgatagttcccaaaatgtgttgactagatggataatttagagttaagtactcatgttaacaaatgtttactcctacagctcacagaagagaatatttggcaaaatctttctttgctaattacctcagtattttttttttttactagaaaactcatgtccgtacattccagtaggaaagcactcccaagtagccagatatttaatgtttataaaaacaacaatcatgatcccagtgttttccagtgaaaatacaatagagagacaatttttttaaaaaaagttctctatgtaccagtttgttaatgttttcatctttgtgcatgctgttttgatatttaaagttttccaaggggtttgggggatttgccaactactaaaagtttgcagaaatggtctgaatactatttttgtatagaaggagcaacatcccaggttaattttggtgtctctgacctaagaaaattgttctctctggtatcatcatgactttcattggttatgatatcctgaagatctgctaagaaaaatgaagtaggggatacataaaataaatcccttttaatacaaagtgctcaaactatgatttccaaagatgacaaagcaccacttgcaggatggcctgaggttggtagattttgtgcagttgtttcattgaggtctgaggctagaacacgaaagcccagtgctatccagaaaagccctggactatcacagcctgctttataagcagataaagagtcaatagctattgattctgggtggtaaaatcactgatgtttgaaggcttttcttttgacttactactatttactgaagttagaatgaaacttttttatttcttaactcattcgtttatttaataagcacctcgtgagctctagagcatttttgccaacatctactgactacgttctatgtgccaggcccttggctaagaatttcaggtgtattgtcagatttattactaactgcaaccctattaagtcttattgttatttccactttaataatcaggaaacggagtcacagagagattgaataactttcctagtgtcacaagatagtaagtgggggagtggattttaagttgggagccagctcccagcagaatcatggggcaaggcacctggtagttctgataggccatgccaccagtggtggaactgcagtgtgacatattgggcctgtgttggctactgggaatataagattcatggagctcagaggccagttgagtggaggtggggggtgggtgcgacgtggggtagaaataaggaacagcccagtaaacagtcacaatccaaggcttaccccccatctcttccctttcccaactccttagctttcagatctcaggtcaaaggtcaacttctcagaactgatcaccctagcatttattgctattgggaatgttattatttgtttacttctttgtggcccactccctcattagaacgacagctcctattcactgctgtcaatgcccagcacctagcacatgcctcgtacagagaaggttcttaaacatatccattgaatacagcaacaactgtaacagaggcacgctaagggggtgtaagagccccctcacgcttcagggaaatgtggatacatcagaagccctcacagaacagctgagttaggtcttgaaggatgagtaatggttttccagataaacaaaggagcaaggataggtatgctgggcaaaggaaacagcatgtgtgaaagtagagatgagaaaggacaagtgagccgcaggtattctacgtggctgaagtaaaaacaagtacaagaaagtgggaagactcatttcagagagatttattcagtgattaatggcactggggtaggtataagagacacagagtaacaaaaccaagcagagtccttgatgttacgaagtttatagtctagcagaagagacagatgtgaaacaaataaacatgaaagtaaacataactctaaattgtgacaagtgctctgaaggaaatggactgaccactgtaggacagaacaacatttagctgggggcttcagggagggtctctctgatgaagttactcttaattcttccaacagctctgcagaacaataaccatttcagaggtaagaaaacagaggttcaacagctcaccaaggcccaaaaatctaataaagtggcagaaccagggtgcaaattgaggttatttggctccaaggccagtgcttattctgttgcaacagcagcacctagggtgggagtagagccctgcatatggtcagaacggatttctctttaccactcaggtagccaagtatgtaccctatgtccaagaggcctgagggaaccttttgattccaaaatatacagcacgtaatttgcctctctttgactatatcatgtccttggacagtttttcattgttgtttcacaagctagctataaaacctgtaatgtggtctagtctcaagttcggttctagccttactacctagtagatgtttgacatcgggatcacatttaacttttctgagtctcagcgtccttacctggacaatggggaggttgattatttgtcctgtctacttcatgagattggtctgtggctcaagtgagatgacagatgtaagggactttgcactacataaatgtcatgatttatttgatatttccccaatccatcctacagttgtgtagttgctataaaatgaaaagacttgaaagaatttcgaaaaataaaaaactctgggcaaatgatagcattatataaatacttagtcattatgtcactgctagagtcttgaactgcctactctctatcagtgatcataaacttctagtctgtacctgggctgatagggctgtaaatgtaatgtatcattactaccttcattagaggctgttgacacattacaatggtatttattgaaccttgaaaagggataaattatgcaagactaattcctaactccaatgcaattttaatatactttttaatgtgctaagtgcaactaatgaagaaagttaaattttaaaaaaggtacacaaattaaaagctgtagttcagtaacttgtgtgttgatgaagggtatacactaaccccctaatagtcattcccatagacatacaaatgacagagtgattaaaagacttaagcacacatgcacttaattttgaccaagaaattccatttctaggaatctactctgacaatatacctctaatagtacaaaattacttccgtatatacaagtttatttattggagcactgattgtaattgcaaaatgatggtaacagcctaaatatccatacataggagagtgctcgaataactatgctataaccacacaactgaataatactatgccactctaaaaatatgaataaggaaaatccctaggaattaatttggaatgattttcaaatcattaagtaaaacaaaagcagaggccaaaagagtttatatgatgtgctaccacccttcgtaaaaagcacaagggaatataataaaatacatattaatctgctcatctgtgcacaagtaacaggagaagcataaaccagaaaccacaaaatactgtgtaactataaaggttggtaaaaaataaagaagcaggcacgagatgtgggggtggggttgtgaggaagaagagagagaagaaaagatacttcttgtaatagctctttttatatagctttgactctctgaaccataataatgctttacacacttcccaaaataaaaaaaaaatgtgtaagaatctgaagaggaatacaaacagtaacaaatgaacccaaataaacagcataacccagatgaataatataactatgccaaaggggataggaattaaaaatgaatttaagtcactttggaaacatgatgttgactgtataagaggaaaaccaaaaagaactgtaagcaaacaaatactgtactatagcaagtaaatttgtcacaggagtatgagttaggaattcagtaactactctgtgtaatctaggattgtaaataatgacagctagtgttttcattgttagtgaaacaagttacaaataagaaaataggagaggcacacacatacacagatacatagatagctacagaagtgagtaataagtattgtgtatgtgtattcctggtttagtatacatacatctatttcttagctctttctgctgggaggaactgagggcaacggcaccctagcagcactcagatcttggtttctaaatatcattctccagtgaaaggaatcagagcttcatagagaaatcagccatttcgtagagaaatggctgattccaggactggagcagggaaagtacaagatgagtctggaacatctagtggtatcagaaaaagaaaagcttttaaaacaatgggggcatttcaaaaggacacaggatccaatcagaagaagctgccagtgaccaaagctggaacaatctgagcatcaaaataaataatgatagtatggattatagttcataaagtaagtatccacaagtccatactgatacaaataatcagataaatataaacatattaacattatatatactccctgatcacttctacaatattcttgccaagatgaataacttcaatgtacttagaagaaaacatcacacaaatccaaagtgaaaaacattctacaaattatttcactagtcctcatcaaaagggtcaaggtaatgaaatacaaaaaaaaaaaaaggaacaaggaactgttacaaattggaggaaactagggtgacatgacaactaaacaccatgtggggtcctgagttagatactagaacagacaaatcagggaaaactagttaaatttaaataagacctgtagttcacttaatttaattgtttcagtgttaatttcctggttttgataagcgtattgtggttgtagaggttgttaaagttagaggtagctgggtgaagagcatacgtgaactctactatttttgtaacttttctgtaattctaaaatgatttcaaaacaaggagtaaaaaaagtatggataagctaagaatagataacaaagtgaatgaattaagtagaggactacaattttctaagtgacaacattttcacaatggaacctcggatatataaatgtgagaactaaaaatacatttcctcctcaatagaaggaagattagtcatacaagcgcattaacaagcgacctgcatgtgccgttttgtcctttccagttctatcttctgctatggatctatgtacctgtaataaaatcagaagaaaagccctagtgcttgaaagaattagggttaaaatttaacagtaggattaacatctttcatgtaatacttcgataaaagccatttgcaaagaaatttcttggcacggttacaaagagataaatatgaaacgtgctcttctttgtagaagccacagaagctccaaaaacaaagaaatgacactttcagaatcatttgttgcattcatggtccctgcgaaggctccctccaccccgcagggactacagggatggttcctaactcaggctgttcaggagaatcacaggtgcctattcaaagtacagacgcctgagtcccacccctggagaatctgattccggagaagctataaaagtttctgtgatcctgatgtgcagctagggctgagaaccactggaacagaataacctacagcttgggcaaagtcagtcaagtgaaaacaaaagagctcccttttaaggatataaatagctaatgtgttctgacactttaaaacagtttggtctctcaaacggtagttactttgtatataatccaatacttttaaatctctttacttctaattaatgtcctttccatccatttttatacattattatattcttcctattatctatagtaaactgtacactgaccacactctaaaacatttttccagatagttctttttttgcaatattttgtaaacattttccttttcttcattgtacttattttatatttctaatgtagcacttaccagagtttgtttcatgttaaaattatttatcaacatgtttgtcttccccattagattgtaaaatccttgaagcagtgaatatggagtgtgttttatctaggacctctgaatgtctgaaaatcaagtgtcactcatttttcatagttttaattaactttctggaagcataactaactgtagaaagttgcacatgtctgaagggtacaccttgatgaattttagtaaagttcacacagctgtgtgacagtttccaggctgagaaacagagcaagcccagcacgcctgcggtctttcatccccacttcagtcacttctattctcccaacaaggataatcattatcttgacttccaatcacacacattaccattcctgttttgaactttatatagagtcaaacaccaaacattcttctgggtttttagctgcccattatgcatgtgagatccatccacgttgttatgtatactggtagtgttatgtatactggtatcatttctcaatgctgtataatgtttcattctgctgatggacatctgggtggtttccgccttggggctattacagataatgctgctgtgaactttcgcatacatgtctttgtgtggacatatgttttcatttcatgtgggtaattgcctatgagtggactttctgggtcacatggtaagtgttacgtttaactttattaaaaaaactgctaaagtgttttcccaaagtggttgtaccatttcacattcccaccagtatgtatgtaaggttccagtttcccttgcattcttggtacttggtaatgtgtctctcttggattacagctgttctagtgggtacgtagtagtaccttctcgtgggttttaatttccatttccctaaggattaatggtattgtgtatctttatcatggtgccacactttaaaaaaatttctagcagagtgcctctacccttgtaatacttagtagatatctattacattaaattaatgatgggaaggcacataatttttctattattagattacagcaaataatagctttctaaacaccagataatttcccatgtaatctgaagacgtgaaacttaagtaaattcaggaataaataaggttatagaaaatgttgcaaatgctcaattgtttgtgaaaattttaaagatggtggagcactttttatttagaaactctgaatccctgaaaatcaagtggaaaaacacaaataataaaaatgattgcccatcaatggtagataacattagagactaaaaatttgaattgtgctagcattttcaagcagctgtacacaggggcattcgttttatataactctgcttactgaattcagaagagcaacacgtaggtattgtctgactcacaaagggagcaagctagctgtggcccttgacctttctgggaagaggctctcctgccctgtaactcctgaaatggtaatgcaagccttatttataggttgcatctgctttccttcctatgagatgaacaagttggtggaaaagtcagttcaagtgaagaattttttaaacaaatgtcttaagcagcagcagcagcgaggataagcatttatcccttgccccttcttatttatttttattttgaaaacagacaaaaatttgattgagtatgtagaaatgattcctatcatgtgacttccaaaaatgtcaaaaacaaggggcatatttagaactaacatatatttaacaggaacctgatccactgctctggttttcagtggtgctgtatttggtgggaaccaaccctttgagtagaatgttaggttcccctgacaatccccctattaaattttaaaattaaagatgaggaagaaaaagaaccttacaactgtaacattcgctgagaacctaaagtccctggttcaatgattcttttttattccagcctgcataaatacatatattacttatcaaagaattatgtatcctttccaaaatcctgacattacattagatttcctcactttatgagaagtgaattctgggtttaaatatgttagtttgcagagatgggaaagtacattagtgtctctgtcatacatctgccttgtccaactccctaaactgagtttttcagaccactgtaaagaccgaatgtcagttttaagctggtctcagattaaaaaaaaaaaaaactgtctgaagctgggcatggtggttcatgcctataatccctgtactttggggggtcaaggcaggcagattgcttgaggcccggagttcaagaccagcctgggcaacatggcaaaacttcatctctacaaaaaataaaaaaaaataagctgggtgtggtgatgtgcacctgtggtcccaactattggggaggctgaggcgggaggactgcttgggcctgggaggtggaggttgcattgagccaagatcacaccactacactccagcctgggagaaagagtgagaccttgtcttaggaaaaaaaaaaaaaaattgtctaacctactatgtatcagagtaggatgtgatttcagtgaacaccacttaaacacaccaaggttggtgaaaacatacatgttgtcaggctgaccaataaacattgtaaaagtattttgatagtgaagcaaaggaaaacagaggaaaagggaagaacatgggggataatggcagagtgaatagattatcttttctttcattcgacaaatacaaattgagtacccactatgtgtcaggcaaatgtttcagtggttggggataaaaagatcaaattcctggtcttgtggagcttgtattctgaatacaaataaataaatagactatataatttttcagatggcaataattctttggagaaaaataaagcagagaccaggatgagagtgttgcagttttaatgaagtctgctagggaaggcctcacgaagaaagtgacatttgacaaaaacctgaaacggtgggggagtaatccataaagatatccatgggaaaggctttccatgcagagaaaacctagtgccaagccatgaggtaggaagactgctggtttgttccaaaacgatggagtgccgttgagatgagaaacagggagttaatggaaaagagggtggaaagataaccttgtaggccatttttagcaatattggctttcactctaaataaaatgggaagcgactgaaatatttggggcacaggagtgatataatttaagttaaactttcaacgaattgctccagcttctgggttgagaacagactgtaaggaggtaagaacagaagcaggaagaccaataaggaggccattgcaattatccaagcaagaagtgataatggattggcctagggctgcataatagagatggagagaaggggttgaattttgaatcaattttaaagataggaccaacagcatatgctcatagattgaatgtggagtgagaaaaagaggactcaaggatgtaaaaagaaaaaaaaattttcttggctcttagattttgaaggaatttcttacatggaattttacatagttgctctttgtgtccttgtgtgtctaagtgtccttggattagtaggaatacactgatttcttctactgcatataaactccactgaaggggcaaagaccactcttattaatctttgcgtcatcattgactagctgagtctttcttattattcaatatacatttgtttaaatagagatactcttcaacttacgatggggttatgtcccaataaacccatcgtaagttgaaaatatcgtaacttgaaagtgcatttaatatacccaacctacagaacatcgtaacttagcctagcccaccttaaatgtgctcagacatttacatcagcctacagttgggcaaaatcatctaacacaaagcccattttataataaagttattgaatatctcatataatttattgaatactatactgaaaggaaaaaacaaaatggctgtatgagaactctaagtaccgtctctactgaatgtgtattgctttcacaccatcataaaattgaaaaatcataactcaaaccaatataagctaggggctgtctatgtgtacatattagttatcacaattataagcacttaggggaaaaatcagaaaggggtcttgtttaaagagttcacacttattcttttattctaaaaatatttattgggtagctacaagtatgtcaatcactgtgatgattgtgtcactgagatgtctttgcttgggggagattacaggtaatacatatttttccttacatgtttgtgtatttaaaatttttcaacattatgcaagttttatttttacaaagtaaaaagaaaaacatttttaaaaggcttctactgaatagatcacttaattttcccagagtaaaactaagaacttgacatttcctacagtgagttttctttctaatccagtgctccccaaggcaaacaaagctatttactggtgccaaaatccaacacctaaaatcatgtaaaattatgtggaaaaaaaagcataaagctatttacaaactaaaactaaacatggaaaatgtagcacaattgtttctccctaactgcaaccagtacagttgtaactcagaggctgttgtctggagtgtggattagtgtagatatttgcaatgatttttgctatgggcatttctgccttaagaaaggcaaaggaaacaaaaacatgaaattcaaaacatttccagttttgatagtttagtagagaactagattagaatacagcaaataatacattttctatattctgttttcgatattctctattatcttcctatcaatggcctcttccattcccagtttgctgtctaatatacctgtctatctctcaagtccagcaattatttcaattcaaaaatccagcaatgggacttgtgggtatcattgtcagggttaggaactaatgaaaaagtaggggacacaatcaaaggaatgggaggtagaaaaagaaagcacaagaggaagtaacaaagcagggagggaaaggaaagacattgagagaaaacagttgaggtgcatagaataaacaggatggatgctacagaagggagaggcctggttctggatctgctcatctgggagcttaaaccatgcacaaaagcacactgctcacatgtgcacacacatatacatacacaaatatacacacacatttatccctaggccctaacccacaggtagattcagcatgaagctaatgaaggttgagcttcagggtttatcacttacatggacctatacattagaagggcctagaagtgtgttcacatggtaatatgttttgaaaagtctgtaaaaacaagatactgttgtattctttttcttaatgagagcttacatattatataatcctcaggcactacaaaatcttgaatctgtccctgacccaaaaccaacaatattctgattccagtgggtttggggataaatgctgtcttcttttatttttttattttttcttaaatgtcaccaagtgattttgatacatagctaggtttggaaatcactgatgaaggactacagactgatcactttaatgagtctctgacacctaggtggtatttctttctggagttttgccaccattgattgcgacataaaccatataacagtatgcagtttggaaaaagctgacaattggcaacattcacttccacattgcagtgatgaatcacataaccctctgtgccgagtaattaactaaccatttgtatgtactggctgtagcgatatagttctttccaacgaggaaggaagggaatttggacataacattaacagttgttaataccaagcaaatagagtaaattagatttattaaaaagagtatgtgtgtggatttttccctaggagttgatataatttgcctagctttctaattatagctgggacagaaaatggctgaacccaaagacctctcacggtatctaataaacttttacttacagggagaacatttcttgggttgaagaatgacaaataatttactaagcttttcctgaaagatagctaaaggtgtttcacctatatccagctgatgaattagctttagctaataatcagtgtcatgagacagggaagaagcagcctgtaattactttgaaaggaatgaaggaacagatctgataaagaaactaaatcagctaattcctctagtggcatactgagtgggagagaagcttactctactgcaagttttaaagtgaggcaaagatgggggacattggtggtttttacctgcctgacatcaattctcattttctcacaacaaaccctcaattttcctttccataggatgcagtttggggcatatgatgcaagattccctgccttcttcaggccgggggtaggcatgtgttccaaacctgactaaccattctcagttgcaaataatctgaatcctgcctgcaatgacttaagaagaaaaccagctggagctgatccatcctgggggacattatatataaatctcactcttatatataattatacatgtgtgagatttatacataaatctcattcatatatataattacacatgcttttaaaaatgtatttgtttttacataaatttaatcaaaataaagagactgaattgcaactataagaatcagaatttcagctatttctttaccataaaatataataatttttaaaagaatttacatcaattaagacaaaattttatgaaacctttaataatttggagtcatttaaaaaattctgcactttaaattcagacagaatctcttaggaatcagttctaggaaagatgagaaaactggcaggcacttctcccttttccctcttcctccttttatttttgttagcaatattattatttttatattatcaggttttaatgtttctgtcttttgtaaccacaattctcatggttgttttcctctggttctacacttagcatacttttatccacaatttttttaagttcttgagatctttattgtgattaatctctggtggctagatactacctttaagaatttttttttaaagaaagattcatcatatattccctaagttcttgtatgcttgaggaagactggtaccctcatgcctgggaaggaacaacatggctaaatagtaaattttgggatcatcttaattttaccttcgaggctttatagataggtgcatcagtttgctgcaaagaagcctaagtccaacatgatttcttacccttcttatgtatctagcttttaatgtctgaagctgtattcttcctttgtatcttaggtcaatacctttatcaggacatgttttcattgttctgtagcaatttatttaactggaacttcacaagctcttttaatttttatagattcaaaaccctttagacacaagatccacaagcatcactcctgttctgttggtctcacttcactccccatccccgcttttctgcaaatgatgctctcaaataaaatgcaagttaataggtattgtaaatgattctatgtttgttcctttcagattgtttcttctttgattgaccggggttggttatctgttgggaatatggggaagtgattaatgagctagagctgtctgtgtgtccagtgttgttaccaaaaacctattatttcctttatgcaggcacacatttcctcccaggtttctatgttcaagaggttacatggtattaataacaatgatttacgtcgtttttgtgttgaattctggcactttctctctgtcatcctcttttgcccccttcacttctggcaatctcctccatttggaggcaaggtgacagacaatgtagatggctcatcaacatggtctgtccattggatccctcttccctgacatttttggggtgtgaaactgggactctttaaagatattctcacctcttcagggactggtatactactggacagtcatgactgtaaaaaagaattgctggatgtgcctttctggatggggatactcacttgtatgttaaccagaagtatcccgcatcattatttcgtttaagaattatgaagttaaagagagtcaataacgttgagaaattatgcaatgaactattaaactttaggttaatttgactaatatttgttgtatgattacttcatgcaaaataacaaaggagattaaaaaaaaagatgagtaaaagaaagtccttgtcttcactttcagtgtggcaggagaataaataaaatagaagatacttatattattatgactgtgcaaatactgttcactgctgagccaactagaaggtgagtattgtgagtatccacttaaaatactgtgtgacactactcatctccacctgagcagtacatctctcagtaaattgcacatcatagtaaaaagtgatctcttgcagttcttgtctatttttttatcatgtttaatgcaatactgtaaaccaggaataacatcatgggacatatacaacatgccactagtgttgctgaaaatgctcccaagaagcagagaaaagccatgacattacaagaaaaagttgaattgcttgatacatactatagactgaggtctgcagctgcagttgcctgccataccagaataaatgaatccaacgtaaagaccattgaaaataagaaaagagaatttgtgaagctgtcattgcagctaggccagcaggcatgaaaatttggcattttttttgtgaaatactacacatttttatctcgtattgaaaatatagcttttatgtgggtacaggattactttaagaaaggcatacctatagactttagtataatttaagaaaaaagtgaagtcattacagtaaatgacaaattaaagcaaaaggaagatgaaggatctaaatatggtgaatttaatgccagcaaaagatggtttgataattttagaaagtggtttggcctaaaaaaatactaagataataggagaagcagcttctgtcaaccaagaggcggcagagttcccagatgtcattaagaaaatcataccagagaaaggatatctgtctgaacagatttttaatgtagatgaaagtgccctattctggaaaaaaatgccacaaaaaattttattagtaaggaaaagaagcaagcactaagatttaaggcaggaagagataggctaactctgttttgtgcaaatgtagttgaattcatgatcaagattgcccttatctataaagctgctaacccatgagccttgaaaggaaaagatgaataccagctgccagtcttttggttgtacagcaagaaagcctggataatgacaaccctttttctggactggatccttggatgctttgtccctgaagtcgagaagcaccttgccaggaagaaactgccttttaaagttcttttgatattggacaatgcccccggccacccagaactccatgagtttaacaccaaaggcatcaaaatgtctacttgcctccaaatgcaatgtctctaattcaacctctagatcaggaaattgcaaggacctttaaggttcattacacatggtactttttgaaaagaattatcaatgctgtgaaagagaacccagatacaacatgtaacagtctggaagcatgacaccattgaagatgccattcttattattaaaaaaaaaaagctgtgaaaacaatcactgctggagaaaactgtccagatgtgcatgacttcacaggatttatgacagggccaatcaagaaaatcaggaatgagattgtggatatgataaaaaagaaagaaagaaagaaagaaaaagaaagtgaggggtagaggatttcaagatgaggatctgatcttggggaaattcaagaactaatagacactacaccagagcaattaacagaaatgaagataagtagtacttctgaaccaatgccagatgatgaggatgaagatgtagaagaagctgtgaaggaaacaaatagacattagacaatctggcagaagggttcccattactcaagacggttttggacttttttttcttttttaatgacttggacccttctatgaagtgggcactgaaactaaagcaaatggtggaagaagaattggtaccataaacacttttagtgaaaaaggaaaacagacaacaattatgctgtatttctgtaaagttacactgagtgtagctgcctctcctgcctcctcttacctgtactccacctcttcctcctctgccacccctgagacagaaagaccagcccctccttgtaagcctactcaatgtgaagatgattagaatgatgacctttatgatgattcatttccacttaatgaataataaatatattttctcttccttatgattttgttattaacattttttattattatattttacaggtttgttacataggtatacatgtgccatggtggtttgctgcacccatcaacccgtcatctacattaggtatttctcctaatgctacccctaccctagcctccacctcgcaacaggccccggtgtgtgatgttcccctccctgtttccatgtgttctcattgttcaactcccacttacgagtgagaacatgtggtgtttgcttttctgttcctgtgatagtttgctgagaagatggtttccaacttcatccatgtccctgcaaaggacatgaactcgtccttttttatggctgcatagtattccatggtgtgtatgtgccacattttctttatccagtctatcattgatgggcatttgggttccaagtctttgctatcgtgaacagtgctgcaataaacacacatgtgcatgtgtctttataatagaatgatttatattcctttgggtatatacccagtaatgggactgctggatcaagtggtatttctggttctagatctttgaggaattgccatactgacttccacaatggttgaactagtttacactcactcccaccaacagtgtaaaagtgttcctatttctccacatcctctccagcatctgctgtttcctcactttttaatgatcgccattctaactggcatgagatggtatctcattgtggttttgatttgcatttctctaatgacttttctctatttacttcattgtaagaacacagtgtacaatacatataacataaaaatatgtgttaactggctgttcatgttatcggtaagcattctgatcaacagtaggccatcagtagttaacttggggggaatcaaagagttgtaagggctgggctcacacctgtaatcccagcactccaggaggccgaggcgagagggacagcctgaggccaggagttggagaccagcctgcgcaaatagtgagaccctccctgtctctacaaaactttaaaaggtgtgatggcaggcatctgtagtcccagctacttgggaaggctggtgtgggaggatcacctgagcccaggagttcaaggctgcagtgagttatgattgctgcactgcactccagtcctcttaaaagaagatttttgattacatgggaagttggtgcccctacacattgttcaaaggtcactgtacttaaatttaggttattccatacgaatgaatggatgattttctaaacgtaagttgtatacatctagatgtactttatcaactggagaactgtatttaccattgagtaatataatatttaaaattaaatcctgaggagggggagtgagggttgaaaaaatacctgttgggtctaatattcactattcaggtgatgggtacactaaaagcccatacttcaccacccagcacatgcattttaagaaatctgtacttgtaccccctaaatattaaaaaaagtaaattttggacacttgaaacttttccaaatagtctcaagaaatagtttctataatttgaatctttcctttataacatatttgaaacatttttttctgatgtaaccagcaccttacatacactaaatatttttatttcaagatatatgaaaacaaacaagtaaacacctgatattttttgtaaaagagtattttcagtaaggattggttttgctaaaataagtttattaacaagacttgattcagttggtcttttagtaaggttaattccacttggtttaattgaagcaaatcttgatgaaatagtattatgcttccatttacttctttctatcatctacccacaatatatgtaatagtgattacattcagccaactatttttcaggtcaagagagatgtcttcaagaaaacagactatgattgacagttctcccaaatcagtaatatcataaatatttatatatacagttataaacaaactattagtttaagaaatgcaatttatccttggtgataatagctttgaaggttaaaaggcagaatttaacattttagttctctaaaatcttatgctttcaacaacaacaaactgttctaactaaagaatatcagacaatgtagttctctctctactgattacatttttttagatatgcttataactactatgtgcttaaaaattatttgtgtgcattaaatgcattacttggcagaactcttcagacaacaagtaatgaaagatttcaaataaaattccattcccaaaagcttctacttaagtagtttgaatttattgaagctcctaatatagtaaaatctactgaattttaggtgacaatctctttttaaagcgaaccctataaaaggagcaagttgcatccacagagaactaacaaagtgcaatgtacttaatttcttgaacagattttattagatgctaaatatagtaagcctctccagagacagtattacatttcaggggattagaggatttgtaaaaccactgtctgctcataatggagggcttatcaactgaaaaatatttttaatgattttactgagtatatcatcacatccatgaacataagctgcatttaagactgcaatgaagcatgatctagtgttttgatcgcttttataagagttacataatatttgtaacgattcttcagtatactataaattttcttaacctggataaagcactgtttcatttatttggtattgtggaaaagaaagagttccatataagtgaaataaacacatagcacaatcttactactttacagtgggttacttcatgtgaaattgacacttttgtgggtcaaaaattgttaaatacggacaatttcaaatggctcagcttatacaccaaaggtttctcattttattaataactactttgggtagaaatagttctggaaatttttactttcttgattatcttttaaaatagcctttattagatctaggcaaacttttacttaatgataatgatttcactctgctgtagtaagaagctgtgctcagaactactgaagagatcgttactaaaccccaatgcctaacgggcccatgtaggtaaaggcaacaggtgaaggtgctttaatacattattttgacagggacacactttgtttgcacataacacacagaaatatacttctcctccgtaaagacatgcacttgctccctttctgtatctgccactcattcctctaggcctgccttcctattgctcgcttttgatggtgactcagatgtaataagtacattgttcggtttcttttcagccagagtattttcaaaaacacacaaagataaatggcaaccaacactgggcctccgagttggggagataatggggaaaggtaggcactgggaatactgaaatgccctccgtgaaagtgggggctgtggtaaactggaaccacatacagtgcagtcagtttaaattcccaagaacgaataccttttaggaatgtagctgcagtgttgctagatcttgaattcttcaagagagacttgaaatagacttttaaaaatgtgaattacctgatatttaactgctagcaaccaaaacaagacaaaagaaaaacaccgtgtagaggaacatcgtgagagctaaacgaaaccagtttgtgagctgaatatggcccatggagtttggaatctctgttctaattgtttccgtactatgctgtggttttttagtttttctgtgtatttctctctcttcccttgttttcatagctgtttttcagcagttccgaagttagctggatactttgagaaatcagatcatcacacttgtcacaacagtatataaagttggaattaataggtttatatgggaggaaaggacaagagatttctctgaaatgatttaatttattgatacattaaatcaataaattaatttatccaatacatcatcacagcaggtttttaaagaaatatttattactggcaatctactaatgcagctcagagtatcagagacacaggtaagaaagagcagttgccatgtgttattatcctaccacagcattcctttattagggtaggagttgcggcggtcaaaattgttaacactgcaagatttcaaacaggtaaattcggattatccctcagacttaagcaaagcatgggtatctcagaggctgttctcctccttctgttaagtaaagcagctacctgaagatgatgtactcttggagaccatctaaaaatatcttttagtactttcttcccatctgcctttatttattttttaaaagttcttattatggaaatttaaaaacaaaagtacaagagattttatgcatgcactttgtggtatctattttaattgcacaaagtgtttttttttttaataacttgcaggcttttggttcatgttctagttgaagttggttgataattgatctccagacaattgaaattttactgtagtttgtataataaaaatcatcattcactacactgactgaataaaaagtgaagagaatagaaattttgtgttttgtctcagttagtcatttataagactgaagaactttcctgtgtatttcatcaacctctatatgatcaaaatgaaaactaataaatcatttagattttgtctttgtaactgtaacctgacttgtaatctaagcttacaaaaacaacaaaaagacttcggcaacataactctggaaaatatttgatattttacagaccttacaacagtgagacatgtcattctacattattttttgcttttgattttcaatttaaatattagctttacttgatacacctttaaaataaactatcactgaaaaagaattaatgaggtatatttatagagttagtagcagtcagacatacaataactaatgaaaaatgtatttattgagcattttcaaggtacttgaaacagtatctcatcctcactataacactgcaatgtattaaggtaagccacacggaaatgctgtttttatagtccaaacatcagcaatttcaagtggttcaagttaataagtaatattagcatagatcttattttacagaagaggtaactaagtaaagagaggtggaatgatttgtttacagtcatgcagttagtcagcggcaaagctaagattcacattgaggtctgcctggtccagaagcctgtattcttatatcaaagaactgtggtgggacatctgctgataggcaaagacagaataaaaggaaaaaggtaaagataggtctttaactacgggagatttataacttgcttagggagaaataataatgccaaaattaccaggaaaaatagaaaccatcctaacacaaaatgcaaaatattgggacattcgtttttacaccatgatttgagctttactggtgcaacttcagaatcaattttcctctgctgttcttcatttctcaagtgcttttttcttgaggccattagagcaccatgtcactggttggcaagagagaagtattgattatacgatccaagtactacaagggcagctttctctaaaatatctatagttacatatttatgagaattacattttgactttgatatctgcataattcattacaaaacaaacagacttctaaaatattaatgactccaagcctagatcccctttccagagctctccactgcatttctgcctccggggcttcacctggatgctctagaggtactcaaaagcaacatgtccatttataaactcactcttttgtctctaaacctattcttcctcctatttcctatctcacgatggcaccacagacttgtccagatcagagccaggagagacacccccttctcccgctgccactggcctccaagttcaaatcagtaactcactattgatcctgtctcctaaataactctaccatctctttcagcatctccaaccccactgactctgctctatttggatcctcatcatctctccccagtcaacgaccaagtctaactggtttcttgactccagtcttgccccactccaacctagctttcttagaaaggaaactttctgttacatcatctgatatataactatatctagtttctagttataccaagcatatttaaaagatgaaaaaccaccttctctccttaaatagcctgctttggggcctagagcaaaagcacagacatcataaacactagataactcaggttttggcaggtaagtaatatccactgacaggttgggctccttaatggaatatttattcatgctaataataaaatgtaataacaaaacccaaaaatatattttgcttaaataaatttgctaaaggaccaaatgtgtaaaataatatccatgcttatatattatcattctaagaaaatataacatatgcttaattgctattagattttttaactccaggagtgacattctgacacaatgctgaagaacccccaattttgcggcaggacctctgggtccctcatttccaggggtgaagcaggaggaggagggtgaaggtgggaagcagagggaagaggagggaagaggaaaggaagatcccaaataagtgagattcctagcttcctgcttccaactcaaacagggcagctgaacttttttgctatatatatatatatatggattgtggatcttcataaaacttaataataaaagaataataatgcttcaaatagtaattttaaaattattgctctatagtctaagagatgagaaaaatttgaatagatgagaaaaatttcaatttagtgtgtagcaactaattgtatatatacataaaaacagtttgtaactaatcattaacacaaaaccaattcctctttcataaatataaaactattctgtgccttcttaaacattttctgtttataaaatatctgatgtatttctaaaaagagcttatcccaaactcaagattttatccaacattgttctgattaattccttttgctttgatttctcatataatctactttttttgttgttgttgttaagcaagaataaccttaaaacaaggtgtatgggatacctcctcagacatccatgttgacatttgtttgctatttgtgaaataacatatactgagtatatattgtgaaaaatgactcttcaaaatacatcaaatacactcaattacagacatgtatagttaaatacagccaacaacaggtcattctgagcatacatatgatcacaatgtatgtgctatgtgcatgtatgtatatatcttctctctctggatatacagatgaagctataactcacccacactaaaagattattttcaagactttgtccatctggaattatttccatagtggaatttcatatcacacttttggggtggagattcccttttaataaattctatatgtttcacattttctctgggcctcagctgcctcaggcagctacagcctcctgtggtaatttgtgtgtctacctttgtgcatatatgcctctgggcaacatttcttagaatgaagtatgggactgtagtcaaactcagcaggaatataagggcatgaccacattgggaaccaatctaatattatgcccaaagaaactgaaaaggaaaagaggcagactacatgcctagagtgaagctttttttttttttcaagaagtttagcaaatctggttaaattccctggatccaaatgtatattttgaccttttcttggaaactagatgacaggccagccaagtagtcagaataatttctactaatacatatttttaaaaggcatgttccttaaacatcatagtgattcaagatgttatgtttatatgtatatgctaaatgtgaataaaatatatccagtatttattactttaagcttcatatactaatgcttaattgataaaaactattttaaatataagtaaaataagagggaaaacaatatagcacccactgttatgaaaagcactttgaacataaaaacaacaaaaggaacaacagtttttgaatatttactttgtggtaacatcatgctaagtgctttcatgtatatttaccaactaatcctcagcccattcttgtgatgtaggtgctatttgtatcatctaaatgagaaggctacatttcagatgattgagcaacttaaggacccagttaataagaagtagggacaggactggagtccaggtctgtctgaccatacaggatcccaacatctcacctcataccactgggtaatcagataaaactgaaaaaaggacataaggtaaaaacatttgagtggggaggacacgtctaggaagagggctaataactgcaaattgttatgaatagtaaactaaagtaaccaaagagatttaaaagcaactaaggagtggaataccgtttcatttaaacagtctgaacaaaacaaagaaactacacattcattaacattatgaaatatttaggtagcttataatactactgttacattaaacttaattttctttcaattaggcaatatctctagaggagtttccattccgcatggcaagtaatgtgatactgaaatgcaagggcagacattttctagtcagagttagaaatacagtcaaactttcaaatcacaattaatatcttcgtaaaatagataaaactcccatgacatatatagtaattcattgatgaatggagcaaaatattaatagctaatttgcaccttcctaccctgttgtcctctacctctccttgaccataccatccatttacacttcacacattgaccttgtaaagacctctgaagtgtgactacagtgtaacgaataaggagtagtctcaaaagacgactaatttgaaggcagtgacaatgatctaaatggggaagctctagttatgttggttaaagatcagtcacattactttataagcatcctttgtgcttttagaatgaaattattcagcagccacaaacacatacatacgggctcagaactaagcacctgtgaactctcaacacagtgcctggctcagcgcagctgcaaagtagtatctctccaaaatgaaacaaaacgaggcaaagcaaacaaacaaaaaacatggagccaaccaagctacaaaatgggagaaaatttttgcaacctactcatctgacaaagggctaatatccagaatctacaatgaactcaaacaaatttacaagaaaaaaacaaacaaccccatcaaaaagtgggcaaaggacatgaacagacacttctcaaaagaagacatttatgcagccaaaaaacacatgacaaaatgctcaccatcactggccatcagagaaatgcaaatcaaaaccacaataagataccatctcacaccagttagaatggcaatcattaaaaagtcaggaaacaacaagtgctggagaggatgtggagaaataggaacacttttacactgttggtgggactgtaaactagttcaaccattgtggaagtcagtgtggtgattcctcagggatctagaactagaaataccatttgacccagccatcccattactggatatatacccaaaggactataaatcatgctgctttaaagacacatgcacacgtatgtttattgtggcattattcacaacagcaaagacttggaaccaaccgaaatgtccaacaatgatagactggattaagaaaatgtggcacatatacaccatggaatactatgcagccataaaaaatgatgagttcatgtccttcgtagggacatggatgaaattggaaatcatcattctcagtaaactatcgcaagaacaaaaaagcaaacaaataaccaacatgattctacctggcagtaggctaagaactaattctgatgtattttggttatttagtcaagttaggttatttgctaatttctccaatattcaaatactgtctctcacatgcagagaatccactttttaattcaacaaatgataatacagatctactaggttaagtttcaggcacaatccttaggcctggaatacaaaagaataggttgagtgggagacattaaaatatatcatttaaagctaaaaatatccatatattcaaagttaaaggaagtctgagctcatctgagaaaacgacatacataaaaactgagatatgtggccaaaaacctatatgcaattaattctccataaagagctatggatttataggtagggataatctcatatgtgctggagtagtcagaatacttaggagaagtgggctatgagcagggccactgaagcacaagacagctgaaaagtgacaggaggactgcggggcaaaggcccttgggtgggaatgctcgtggtagaatggagttcaatgagcatatgagggagcctttatatctctggaaagaaaccgctagcatcagggtgggaaatgtagtttgagatcttctgaggacagtgttaaatgttaaatgccagtttgagaagttgaactgtattaatggcccccaaagcctcaggcttatggatctgggacagtgaactccttctgaaatggttctatctgccgttgtcagtgcacacctttgctggctgcagcacagcaagtggccgtcgtgatagattgtgccccatcttaactatgattaactgaacctgtgatagtctcatttgtacacttaaatgaacataaatagatgtttagagcaacctatattgagattctgggtaaaaaatgaacaaaattaaatgaattctatactgtgaatcaatgtagattgagtaaaaacacagtgaagggagtatttccagtcagaccgttttgaaggctcattattaactcatttaagtggattctgagtacttcagaaagaacaattgagccaagtttccatggaaagagccacaatttgtgcacagtgcttcaagactgtcaaattagcttcaaataatgatacctactgtatgtgaacagtgtttattgctcagtggctacacataacttgcatattctttagattaacagagcttcaaaccataattagctgccttgcctaatgagcacatggaactttaggaaggtggttgaatgaaattgtctttaagatccttgaacaacaatgagaatgatggaaatacaaagaatagctattagttctggaggcctttgaaacattttgcccctaaactaaaatatttcttcagcctatcctgcatcataagcttaagtagcaaaatcttacttttctcactaattgaggcctttttgcctgagggatttttcaagaaaacataatggcagcatcttcttcacatcctcacccagtgaattctgagactctaaataaaacataaagctctagtgcagagacaagagaggtgagcagaagggctgagcacaaagattgagccaggccgtcagaatgcatcaagcctcactcttgaagcactgggatcagaccagagcagtcctctacttccaaggaggtttaaacatttcaggaataaaagtcagtcctgaggaaggcaaacaaatatatttatatttaccttactgttattgctgctgaatgtatatgatacactttggttgtgttctacaaacctggcttctttagaaaagtaaagtcactaaattattcttggggagctacatacactgaactaaagtgacttcaccacaagccactcaaataaatgcaactcagaatctccagtgtcatttgcttgcagtgtgggatgggggtttggggagggaggttatctggggtgggtaaaggcctggccatgggggattaggggacaaactattcaagcaattcaagaaaaggaagaaaagaaataatacaattgggcctgactgttttgaaaactaagtatgacgcaaatgaagtaaattaaaaatcttttaatcttaaaaacttaatgagtgataaattataaatacatctactaggacttctagaaggctgacatacaattttaagactaattgttttggtcttcaaaacgacaaaatgagaaacagcatggtgtagcagagattctcactaaaaagtatccatctgaaactgacagcaagcatcagatttgatggtccagtagtgtaagtatccattaaagccataaacaagttaagagatgcctcaaacattcccaatacccagtatattcatggtcctagataatcacaataaaaaagaagaaatatgaggcataaaaattggaaagaggcaaaatgatcaggatttccaaaggatataattgcttacctaaaaaagtataagaaactcaagctgatataccattaaaaatattttttaaaaatttagtatgttagctagttacaagatccacaaaaccagttgtattccaacacagtagcaagaaccagttagaattagagaaaagattccactgacattagaaaaaacatcaaaaaaagttatataggaataaacctaacaaaatatgaaatagctttgttgaaaaaagtataaaactttattaaaggacattaaggaagacctgaaatggagagctataccaaatttaaaaatgggaaaatctaatgctataaatacgtcctttgtcttcagaaaaatcattctgtgcaaaactacattcaatgtaatcccctaaaaataccaacatgatttttaagaaaagtttaagaaattgatcataaattaatatgaaagaatattatgtgagaataagtaagataattctaaaaagtagttaagagagggatgaatctgctagatacacagtcattatgtaagttgcagtagtaacagtatagtgttgatgtcaaaatagacaactagctgaagagattccaggaacagacttgtggatatatgaaaatttttataagagaagtgctatatctaatcataggaaaaaggatattgataaatgatgtagagaaaattcatgtttcgtgtattaaaatacacagatgccaatatcacatataaaaagcaaattccaggtggactaaagacttaaaccttaaaagaaaactgaaataattatgatactagaggagaatatctgactttgtgttgcagaggtgttacttcataatagaaaacacttatgtggtgtttattctgtgccaggtactttatatatattaactcacacaccttgcagcaatctataaggtagatactattattattctcattttatggctgaggaaatgaaggcatccagagattatgaagttgttccagacctcacagtcagtaagtgacagagttggaattcaaatctcaactgttaagacctaaagcacataaaggaatagattgaaaaatgtagcttcataaaattaaattcttctaaaagccaaatacattttaagccaagataaatttatgtggcagaataagagaaaatatttgtagcatgtaacaaaatagggtcaagaatatatatttttaaattttacaaaggtctacaaaaatagaaacatgggcaatggttacaaataatttacagaagaaataaaaccggccaataaatatattaaaatgttatacttcactagtaataagggaaatgcaaattaaaatgtcactgaaaggacctttatcattggacagaacagcaaataaaaaggtttgataatacaaggtgtaggcaagaattaggaaaatggacactttctcatactgctgaggggagtataaatcgatgtagccaatctggaggacaatttggaagtagcaattaaactgaaaatgaatacagctcaggatccaaacatttacaatactaacaactttctttatctggagtgcttaccttgtgccaagcatgtaactccacaccttaaatacattattcatctaatccttatcacaactccatgatgaagagaatgaaactcagattgttaaggcaactcctctaaggtcccatagctagtaagtccagagctgggatttaaccagcgaagtatattgctcgctgcacccaaagaagttcactgaagtatttattatagtgaaaaatgaagaagagcttaatgtttaccaacatgggaatatataaataaaacatagtatattcatttcaaggtatacacaaagtggctaaaagaacaaagtacatctatatgtatcaatatagatgaatctcagggaatactgttgaatgaagaaagcatgttattgacagatatttacactctgatactatttacataataaaaacaaaatacgataaattttggatgggtacatacatataaatatgtataaaattatttggaagtatgaccactacgaaagtgttttccactaaggaagagaagagaggattaggagggagactggtagctaaaaggaacttcagttttatctgtagcatcatacaggtttttacgggacaatgtattcatatattatcagtgcaattacaaatgtaataataaggaaagtgcacaatttggtgccccaagaacctgggttcaaattttagctctgccacttatttccatatttggccaaggaatcaaacgttctgaaaaagtatagtgtaagacttagggaggagctaaggtctgatgtgcaggtgggcactggggaccctttgaaggatatcagtggcttaactagggtgggaaatagctaacataagattataagtgctttaaaagtagagatcatattttatttatttttttatcttaacaatgattagctttttacacaataggctcacaatacatatggagagttgctagagagactttaggagaatatatgagttcatggggagggtagaaggagctgaagaagctggtatggactacattatttaccaccaagacagtagccatgaagggcaatgagaaggtggcatttttgtggaactgacagactgaaggaagagaggtttgttttgttgccttagttacattccaagtaggcagaatgtagaaatggcatgtcaagtcttggagtagggcagaggagatgggatgagagaagtatatgtgcagatggtcgggttaagagaagtaacatttgcttctgatatgggagtgtaggaagagaagaaccatgaagagacagtggtgatgtggatgacagtgatgatcatgacaatgatgatggtgtcactttttatgttcccttgatcctcagagagtgctacttagtttcaaaagatttagagctcccctgagaatttttgaactttaagtgaagtaggtccaccaactcttgactgcactgcatcctggagatgaggggtggagggtgggagggagaaaggagcacactctaacgcttagactcctcctctgtaacatctaagaacagcatttggggcttagcttcgtcaacaatatgaaagagatgctatctgctcagggcaatagtgtcactgcttattctgcaaaaactatcagctgtgggtgaaaagtcaaatccaaattagggccaaaccagggcaattttagagctgtgaaaaacagtacaagagcatgtgccacacgggattgaaatgggcatatttggatgatattatgtagacaggcaggaaaaataaaggggaaagactttaggtttcattttatgagtttttttttttttaacaggaggcacttcacacaatgatataagtataaaatgcaaccatgagtttatggtatgaaaatttagttctataggaatacttcattatagatttagtttaaaaacctccagtaaaacggtgaaatgattcctatcaaatttaacttttctctaaaccctacaagtagttcattgaaacgagaacagtggttcaaatcagagagtatagtcaatttaagtggattgatgggttactagagtcatgggggaaaactctcctttatgtactgattacactactcctttgaaaagtgaatttccttccaaaagataaggttgcaatatccctacctggaaatacccaaattatgagttctctctgctgaaaggtaaaggggatgatgggcaggataaactttccccaactcatttcagcttaagcatctagtctgtattcttttttagatccacaggtgcaaggaatatttgctgctgcccaccaaattattcaattttcctttaagaatcaggccatcccgaattcttaactgtacttaggtggttgaagccatcctcaactctggggttaggccttgattggctaaagcacacttgtgtattccatccacttggccacagtggtgggtgggcatttgacataagtcaaccccacccaagtgaccccgggacttttgctgggaatgctcagaggattctttctttcttcaggatggtacttatgaggtgtaaggtctagaactattgtagccctttctgctaccataaggaaagtctgcctgagaataacaccaatatattgagtaagacaaagtggaaggaattggagaaaaacagagctgaagcctgagaactgtgaactgttgctccaaaccttacatataactagaactacctcttaatttccatgagctaataaacctcccttctttgtttaaatcagttgagttgctgtttttactaattgcaaccaaaagattcctgaaaatactccatttagttaatggttttaaaaataaacatggatagaacactgaactacactttagtctttgatgaagaagataataaactatcttttgtataaagaaaatctactttcttactataattgcaattttaaaatatattatttgcttagacccaagcatctcttcattatttttggcaccccgtaaaatttattccatatggaatctggagagggatgtttgaattctaaatgaagagtctcaaccattacaagctgcataaaacataagtaaaacatttttgccaattttttaaatttgtataccctattttagatctgggaatctgacactaaaaatggcctcagatttaatgttgatttgtattcaatgccaacaataaaaaaaagaaccgtagttaatatgtctttggtgtttttattttagataactgctatttcataagaacgttttcccagactgggtaagggctgggataggggactggtttattctttatatgtgaagaaaaatttccaccaatagtctggaaaaaatacacaacagtcttcttttctgcaagaacttatgaaagtaatgagatgttttccccttagcttctaagaaatttacagtgagccacaatgttcttgcgtaatctagtcttgggacatataattttagaagctgaatgtacctttttgcatgtagaagtaaaagtaattttggtacttataataaatcaacagctaaacaggaggattgggtttgctctagcctcgtctgctgccttgttcaactgctagaaccaaataccttaatccaaacttgacttcccaaacatttcatcgttattgctagttcctgctgttccccctgtctgtgttcaatcaggctgacatctattggttcaaagaactttacacatctgccagcagacaaaggatgcatgttgccgcatctgtatgttaccagtaggcaccttggacttctcttctttttgcagatattttctctcactgtataaagattcatttaatactttctttgctccagacaatagatttttcttcttctgatggggcagtctaataagaatataacctggttgcttaaagatcttctgtgtagcacagaccttacctaagccactgctaggcagtgtacatggtgcagtaaacataaagtccagatccccagtgttatgtccatatttattcaataaagactaggtggtttgggactacgataatcaatcctttgttttcacaaggttttatgaaatgtaaggccatctaaacatggttaaggtcatgcttttaaagtctaaaacaaaatttacaacagaggttgggaatgctctttgttgagactaaaatcactgtaagaacccaaccttatacacattctacttgagcatgggggtaggggaggagggctaccccatgtactctaatgtcttttctgacattatagttttcctgaaagctgcatcacctcctgcttaactttgtaaatacagtctcatgagataaaaatgaaactaaataaaggtatttggaatatacaatttcagaaaaggctgttctttcctcaaagatattcaacaataaatagacattatgtttaatcattttaaatgaagtcaagtctaaaatttgctatttttattccagagcacaggctatacaaatatatttcttctttcttatataagaaaataaacttcttaaataagctgtcctacttcccatggctcctgggcataaaatatgctatttaactaaagaatattttacttcttccctttatcttgttcatcttccacaaaataatgtacatagttcaccttcagaacagactgaatgagaaaatgcctcaaacatatgtggttaaaaatttttgttttcggaattaaaaatactcagaagtagaaaccgttttcttagtaacatgctaaaaatttagtctctgagtatgatcaaaggtgtatcgctaagacatagcaacttttggtgaagaatcctacttaggatttcctatttcatagcctgtcagtatatttctatcccttcataaagacttttcaaagaaactagtaaaagttcactttgtaaaccttgaatatcttttaccctgttaacttgcaaatattaatagattactaccaccgccactactattacaattacagctactattactggctgctgacagcaactgttaacttgctagaagagagcaaatggggtgggagaagccttctttatttttctattctaatttctaagattactgagggtttaaaatgatcttgtgaggatgctggtaaaaccacagctgaaaatccagagaatgagcattctataaaacctaagaatgaaataatatcaaaagctttacaaagctgtggactttttttttaaagaaggtgaaagatgaaagaaaaacctgcacaagtagcataccaagaaacagatggtctttttaaaaaatgaaccaagagtgtgccttccacaagtctgcttcttaattgtagcatactgagcactttcatgcagatgatttcaattgctaagcacagaaccgaataaacagggttagctcattgacactaaatgacatagtgtacttggagctcatctactatttagtctgtaaacacctgatatgcaaaattgtatgaagaaactagtgccaagacggtttaagattaaccaatgttcagtgaagatttaaaagcttggctttcattttgctaaagatgctccctttcatatttaatcaatgaaccagttccgttttaagtgcttgatttagaatttatgattttgtttctttttggcttattccaaaatgagttaaagaaagcttaaaactaggagaagaaaaaggaaaaaacaaactcaataacttacatgagttaagcagcaatacaatttcacaagaaaatttcagaaagaagtagattattgaatttaccttccactgggcagactgagaaataatggtttaaatgtttattacagaatcaggacagaatcattgaaacgttaataacaatcctcagtgaaggtctccttctaccttccacatttttggcttgccatgccatgtcccctcattccttgctgaggaagacttttggtgagcatccaggcagatctactcaccctcaggaatgcaggcagctccctcagctcccatgtggcagaagacccagagcaatgggggcctgctgtgaagagaggctgagctccctggaggctgtggggctggggcggcccttatggtggcaaaaccagaagtgattcagagtctgcacacaactgctctccaacttccttggacagtcgtaacccagtcaagggtaactttaagggctggctgggaactggcaaatctagggttgctgagattacattactcaaatgtacagagagtttttaaaaagaatcttgatcagtatcttctgaataatttgggtactatccaaacagctttttcatagacagaaaacttgagtagcttgtataaactcttagtttactattattttactaatcagggtagccaaacaatttctgaatactaaaatatggaacaagaatatggataagtttgcattcacatacctatattactgctttctatatacataaacacatgttgaaatatttatatatatcaatatcagtatctgtatttgaaatagttaccttactgataaatctctgtaaatgacataaataaaatcctagtgttccactgaattatgatagacagtgctttcatgagactttaagctcctcaaagacaagaaatgtgtcatattctgttgttgattcccaatgcttagccttgctgctttgctgagtaactacaccaccagcttttgctcagccctcttctggattttgtagatccagggaagccatgcatgagctcttgctttcattatattttaatcttaaccctctcttggcttgcattgctagtggactatactttgtgggagaggctgtgtgatgaacctgggtgtctggcaaataaattctcaagcagtatctctattttgttacaccatagtaaaactttgtttactttacaaaaaatattaccagtatcatgttctttttaaagacagataaacagattacgcactgagtcaaaaaaagaaaaaaaattgcagggtcctgactaactaaagattggattccttatcttggctacataataaataattgggatgacaacactggcatcatcttgactctcatttgctcttacacccatatttgatccattagcatgtcctgttggctccgctttccatcgatccaggatccaacagcttctccccaattcctttgctcccacttgggtccaagcctggattactgatggatcgcaacagcttcctgacaggtacctctcctttgtctccagaagatctactctcatgaacagccaaagtgatcctcttaaagtgtatcagctcaggtccctcctctgctcacagtgggttctcacctcactgagggtaaggccataaaggctttttacacgctccagtgtcttttacctccagatctcaactctactgctctcgctcttgctcactccactccagctacactgctctcatccctgttccaccaacaaatgaatcatcctcctgtcccatcccccagatatgctctatcctcccatccccaaatcttcatggctcatactctctcgtctttcagatctttcttacagagtcctcttctcaatgaggtctttcctgactacccttgttaaaatgccacttgcacccattctccattatcctccctgccctgcatcatttttctccagatcacttaccaactgattgtatttacagcatttactgacactagaatgcaagtcccaaaagggcaagaatttttgcttttcttcagcgctttatttccagcaactaggacaattcctggggtatagtactcactaaatacagaataaatgaattgaatgatgactatatagtgcaaccaagcaaccttctaagatctagttttatgccacagttgcaaaatgcatacttaaaacttaagcaaaacagcaaagttattcagtgttgtcactcctcttcagcaattagacatttcaaatgccatattagtatgtttttgagaaatctgcaaactgagaaccaaagtgacagggccaatcacattcatattgaaactgtggatgtgaatctttattttctttttgagacagagtctcgctgttgtcacctgggctggagtgcaacggcgcgaccttggctcactgcaacctctgcttcccgggttccagcaattctcctaccacagactcctgagtagcagagattaaaggcgtctgccaccatgcctgactaatttttgtatttttagcagtgatggagtttcaccatgttggccaggatgtgaatcttagtataggaattccgaatcttagtagcacactgcctttgtcatttaatcagcaaaattatggtggccagaaagagttaatacaatttctaggtagacatgaattatcagaagggattgcaacaacctaactcaatatgaatctgagaatatttcttaggtggtcaacttcaagggataatgaagagatgtctgtaatatgaataaatccacaccccaaattcataagtgaacttttgagaaaattgaatgacttctgtatagcaccttttataaatctagcagaagccaaatttacatcaatgtcaaaggcagagtgaatccttctccaggaagtacctaatcctgcaataaacctgttgaacagacaggtttaatgttcaccaaggctaagtgtttaagaggtctccacggtataatttgtcaccactacaagtttctgctttgccttaaaagccgtgaaaattgctccacaatctcactaggaactaagttgctcatgtcaggaccatggtttacaatgcatttctgttttcatagaacttccttgtttatggcttgttgaaaaaaaatacatactattatatacattataaaagccacagaacatagatagctgcatgaaaattcaaagggtaaatgatttaaaaactaacattgtttgactataataaattgagtaaaaaataacattgtattgttcatctaacaaggcacaacagtttgaatagaaggtttcagatttaaatgggaatgggggagctggtcattgaatttttatttccaaccagtggaaaagttaattatttacacactagcagctcaatgactataatgtagtccctgaggcttcttcagaaattctgtaaagttaaacagctgccaccttcatttagtgtgccaaatatgatgcaagggcagtggctgtgtgcatatatcccatacattccatatatttgcatgtaaagtattaagaaatcagtaatgcaaaactgagtatcaatgagccgctttagtagattttccatagctgaaggcaatgacattgagaagcaggaaacagtatggcaaagcacagggcatagatggtggcatggcatagaggaaggggctggtcgtaaaaaggaatgtagaaaatggagacaacaaggcaacattttcttacttactgttaaaccaactccacatacaacttgaagagttaaatccaagccagctgtcatgatggctgctggaaaccaggaaggggcagcaagagctgcccaaggtgaacagtccaacacttgggcttccccttgggaagctcttgctctgagcactgctggctgctcctccctctgtctagaaagccagggaaggtacagtcacataacccaaacctggtttgacccaggtttactgaatcctgattccatttcaatgactattcagcacttgctgaatataaagctcacattttctctgcgcacatgggtggggcagtattgctgggagccagcagactgaaacgtggataccaaagctaatggcagagacctgggtatcacctgacagattctgaacaatgatgcctgctgctggcttccctacacaagtactaagcgatgttgggaaagacagagagaggccaataagacctgctttttcccttagcgtatggaacatttcatttccaaaatggattaagctcagacagaaataccacgaggcatgcagaatctctgaaagcggatggtttgcaatgtgtgctctaatgctgtgggcactagagtcactaatatgtatgaaagtctatgggactatttcttcatgtaatacattacaatgtctgaaaaatcaatgtcctagggcacagaaggatgaatacagagcttttcaattatcttttttattttttcctaaaaatactgctcccttcaaacagattcaaaagacaacatgagattgttttcattttggtaaagatgatgttgagtctatgcaaggatcttaactggctcaatcccagtgggtaatggcccactgggcagaagactgtatagaccttgaaaacataataggttaaaaaaccctccatggaagctccatgaataagaatgagatatcttcagcaattgactatcagtgtagctgcacccaatttcttaagattgacgctgtctttgttttttaaaccaacatcttctgtcagtaagtctgtagatcataaattgttttaaaataaaatttcctgtcacactcacatcttgggaaataaaacagaaggaatcctaaagcccggctacttcatattcagtcaaataagaaaccagagtgaggttaatataacaggcagaaacctaactttcaatctcaattacccaaaaggcacagggtcatctgccaccttcaaagaaacaggcctacatataaatgatgtggtataaagaataagctcagagacctctcaacttcttgcggggcaggaatgaatactgtagtgggtcataaagcattacaattttttctttcattctgtgttttggaacaggtgtttctgtctagtgcctaaagcacttcctaccagtgttaataaggtgtgcagagaaagcttgtcagacttgttatagtggcaaagccctttttgaaaatcaaatttttcatgaaaggctaataaataatagagtcaaaagtagaatgactctgtagcaatgggcatgccagtatgttgtggggaggaggagaaggaaaaaacaaggcaggaattgaaatattgaaatagtactgggccatggaaggtgctcaataaatatttgttaaaggaataaatgacctgtcatttcaggaaagcacaaactgggttgctctgaagacccctggtgtgcttgcctccaatacactctgcctgtcctttcctctggtggcctgttatggcgttttcatcctttcccagtcttggtaaataggccctggtaactagggaatggctgcgatataggccctaagaaaatagggtttctttgagcctcctaggtcttggccaattcatgtagtcttaactcctaaatacttcccaaatacagttccacagctgcctggcacaatggccaagagcatcttctcctgtccatcttctcaagccctgcacttagtgctccttttcagaaaacccatggtcaatggctcagcattctactcctgaaaagctgctcctttttaaagcttatattattgctgtagtaaaatgaaatgcacttttaagctagaaagggtcaatattgttccctaaaacactagggtacttgatatgctacattcattttcaagggcacaggattcttaacacccactctttcattgattcattcaacacaaatttattgagtgcccacactgtgggaggcactgtccttgacactggcatattacgaacaagccagacaattcttttcctccaaagtggtaatatgctaatggagggtgtcagacaaacatacaaacagatgaaggaacaagaacttcagggagtgatgagtgtgctgaagacaactaaactggatgaagtgatggcaatgtggggctaggagagggggctactattttagatccagtaaccagagaagttctgcctaaagaagtggcatatgagcttagtgttttttttttttttttttttttttaagatatggggtcttactttgttgcccaggctagacttgaactcctgggctcagccttctaaatacctgggactacaggggtgagccactacgcccgactttgcaagacttgtcttctgagagcgttcctttcagaccttagcttgcagccttcaccaagaaataccaaaaatatgaaggaagtacataaaagatcactttatttgtctgcattaatgtggtttaggttccattaaaaattaagcttcatggcagagagccatatacatttctaactgggtacaaggagtcttattagaaaatatttattacatgtaactgggtagaatactccagatggtatctaggcatttgcatagaacttcatgtcaaattaatcatcattaatgaaggtttagattattcagaataagatgggttaaaaaaatggtaaataagtggtcaggccagtactaatcctctataaaactttaaagaagacaaggtttggctttgaggctgccctagtctccatctagaattctctttttgtcatattcactatcaatgtacccagcatctttatactctacagttcagcaattctggacttaaccaggcaattgtgaggatctgccctaagaagaatcttaggaaccttccttttaacctgaaagcaatttcaccagatgatctgttttaaattgagtaaaccatccatcacgaaattctcgagaccagtttaagaattcaataaaatttcttgtgcctaataacacttgctcagctgcagaggcaaactaagaagctaatatgtgaaatagagcaattctgaaatctttgcattttctcatttgtgttatggtataatgcaatgaaagaattgcttttgaccctgtcaagtggaacctcaaggacaaagatttttatcattttcttttcctggaaaattgatgtaaagatttgatttactttggagtctccaagtgcttcagcaactaaaaaaacagattgatttttcatatagatgtgatgtaattaagttctaatttgatgaaagagctgatcaaatagtggtggccattctgaaatgttcctcagtgccaaacaattacctgtaatggttcttgaaagaaaaactcccaagtatatttattttctataacacatgtgttgtgtttccatactgttttcatctctattctaaaaagagaattataaacccaatgtttgcacagttatacttctcttacgattctatgtattttgatcttgccacatcctgctttatgttgtagtttttgggtgaagatctatgtagcagatgctatcattgccctcccatattccttcaacgatcactgtttgtgaaaaggccaatggcttcctgttgcacgtacctgtctgtgactttgttgacagcacgttttggccccacagcatgcctggattgaatatggtgctggctagaaatgccacagaattatctgcccaagagcagcccctggccaatgacagaaaggcaatggctaataaatatcccagtttctttttcctttgggtagacaatcctgaggtgtgctttgcttcttgcagaaacccccaagcgggaatgagcgccagttgtccacagtagtaatgtgttcattaatgtactctctaatggctattatttttctgactcttccttcatccccattcccctaccagtatgtcctgagataacctcttaaataaactacatacattcaaatccttgcctcagagtctactttagggaattacaaactaaagtaatcaatatcttaatatgcaaacagactactaatactaaaagaagggtttcatgctttcacagacttttttgcatttcttgtaacacctaatgcaatgtttttgcacataaattgtggcattgataaacaaagcatctaacatcgactgagcactttctctacacaatgcactgtgccaaactttatatcctattgactccatcaacagccttataaggtagatagtactgaaggcacagactttatttagttcattgctaagccctagctcctagaaaagtacctaaacatatcaggcactcactaaatatgttgcataaatccaattttacagatgatgtaatagtgacttaaaaaggtaagtaacttgctgatggttctgcagctgtaactgggagagctgactccagagctgaaggtcttaaccctatactattctcaatgatagagatgaggaaggggagggaggagtgcattgacagagattacagagagattaagtaacaggtagggctgctaacatatttgacctccccaccaaacctgtattacttgcatcttcattttctgattatactagttataatccttctggctacttgcatcctttcctattctttttccttgcatctcctgagtaggtaaattcacgtttctgcccttgtgtatggtgagaatattctgatgtttaatttggtgattaatgtgtgtcatgatctctggcaaacctcctactcatctagtagctggttctcaggtcaaaagttaggaaggcagaataattagctagcctatgatagggaaagaagtaaatgcttcctttttttcattaaaaaagataatatggaagaagagagttgggaaggtggtagtgacaatatttattttctgcttcaaaataaattaggaacacttagtacttcaaacatacattcttttcagttactaatgcacattttggagctatctacaactgatttctccagtaagttatgattttgctagcccattcagttggaaacatttgtttttactggactatttacttgaattttgtttaaagacaaagcacaataaaattaccggttaaacatttaaatgaaaataaagcaataagggatgtatctaaaaataataattgaaaattgcataagtgaatgagcaagtttttagaaaaaaagttaaacttaaagctatatacagaacaggtctcagtggttattaaaatgaatcccctaaagtcctatgacttttaataaaaacactaaatagaaaataaatgctaaatcaatttctcttaaatatttaaaatgttaaaggttaatctattttggtgaactagccatgacagagtgatatgttataaataataaatggcctctaataataagaactgtaactacattatataatagcaatatttaaataatggctcagggccatgttgcatgcaatggtgtaggcaattaactgtatgagggaaaaatgcaatggctactctgactctagagttactttcctaaagaagtggatgttgtagacggccaagcaaatgcttaagactctttggtagaaggctttaatgactttgattcttgagcagcctatgtgctcaatagctaggaacaatcactttcttttacttaaaggagtatgagccaaatgtaaaaaccaaaacatatagaaaataaaatttccaattaataagctctcataaggctactatgaacacataatgattctctagcaaataaacttgatataaaagagcctattatctatcacaagattgtatttgtcactagcatagtaattttcttccgtagaaaaggttctttaatttccaagcagtattctttacaaaggggaaaaaaaatcttaattttttgatgatttataatgataagttgacactcaaccaactctttttcttgccatatgctgactggtattctacatgtgttccaagaagttaagaagcaagagtgaacgaggttgcacatggcttttttcagatcatgttggcaattactcttttaaattcacctcctcttataactgacctcctctggcatttagataccaaatatccaaatattttaagaatggcaaatgatatttaaaaatgactgcatttctcaccatctgaaaacctgtttaaaatattaaggctaccctaggaaaggaggttcttggataatccctgccataacaaagaaaattctaaataataattaatatgagaaaatacaatttctctttgaacatgggtgcaggaaaccagtatatcttaaaatctggtaaagagaagcagcatgtagaaacacacaaagaaaaaataggactcctatggggcctgctcaagctctaaggaaaggtttttcactaagattaaagaggcagtgagaaaaaagactttgactagctttgcagggaaatacatatacagtggcaatccatcacaccattagttgagaaacatttattcttttaaacctttatttacttaagagagtttggctctaggattctttccaagagacaaaaagctacatactttgtttttttttttaagtcagcaaagatgacccccaccccaaatactccctagttactctttttgaaagaggctgtattgtattttgaaataatattacatttaattgtacatacagaaactcaacctggtaatattacttctaagtaatcttatatgctcagatttgagaaagataagtaattggcacatttaattcactgatcaatagcttcaaaaattcatttttggggggaaggagagagcttgatgagaaagaggtagtggttttaacaggattatctactatattattactataagcagagcaaaaggcatgtatccctaatcttttgagtcctagtctttcacttgctacctagctgtgggctcacctacaattacacaattatcagtgtctctaagtgtaagcagccatttgtagaaaacatgcccttaaaacagaagttatacatatttcctcatcacctctctggaaaaagaattctttgctaaagcagattttttttttccaaatatcaactgacaccataaaaaagaaaacaatcttcttgtgcaggagtgaatagtccaaagctctccatttcttgcactgccattttaccatttacctttctttacatagttcagtagaggggaaataacacaaggcaatgaaaggtgaaatctctctttatctcaaaggaacttgccatattggtggtgaaaagaaactcactgtcaatattgaaaactgtgaagactaaacagacacagtagggaaagtcttcagagaataattcatttttaaatgccttgtccttttatttccttgtgggtgggatggaggatatggagccaagtgcttttgaaagcctaaatctaattattctgtggtttcagatttgtcctgatgcttctttcctactctggtctcattacttaaaagagccatatttgtttggcattattaaatctgataaattaacctaaatgctctaaaattacctttactactacttagtgggaacacatagtaaattattataaaaacagtgtttagccaggataggatatatgtgtgtgcaatagtaaaataaaaatacttaagcacacacataatatatgtaatttattctggtattgagagtttctaaaagcttcaggtttactctaaatctaaaatgctgatttattgacaatattaatttggtgtaaaaggcaaaaattggagttggagtcagatacctatgaaacaatgattccaagaaatatctgctgatgtatccagaggaccccataatgtgttagatctctgtgggaggaatcaaagacagaaagcctgtaggagcatcacctgttccatctcttcccccatctgtatatacaaaggcaaatggttctgtgatgaccactccaaaaaggacagagtctaggacgggagaagagatgggagctagcaattgcaaaatttttatactctatttccctacacttctacacccataaagtctggatatagtctttgtgaaaatgatgctcctagcaacttcaagtaaattccagaagaaaatctaatgaaccatgaatccattcacttttgtccatctccatggccactgtcacccttcctcaggccatagcaacagtcccctacctggtctttttcctatccccaaccattctgtacacagccgccaaagtaaatttttcaaacagtaattctgatcttacttctctgtacaacacccttcaacggcttcctgttgcatttagaatagaagccaagcacattaccacggcctatatgagttatgtcccagtccaccaatccaacttcttgtccattccccctgtttctggggctgtgttcatcttccatcatttccttcgactcaccaaactctctcccctctgccaggcctttgtggccactgttctctcagtttctttacccagctgttcttgtggccaactccttctcatcttcaggcctgtactttgactatttccctcaagaaaagccttctctgacaatcctatgtaatgttaggcccctagcctgttcttttctgtcacaaagtcttgtaaattccctgaagcactattttattacttgattggttcaagttttcatgaactgcctctccaactagtacataaaccccaagtggaagaaatgattatgtgtgctcattttacgtggcagccccagtgcccatgccagtgcctggcaacatcacttagtaagcatttattaaatggaagaacacaaaagaaaagaagtgaaatgaatagaggatctagcaggttccttaagttcttttatatttcattttgttgtgttacctatttatatgtaattatgacctacaggacaaactattatgcatgcatatttatgaaggtgactgatttattggaattagtactttttaaataaatattggaaaactacatcaattttttgaaaagttttatttatactagtttgtcaatatttcctactttgacattttctattgattgttcagcatcttttggaagttagttctatttaccattttgaagtactggataaaaagtaaataaagacatttttttccctggggctatgtatacagcctttgtgaccagtgtgaactatcacttttggttgtgctgagcagtcggttgaattgagcagaacaataaaacccaagtgatggacatttctgagatgctgccagttgcacatctgaactgaccagtttgtatgtactgttggcctcaactagattgacttgatgttgcttttgctaggaaacacataagaagtcaaaacctcttcagcatttttattgctgttcatgttaaagagaatttttttttttttttttttgagacagggtctcactgtcattgcccaggctggagtgcagtggtgcaatctcggctcactgcagccttgacttcccaagctcaggtgatcctcccacctcagcctcccaagtagctggaactacaggtgtgtgtcaccacgcctggctaatttttttgtatttttatagagacggagttttcccatgttgcccaggctggtcttgaactcctggactcaagctatttgcccacctcagcctcctcccaaagtgctgggattacaggcatgaggctgagaattttttttttaattgagtgatttatacaggtatctttctactttattgcatagcagatttattcctaacttttgcaaacatgacctcattctgacatatctagttcaaaacagagtctctagaatatgtttaatttctgttaaaagttaaagacacctaaggcatagaaatataggtaagtatttatccaggtgctcattccatatgttaggtcacatattcacattttatattcattagaaacataaattcaagtatttatcaatgccatttctattaacataactaccactcggtattatatttctacatcttttcatgtctgtcttcttgacatacaggtgcctttccaattaataagcctcagaatcactagcttattaatcactggtttatataataagatggcttattaaaagtacagattcctgaatcccacttgcagattataattcagtagatctggagtggggctcatgaatctgcatttttaacaagttctgcagacgatttggatgttggtagaaagaggcatacccttggaaagacactggtctagactctccttcttagaagaaggatttttgtctagctcattttaatgtctcatttagtactttgcacattacctggcattgcacaggcatcaataaatttcactgaatgaaatgttcacgtgaatagaaagtttattttataattttatgagacatataatagaatgttctcattggtataatttatcttcttagtagtactcttaattaatactagatttttaggaaaagactacatttaaagaatacgttggtgtttaaaattttctaggaatagaatgaggttggatattttaatgacctccatgtggctagcagcaggtagaattactgtaaagaagaggaaagtgctctttactactcaatctatttgggcaatttgattaaatagtttgaaataaagtgctgaccattgtccactgaactttctagcccaaacagatataataaaacaaatgtcatttgttttaaaagcacaattgtatgtaaaatcactgaactaaacagtctttcttctcctttagcatacggtgaaaaaatttcaagaatcaaagacattcttaaaaaattcaaaatgaacatgatttatttctaaataagagttattacctgttaaaatatgtttaaagagatactggaaggaatagcaaaggagaaaaaaatccatagactatctctaaaacagattttagaatccaaattacttctaagcttaagaaatccatcactgccaaaaccaacgagccagctaagaaatacataagatgtctcgttcagtgttgattgtggatataaactaggaaatttaggaattggatataaggtcatggttattatgaaagaggaaaaaggagatatatgtggtttggaaagacaaaatggaattgtataggaagatgggtgaaggcagcagtaaggaaaggaattttgaggtccagcagtggaagcttggccatgtcactttaaaaaagttccaggtttcttatttgaggtatggaacggtactgaatttacaggtttattctgaggatatgctataatctatgctaaagtgccttgtaaatggttgattgatatcattgagttaccattactgcagcacagaattaggatctacaggtaaagaatgagatggaacttgggagacatctgcatttgccattctatccagtttcacaggtctgttcaaaattcacctcctcactgattactccacacattcggtctgggtatgtgcatcacaaatattttctatttacttatctttgttttggtccagtaggcaaatttttacttacgacttacaaacaataaatagtcacttacattggacttaagacaatatgagttaataggcttctcaagtattctttacatgaaggtagctggaacgcaaagaaatggaaaatctaaatcctttcttgtcttcctaattatttcaaacatgcaaggaatttatggtaagtatacagacttaaacaataccctgttccctgaatagacttaaatgtagtcacagaaatgcatacaattctatttcctttctttttaccaatttgtctttgattctgcttatgagttttcatcttggcttgccattcctccttttgcaaagtgtgaggtagtgttaggaatttttaaaaaatctgtgatttattctaggatatatctccctaactgttttgactttgaccattacatttcttttcatttgacaattttgaaacaaaaacatagatagggattggggaagggaaggaaaggatgtgaactcatatcccccatgatcagcttcaaacatgaattatataaaagaagccgtctgaattcctacagcgagatgaccattgtggctccttttgagtataaggcattattactgtactgccatataacatggactcaggagcctttaagccctacctgtcttttgacatcacaggtgctacactgtgagatctgaaaaactctatttttttatagtatctgaaatacttctctcataattgactctaattttatttaccttttttactttccatgacaaatctaggctttgggaaagaaattattttcattgtgcataataataatctaaaagtaaagtttgaccaaaattctatctcaaaaatggcatatttaattgcgtatattgcactgtgaacttcgagaacaattctagttaaaaatcatttttgattgtcatccaatagcataaatgaccattttacataaatacgactgatctttttcttggcttcaaaatagtcaatatgacagaataagcagacatgatattctgatattttaaaactatttcccaaaaagtaaaattattgaaaagttcattcaaaccttgaacctttctttgaagtactataatgtcaccaaaggtgttttttctttttaaaactagaagtacactcccaactttaaaggttacttttttactttctttcctattgtaaagttttcttaatttcattttcttctcgttctctcactaggcactttattttgcagactagctctggttaccatatctgaaaagtagttccttaagtccttattgggggctggtggagagggagaatcccagcgattgctatgactgtatttcagacaggccatttcaggaggtcacaagagctggaatctctcactatgtattatatttcctgtaaagtatggtaatgcattttgaactactgccctaatgacacaaactttatcacatactttaatgtactttggaaagaatataatgtcatattaaacatgtaggtgacaatcgctggcctaaaacacagtattcttttgactggaaataaaatcagtgttctgaaaatgtagacctcaagtcaggtggtctgtgaaatgagttgttctaaggttatcgttgccattagtctacagaaaagaatggtctgtagatcaacaagatggtatcttttgttttttttttgcactttacacacataagatattgtttaaataagaagtcatattttatgtattaaatgtctatttccttactgaagatgcaaagtttgcctatattagattctggttgttatgtgtgaatagcagccttcaagaatcaaggactcctaagaattgatttgaaagtgactgctgtcctttttacactggaaggagaatacagcaaaagtacctaagtgttactgctatgcctaagcttttctgtaaaaacacaccaaagaaaacaaatgaaacaatgctcttgattttcaaaataactttaaacaaaagaggcatctctctttatatatatatatgtgtgtgtgtgtgtgtgtatgtgtatgtgtgcgcgccttatctcaaaatattgtgtttaacgtcttttaaaaaaagtattgtcagtggtaatggaacgcttttcacagtgatagttaagaatctttaagaaagaagacgaatgtgctttcaaggtttgccttcaaaacattttacattcttgtactttaggagcaacaatagagaggtagtaataaacagaattacatcattattttttcttggaccattttgcaagatgtaagcacgtaagttggtataaagggccattttccaattactaagccaaacagaagtgttaggtaacaagtctgaatagaaatgccagcaccagcttgtccaataggttcacaagatctcattccatagatcagttggaacatggaagcaatggaggggaagcaaagattgtatcaccatagcaacctgaaagggtgggggaagacagcaaactgcatgccacctgctaatcaattagaactgtttgcaagctcaagaaatcctggagaatctgagtggggctgtagggtcaagtacacagaaaaacttaattgggaattctcttttaaacttacaacactcagtcaaatcatcaacacccatatattaataatactgtagttcaaatcagccactttgcagtatgcaatctgctttgaagaaatcttacttccttgtgttattactaggagtatggtatccatttttctaaagttgtattgatagtttcttttagtttgcattcaattgcaatatgagatgagtttgaaaattaacttaatttttcaaattcaataattttataatctctcattaaggcatcatgtatcttcaaagtttatataactgttttacactcaaatcttttcaaattcttaatagctgaaaaaggcaaggtatcaattctctgtttacatttatttgttttgggtggcaagattactcaatttactgttaaatggggtcaaaaatgcttgcaagttacttaatttactatttatttttttaaaaaaaattcccaggggctgagaatcctcatacatttgctgcttttcttttaccttctagctaattattcttcctccccttgcaccaccttctaccttggcagatttaacaactattcttgaatttgaaactattgatgatgctacattagaatgactgatgtgttacacaaaggcccctatgtaggtgaagactggagatgtgctaagcagcccattattttcacagtacagtgatctgcttgtggaattttctgaaaacatttccaagggacaagacatcagagcctccattcctgtttcatattgacttctgacctaacattggaccagtaaatcccatgtgtaaatatgaggctgggtggcaagacgactttttaaaatatttacaatggtaaactctctggattataaattacaacagaaacaagatgaacagctttacccaccataaacttgtctttcacactttttttaagtatattaagcagtctagcaggagtttcactagtagtataaagaaactcaaaaaagaacaaaaattagattaaacaattcatcactgaaagtaaccatggattaaaaaaaattggatgggaaaaaacacaatggctaatgtcagccttgaaaaatgttttttaaattaaaaaagaaagtcaagataaaacctgggtaataaataagtcatattactaaacaaaaaaaatccatattctcatttgtaaacacaaaaggatgtgaattagtgacaaaaatatattatacaacgtatgtgaaacatccaataatcatctgagcataaacagggtgagatgctcagtcaccaatgggtgaagcagggatgcaaatcagcccgatcttattcaatctattgtgtgagcattctctgagggtggaataaaggactcagaagccagtgttagactgatttttgtcctctgggaaactccacttaacagctctgaatatcattaaaagcctgtgaggcagtcattcaagggctgctgttgtaggttgtcatgggagctttcaaaacgtacacacagaaaaacaggccatgattacggatcttactgcagagtaaatccagtggccaaaatgttgataagcttactctgacctccgatagcaattattgtctctccattctaatcatgagatgaactttcatcataatacaataatactgtaagctccttgaaggtagaaactgtacctttatttctctcttgtggcatcttgtgtatttctgggcgaatggtaggtgtgcagtgaatacatgttgaattgaattacagcatgagatcacgtacttgcccccatcggcagaatcctacacacctctcactggcaatattgagattacaggggtcactggcagcactctgcctaatggcatactgactgacagagtagaaaatcatatcaagaaggccagtatgacctttgagtcggcagacagggtgtgcactcactgtagcaacaaggtcaagatcaaagtgatgaatctccaaccttctcctacatggctagagacctgaactgaccacatctgattatctgcacaatttcatcagcatcacatgtgagtaatactttaaataacagtaaacactgagagaggagcacaaacatcagaatcccagaatgcagcaaatttaccagcttgaagacgtgcacttgacgacaggcttcttgtggatcatgcaagcctgctgattagacatgaaaacaactgctttatggtgacctgaaatgggattaatgtaagccggatgagtgttagaaatgctttaaagaacccagtgaagtactgttcaaaatgatacagccaagctgtttaagaaaaaaaaaaaaatcctgggaaaacagaaaagctgagatcaacttgcttatcagtaatcaaaaaacggggtagctcatactgagaaaaaactatgtgggaaaacatggttctaggcatcaaagtcactagtttctatgaacctagggtgaaaggggttgttagtcatttatctgtcttttagtgacatcggtcttcacaaactgtagtcagaagaagtagcatgaactttaaacactaaagataaaaataaatacattgtatgtaaataggtgcctaaatgatttttatctttaaaaataacttcactttcagctattgaaaaactcctttaattgctaagagagaaagtcagtaggtgactaaggcactgcaatttacatctgcttagtggtgatatattagtatactctccagagagcttccaacccgacattctccatatgttgcccatatgttatatttccataaacatatcttctagaaaacagccagatgcttcacttttatacctgaataatagtggcccttctttatcctttggtcttatctcttccataggttttgaaatatttataataattaaataggaaaacaattattttaaaatgcattgaatataaacccagttattcataatattgtatttctaggacctttacaaacttcttttctaaaatacaaaaactcttaaggttgaatatcaagatagaatattactgccattcagacgaaatagaatttagcgtgaattttagcgcatcgtccaaaccaacattcctgactatgttctggaaggggatgatttgctgaatgagtcatgaatgatcattatcatccttataatatcaacaacagtttatagttactgaatacatatgatgtgccaggtattatgctattggacatagtgtatcatttttcattttacctacaagtaatatgtaggtaaaaatgtcgtaataatgtttacagctccattattttcaggttgaattcatataattctccgttatcacagtcatgattttgcacatctgagacttgacaatcctcgtgcttctggggcacgcaacatgagaaagagtaaataagtgacctctttatttcctctctgtcctctttctcaatcttctttcttttccttttaactactagaacctccacagattcgggccacgggtcagggaggagtatgcagatctgctttcaacaaatgcctctgggtgggtgactctagccatgaagtattagtgtgtatccaacttttaatgtcaggctgctgtatagtggggaattcagaggcagtctctaccctcagtagattctcattatttcatgtcagagtacggaggatcaccctgtctccagtatttcctaatttcaatcattgtatagaataattctgtgcatatattatacaatcggaattatttcactctcttgctatagcatatcctttcaaaagacagaatcctctctctgtcttccgaagtctactagctctttcttgtgcactcctgtctcaagattagtcaatgaaggccctggaagagaagaccaggagggctcagctgacccagaccaggctaatgcacacttcattgactatatttcacctgtttcatgctctattcctgtcacaaataattcttacagttccatccagatgaaaatcaattaaggggtaataagaataataacagtgagcatttagtgcttaatgtgttaaacagtatactagccactctgactagcatctcatttcagtctcacaagcctctgaagtaggccaagagtattatttctacttaatagataatgaaattgacactagaaacatgaaataacttgttcaaggtcacaaaaccagtaagtggcagagttgtcatttgaacccaggaagtctgactccggaacctacctacggctacatataatgcatttttagaataaattttattcattcattcattcattcattcattcatccattcatgtagttcctatgtcttaggcactgtgaaaaatacaaagaaaagtaaggcctgaatccaactaccacataaactcagttttttggaggagggggacacatggacaaacaacaacagtgagatggcgtatatgcaaggtggtcagcatgcaaggtacagagaggagtgaatgttgcctggaagaatcagggaaggcttgttaaataaggtggtgatcttcaggggcatgtttaaaaatggaaatactttagtggggaaggatatggtctcttctccaaagtatttgctaacacatggagatggaaggtaggactgcctattagagaaaatgaagtagttggagggtgggcgtgtacaggagagtagcatgagcttatctgggagggtaatgggtccgttctaggaaggaccttaaatgccttgctccttagtaaggaggctaaggcttaggctgttgaggaaaggttttaaactaatacacataattggatctgcattttaaaaggcaggcgttctcaaacctggctacacactagaatcacctggagaactttgaaagaaatactgggggcctgaccccatccccagagaatcaaatgcaattaatctgtgggagggcctggcatcagtattttaaagaggttcccatgtaattcaaataggtagcctaggctgagaaccatagctttttggcttctaatatctaatttatgggggaagaaagtgctttattaaacatctgccatacaaacagcaaaacttaactagtaattcaggatatttcacctaagatatgattctaaacaatgtctcaaacaaaattatggttaaatcaagtgaaaaaaaaaaaaccccacacacttttttctgcgattacatttcagagttacaggtttgttagcaaggtgtgtaccagggtgctgaagggttaagatacagaactagatgatgatgcaacattgaaaagccatggcatttaatggagtaaaaaggaaatcaaccactcatcttaaaaactccatgattctctatcattgcatcttgggcaacaatagttaaaagtcacttgaatcattgcactactctacagaatcatggctgacctctgctgtgacaagtgcagaataccctcggctgagttacataatggaagtatctgcaacagtgagttattccaaccctcgggtagaatgacggatgctccacagtttcctcggatgtgaagccactagggacctggctgcaagcatgtatttttatagacaccttagctcatgtaaaagttctaatgcaaactttagtgcttgggaacgttaaataggtttaggatgcttccccagagagttttagttccattaacacaagacttggtgactaaggacggatataatcctgatcccacgttagagatatagaaagagaaactcttcactgtcttcaagttagcactcacatttcaaaagataagaaggacctttcagcatcaagaggactaaataattcaattcgaacctaattcagcatcttatgcatcccccttcctccaatagagctcatgtggcagaatatagctaaattatttcagctgttagaaaagaaggtgacagaattcgtaggcttccttccgtgaccgtcgtggctgaaagttctattactgaactactggcacttggcctgtggagattctgactgttcactctcaaatggctaagggctgagctgcatgtgataatgtctgccaccaactcaaaggtaccatgttggtccctgaccatgggaggccaggggcacagatgttcccatgtagagcttctacctctcagcacagggctgagggcgtacacagctggatgtaggcaataccagcacatctactgaagccccatgaccatcttcagagtgcctaacatgcccgcactggtccttccccaccaccatggttcctcagctcgtgcaaggctctaaaggaaaaacaaaactttgtcctcttagaaagttcagagcagaggtggaggggagagaccatgacatttcaaggcttcccaatggcaggttccacagccattttttcaaacgtgtgtgttcctcatctctttgtataacctctgctgcaattaaatgggccttctcagtaatcacccaacttgatctgcaaattcttaccaacaaataactactgatgacacacctatctcttcctcactatctaatcacaaatggctcactcaaaccatgaagatttgcccattacattagctttgaatgacttccaagggagagaaccaggacatttggctggagctttttccacttaactcaatccctttacccatcttccccttatatgcagccaacctcttcacctgtgcttccagtgcactcatgactactactctgggattttgtcccattgacaatgcctctccctagtatctcttattttaacgatctcccattctctgtgtacaaacaggcacaattatctcccttcttgaaaagaaaaaaaaaaaaaaacctatctgatttcttcaaccatactttacctaagtggaattctcctttccccatttcctcaccttccacttgcttctctaagtattttggcaactgcttcatcatgctgactgctctgacaaaagtcaccaatgtatttccttttccaaatacaatggacacttttcaggtcctcgtttcactgaattgaccttttggtagcagctggcatagttgttcatccctcctttgtggaatgctccttgccctgcctctctgggtatttgcttgctcttgctggctcttctttgccttggtatcacgtaaatgtaggtgagcccaggctctgtcattgcttgactcccactacacaacacttcctgtatcctgcagacttcaatcaactctacactttgagtcccagactctcctaagctttagagacataagtgcaataaaccaaatctccctgtgagccctttccattcagtatgccaaaactgaaatacatcctgttttcttagctccctcactaagcctccttccctcacaccatcttcccccacaaacagaaaacaccattcatctattcctaggtttaccaccttagttgaagccatgaccatccaccttttggttaacttcggtcttccctttcccttaccactagccccacacattccagagcagtgttgccaaatttcttttgcaacatttttctcattcatccctttctctctaccccaactttcatagtctttgtttagaacctcatcttttttttttttttcacccaatctactgcaatcattgtagttaatcttcccttcttcaacgcatcttcactccaagctatcctctactccactggtcaaataatgatggtgcagggtcaaatctggcctgctgcttttggtatataaagcatctgcccactcctttatgtattatcaatgactgcttttgtgtttcagtggtgaaagagactgtacagtccataaaacctgaaatatttactacctggtccttcagagaaagtttgtccaacccactactgccaggatgattctgatcaaaaatacaaatctgatcacgttgcttccatgcttaaaagactttggtagttacattaggtggtgaggtaccaatctgtgactgccaaatgcagcacttctggccacactaaataaacccctgatcttgaaggtgccttgtacattgatgtcaactttgtccttctgtgctgttgcatatgctgtgcattttgtataccatgcccttgatgtgaataattcattttcatcctcccagattcagttcaaatgtcatcaccatgtaagccttccttgactcctctcaacagtgagatcctccctacataccttatttccatatactttgtacatttgtctattttgcatttatcactatttcattcattcattcttctatttacacatctggttgtcttgctaagtcatgaggacctgacttaaatataccaagaataaacttccaaatgaatgtaatggtaggttttatgcccttatttatatcaaggtcaattttatttcaaaatagtttgagaaattcttctatgtgtctgctctcagaatcactttatgttcattcaagaaaggccatcttaacatttcaaagttaacatttcattttaaattaaaccaaaacgttactctccagcttcatcagcaagcatgttctaaaggagtttgaatctttcaaaaaatcaaatctgcccttaaaggaaaaagtttaccaatgttggtagttgttaagtaaggaacagcagacattggatgtaattttgaaaagataattttagaaatattttcagcaatgacaaccatcttcaaatagataattttgttaacctattaactttgatgagactgccacatgttctggaatgtcttttttgttcattcaattaaatcacactgaaaaaagaatggactactcaataaacgtatatccaattttttaaaagactattggattcaagtagataaaagatctaaatataaaaagcaaattcaaactttcaggagaaaattatctttataaagttggaataaagaaggccttaaaaatgcaaaatagaagaaactgaacaaagcaaaagataacttcaactacattaaaatgaaaaatttgttcattgagataacataataaaataaaagtcaagccatgaatttggagaattcataccagtaaaaaatataactgacaaaagattagcatccagactgtctaagaataactacaaatcaatagaaaaaaattgaatcttctaaataaaaaaaagatatgaatggacaatctaaaatatgaggaaacttgaagattcaatacacatacctaaaaaggctctacctcatcagaaatcaagtaaatataaatttaaaccttaaggagattcagtttcacagcaatcggattggcaaacattaaaaagtctggcaacatcaatcattggcaaggatattgagcaatgagaaatgttatacctgatggtgagagtataaattagcacaacttactttggagagcaaattggcaatatctagtaaagtcgaagatgtactcctatatttattcttagacacaagaagatacacaaggatattcattgcagcactgtaatataaaagtggaaaataacctaaatgcccatcaatgtgagaatggaaaattaagttggggttgttatatataatggtataacatataagagcaaacgtgaaataattaggaccacatataacaatgtggctaaatctcaaaagcataatgccaagaaacaaacaaacaaaaaaagcaagatgcagaagaatgtacacatacaatttacataaaatttcaaaatctgcaaaggaatgatatacattgtttacagatgcatatgaatgaagcaaaggtatcaagatgtgccagggaatgatactactaaaatcagaaggctggtaacttttggagagcagagacagaaatgtaattcgggacttcaattttctttgtaaacatttattttttaagctaaggtatactgatgtttgtatactattctccatgttttgctgaatatctggaattttcacaatttgaaaactcacttttaagacaaccatttttggaggaagttgtatagagcatgtacccctataacataatctaacagccagacatattccagtgcattgaaatagagattttaaagcacacagtattagcagttttagaattagaatttaccttaaagtctgaccagtctaccactttcctatttgaaaataaggaaatggaataattactttaatcactcagtattattagattggctagtaatagggttaagaccccatctgctacaaccccagacatatgagtgtaattaaattaaggcattctaagcacgatgcccaaagttgttctagtattattacttttatcaatctcattttatatatatatatatatatatatatatatatatatatatatatatatatatatattagtgacagagtcttgctctgctgcccaggctgaagtgcagtgacatgatcatggctcactgcagcttcaaactccttggcttaagtgatctgtttcagccatcagagtaactaggactacaggtgtgtgccaccacacctgccaattattattattattattattattattattttgtagagatgaggtctcaaactgttgaccaggctggcctccaactcctggcctcaagtgatcctccggccttggcttcccaaagtgttgggattacaggcatgggccacagcttccagctaatctcatttaatcttgaatcacaatcttgtatcttgaaatctttgtcagggacagaagcccctgcataatttttgggctggagatgactctgtattaagaaaataatcataattatcaaatgaaaacagtaatatgcagaatagtgtatatattatagtaccactttgtaaaaaataaaaagaaatgagaatattatatttgtgtggcttgcatatggagaaaaatacccatgaatggataatacataagaaccatgcttagcaattagcaggaatgggtactgggtagcgcacagtgacatctggagggtgatttttttttcatatacctttttgtttttttgcaattcaaaccatgtaaaggtattacctattcaaaagttaattaaataattaaaaaagaaagcccttgtaagatgcactgatctagctcctctattgtgaaagatgtattatttttctcacctacgtctctcagtaaactccagttccagcttctaatcacaccaacatgacttttttcacgggctgatcagaaaatgatggctgacagatcctgacaggtaaagtacaatggcctttaccgcggcattgctatgggcaatggagacgatttcaaggtctcagcttcttgtgtattaagactttagttttagcttctgagttgaaatgtctcatgcctcttccttcctatgggctttaagctctggcaggtaacatggcacaggccttgcctgggctgggaggtgcctgagtttcttctgagtatctaaaatatgcccaccaggccacttggcaactttggctcaccttgacccctaggtttgtgggtgcttactggctcattatcttgactgaccttgaccatgtgttgctaactgtcattggagtatccactgtaagctcttttcccccttttctcacctgccaaacctactaattcctaagatgagaagttctcactaaaatatattcttctgttctgataatttctaccaattagatggaagctacttcttccttaacttgtaattttgtttctttatctactggccctttctaaagagcagggttctagcagatagcttccaggaaaatcatgacagtggaaagaaccctagactgaggatctagggctccaggctgaataaagaataacttctctggtcaactctaaaacgagtggcttagtagacattatctgtaaggttcctttacagagctaaagttctatgaatctcttattttttaaaaaaactctcttttacctccttccactctattccttttctacctaaacatttaaaagatactctgaacagaagatgggtttagacacatgtacccatgatttcatctcatagaaatatatcagagaagactataaagcctcagaaacctaaaggaacaaatgggacttgctgcccgccaactttcctcatgggaaaaaggcattttcttttagagagaaacatctctcaaggcactatggttaaaaaaaaaataggctccactttctcataaggatattatcatatataattttccctaagaataagaggtaatagagaaataaaccttttgaaagtagtctcttgttttaactttaacatatataatctatacatttagtcactcacttttttctgagtatttacctatcataaccatgtaattaattcttcttatctaatttgtatttttaataataattgtgactataataattcagcatcgtgtgactgaaactgcacacctgggagtcaccctggactccttcctttccttgcccacacattcattccatcaccaaatcctgaacattcaaactctgtaacagacctcgaaccatgtacttctctgctgttcttctccagggcctaaccatctcttgcttatactttttaatagccttgtggtggcctccttgcactctggctattctccaatctcctctccagagagtaaacagagctgtcttttcaaatccataaacctggctgtgccactccccagggaacccttcaatgtcatgtcaatggcttttgaattaaacccaaatttcttccttggccttcaaggcatacatgatttaattcctgccttcctttccatcattaactagttatgtgagattgagaaagttataggacctctctttacagtataaatttcatgctataaaatgccactaagaagcagatcttgcctataaagtgcttaagatagctcttggtacatagcaagcgctcaatgagtgttaactatttgaaaatttaatagtcaatacagacagagcattcgctctgtgtgtaacactaagctaggcacttcaaaaaaactaatgaagcctttctaaaacttctctcaacctttgtctttttctcatcactatatcaacaaggagactcctagtaactatatgaagtcttgcacttggggtcaaagatcaatagtaccaaaaatggcttagggcattttcacagttagtgtgaaaagatcttaaggattttaggtgaatggcaagtagctaagagcacagtggcttccacaccacatctgtcaatgcacttcataaaaaaaaaaaaaagaaagaaagaaatcttagaccatgatgttacttatatatacaacaagagaagtaacatgttacattggtcagataatatttggttttattctaggtaccatatcttaacagggacattaatgaccaatttaaggcaagtagggaggtaaggggcctgcaaagaatgttatatatgaaagttaagggacctgggtaattacccttgagaagaaaagatctggaagagtagatagacaagatatttcaaatatttgaaaaatctttttacagacaacacattctacatgttttaatgagcagggctggacccaaagcacagaaatcacaagaaggaagacttccattctcattattagaactatccaaaaatgaggggaaaatacttgggagaggagcaaatggctcttcacagggaaagttttacgtacaggctgaatgatcacccttttagaaccatgtgaaaagaatttccttttggatagaagcacagactagataagagcagctaacatttactaagcacttaatgatatgctaggagctttacaaaattattcatttaatcctcacaacaactccaagaaatagatactcccattttactgatgaggaaattgataggttaagtgacttgcccactgtccaacaggaagtagctgaaacaggagcgaaatccaagctgcttggttcctgagttcgactattagtttacgttctacatgacttctaaaccagatgatttgtgaatgccccccacctcgtaatttccatgtttccatctcacataactttctgcagtcactttgttgactgctgtcccatatgcctttaatttcctgttactaagatttgtcagaaaagaaagtttttctgaacagatgaaagtgtacgatttcctggaaatgtacagcaattcacatgaaagggagagggttgttgaagaaggggaacattagcctaggcaaaccctccaagaaaaagacagaagtccctgcaaccagagaggaccctataggagacctctctgctcatttagaaagcaaatttccgggatcactttagatatacaattattttaaatatacaatatttgatccctatttaacaaagggatctcagagaaaataaaaatatatagtaatctttacaaatatcttcttgccattagactaaaaaagtttaattggaagttattaacactgtgaatattctgaatatagaataatcattatataatattccccataaagacagagtttgtaaaataaaatgttttggaataatttgagatacatataaatatggggtagataaatgaggtaatggcaaaaagcagaacgtcccacagaatgtacaaatatgccattccgttagaaacttttgggtacagtactccactcagatgtctcatatggtctcatctggcacaattttgcagtgatagtaaaaaatacaatttgctcacttagaacatgttttagagctgggtgagatataatttccctaaattgaatatttgggaaccaatttacaacctcaaatctgctattaacctcaaaataggtaattgaaagtttgtgtctaaatccgtttgtcataatagagcaaattaagaatcacatgatggacgtgattaatgtgtgacagttatcatgaacaccatgagcacgaactaataacaacatcacagagagattccaaatgtgatgcagccatgaaggcaaaactaattttcaaattataatagcaacatccaagaaagctaatgttttctttgtgtgacagtcatggctgggcatctggacgatggcctgccactaatgtcctaataaatggcaggcacacactagaaaggctgtcatcatgtggtgagctgagcacagttgctgctgccattgtcataatggactggctaggcaggaggtcacagggtgctggaaaaaagtaagtctcattactggctcagtctcagggttcgatgtgcctgagagttctgatgcacatggcataaacacattttcaatgcatatgggtaatatgtctgcttaattttggtcttatgcaatatttcttccctattttctgctgagagaatatcagaagacttgaaaagtacttgtaatttagtaatttagtgtcacaacaattaaaacgttttatttatgtgtagagcttactttcagcaaccgtcacattggcattcagataaaaaactgccagtgcattctggcagaacaggtgcttagctgatggcacttgataactgggggaagcacatactctggcagggcctagtgggcctggtgctgcaatgcacctaccctgctagactgaatgccatgaggtgagggagaaagtcttttttatcttgacgtacctggcactgagcatggtgccctgagcagatggccaagaaatcaagggcagtatatgagagagctaagcaaatggatctaactctggctttgccatctactagcctaggtaatcccaggcaatgatgtcagctctctgtctcaagttctctctccaagaatgaaaacaagttgttgtgaggattaaatagtgtattaaagcatttagtacataattgtgctaaaaatggcagtttattgcatcaaatacattttcatagatcaacagtagcaacaaaaattctctgcacagcacctgtgagatgggtgcaaacaacctttacttgtacaaaaccagttttaaaaaagcaaaactctaattggcttttcaaagctttttctcacaactgtctaaaagaaagctgtcccaaaacagtaaattctcataagaataaatgataatctgaatatttcttgccatatataagctcaattaatttctgaaaattttgactattttaacacttgcagaacatcgacaataggaaaacacaagcattaaaaaaaaaactcctttagtcaattgtgcaagtaggcacatatatgccaatttatgtgcagaaacataaaataaataactgatggctcctctctttcaaatatttttacatttactctttgtattcttctgtaatgatccttctatggtttatttcccttgacagaatagaaactgaatttttttgtatcactaatagtcttgaaattaaagtggatgtattaggtgctggcaattttctacatctgcctccactataactgaaactatttcagtatcatctttagggataaagtttacttgttatttgcagacttcagtcacagagttggttagaaatgatgagtattttaatataattgtttcttattaaagggtcaaatcttaaagaaagtattgttaggtcttcgtggaactgtttgaattacaggttctctgatgtatgttacattttgaacgcacaaatgtgattgtcttattttaatataccatcaaaaagctcagataacccaatgacgttttcagtggttacatttcaaatattggcatggttccaaaatgtagacctggagtaagtaatcagagattgaagcaaggctagctgaactattcaaacggcataaatggcatgttgaaatattcacacattcagattaaactatacagtgtacatgaatatagtttggactaaggaagtccagcttttcttagaataggtaataagttaatttgactttcctgatgcataatatataaatattcaatccaaataactagggggaaatctatatctatataatttacattcaaaactacagtattcctcaaggctcagtcctcctccattactcccaccaaatattcctcccctctcacaggtcagatgtacttttgtagattcagctattgcttttgagtggagaactctgaaatgtttatttccagcatgttaaaggtacaaggaatttcaagactcttgtttcatactttaaaaaaaaaaggcagatgtaggccgggcgctgtggctcacgcctgtaatcccagcactttgggacgccaaggtgggcggatcacgaggtcaggagatcgagaccatcctggctaacacggtgaaaccccgtctctactaaaaatacaaaaaaaattagccgggcgtgctggcgggcgccttagtcccagctactcgggaggctgaggcaggagaatggcgtgaacccaggaagtggagcttgcagtgagccgagatctcaccactgcactccagcctggacgacagagtgagactctctctcaaaaaaaaaaaaaaaaaaaaaaggcagatggaatccatgaagttgcttgactaaatttacccatctagttggtgtaaggaaaggaactagaacacaggtctccaaaactccagttatgtgctgctctctatcatacaatactgcttccctttctagctttggtatctcatttgttctcttgtatatctgccttcttactagacttcacacttcaaatgtccaaaagcaaagtcttcaccttctcttgcaagccagttcccatgacatctttcttcactaatgatgtctcactctctaggtaatccctgcatgaaatcgtaagatcatctttgactccttcctttttaccttctaaatataatcaataagtctttggtatagcgagtacattgaaattatatccatctttcaagaacaagtgcaaatgccagctcttcaatgaaaccctgcaaagtaattaattcatgttaatttctctttcctctaaaatcatacatcattgattgaatccaccaattattttgatacttaatcatatatcttactgtgtcactaatgactaaactctaaattgttttgtatttctcataagacctagataagtttatgattagtaggtactcaataaattctcactgtgttgaatcacatttctttataacttgttattggctgacatatctctaaaacatgaataaaatgcttgcaaatatttttgatagttttgaatattaaaaccatagaaactgagttctgaataaatattcctcttaaaagaacattttatttaatatactaattccaagtgagaagaaagaaagtatgagaaaagttatgcacaaaataaaatggatataaaataaccatcaagtattatgtacattaccaaaatggggccatttaaataaatacttttcctgacatttacctattcaaatcacacaaaaataatttaaaatagcaatgactttaaaagaccagtgatatctcattaggaaagagcagttcagaaagcaggctgaatcatgcagtgaaccacagtcagtgggcctgtaggccatggaaggagcactgttacagagtgcaagggacctcaaaaggaaacactctcctttaagaaatcattagtaggcaaagacagctgattttaattgttcagactggtacacaggaggaatgacaatctccaaagtagagaattctttttaaaaaccctcctaattagtccaagaagttgacataccatggcatattcatgagtctacaggagaggaaacagattttaaaaggagagatgaatgaaaagacagcagatggaaagaaagtggttttgatcacagatgactataaatgaaggacaattgagataaattaatattagaaaagttagaacaaaattaataaatataaaaagcagaagataaatggaagaaggttataggaaattcctatctataaaatgaggcttaagaactataggttgcaaaatttctattttgatattaaacatgctcataaagccagagatttacttccaaagccacccaggaaattcaatcttgttaatttactgacaccccgtagatgttaagaatggaatatgtaaagcactttgaaaattgactgtcttaagttttacccaacttcaaggaaagaaaatgatcagttttaattataaaacaatttcttagaaaaataaaatgctaaaagctagtaaactagaaaggatgacatcttttatttcttgattttttaaaaaattacaagaaataatagaataatttttataaataaattaacattaactaggagtaagtactaggccaaaggaccataaattcaacacacatcacaaaatagttctttctctcacctaaatagctcttagtcttaacaaaaaaaaattagagtgtctaacgtgagtagcataagtttgagattttttaaaaacaaaaaaactaagaaagattactttttaaaaaccaataactaagaaacatcagaaagatgcttcactttaccacaaagtgatctgaaaccctctttaatgttgattttgcaatcacagtagaggcagctcagagctattgcagtgcgctgtgacaagagcctccaaaggagatgaatgagatcatcctattgataaggtcgcaatcgatctgaagcagacctttttcaaattagcaaaatgttacagcactttagtaagtgtcaccaacagcccttctccatgaaaaatgcactggcttatggaaaaactaattttgtaaactaaaaatttgtctcataacaaaaaagtgttgctacacctatttttcctccaaatgctcagagacagagattctcaaggtagcctgcttttatatctggtttcagaatagcccacctctcaaacatctcttaaaataagttgtgtctactaattaatatcatgtctatggctaaaagtgtcaagagaaaggttcctcaaaatactaatagatatcaatctcaaataaattctgatcccatgaaaataaaaacatctttagcgttacttgctaaaaaatcaattacctcaaaaccaattacctctaattcatctgaagaaagcaaaactaacccttcagctttcttgggaggaagaaagtggacacagaaggaatcttatcaatggcaaaggggttgtcataaaaccatcaaaaacataatcattgtgtagtaaaagtcaatttctttttccttcaagtgaaaattattatggaaacttctagatatacacacacacacaatggatgaatgtatagataatagaaataattttattaatatctttagaaagtgattctcaaaatggaaatctgcttcagaattaccttgcacttgttaaaacctcagattcctgagatctctgcgggtatgttaaggaacctgcaattttactatgttccaaggtgtttattttgcacgaggtttcagaaccactgctatagaaaaacttggcttgccacttcacttgtatacaagatggtgctggtaacatggagcttgctttctaaaagtgtaaggcgtagtgatcagagttcagatacaccagaggcaccaactccagtttttccctttataatctaactttgggcaagttacttaaactctgagatttaggtttctcatctgaaagtattttaatatctcatagagatgttttagggattaaagaaaatttacgttaagagtctgacacacaggaggctttcaaaaatagtataattagttcaatccccacagtgacaattaacttgttctgcagctggtccacagaatgtacctcagaacagcagccaataaaagaaactgactactctggggtggtgtgctcctaactccccaagacaagctgatttcaagaaatattgaaaatttgtactactatttcataaaattaattttcagtgggtgggcagaagagagaatacttactggacagcttaggaaaaaactaagagaagcaccaaaaagaacttgcttcaaaataaagacaaatttttgagttttctcagtgctcaactctaggcactgatagtgttgagatggcagcaagtgaattagcatcgatttcacatttaaaattaggatgtaatttgccaccttcagtactgtgaggttgactcctttaatttgagatttacatggcttcactgctttacttaatatagtcacttcctgattattcctttctttcttttgtggtttctcaacctttcggtgtcactgattaagattccttataccagaagtatatagctgacaggacaaagggccccagctttgtaagtaatccaggtgaggataatagggacagagacccaggaagagtgggtgtaaacgacatctggttccaccgactgttcactatactcagccaattagtgtgatgaggaagtaacatgctaataaacagttctaacactggaatggagaaaaaggaaacaagattttttcccattggttagagaaaactggctccaggtctaattataaaaaaaaaatcactcacaagaagagaagctttaattcttatttagaatacacagttagaaatatattatttaaaaaggactacactcaaaaatgatgttagtgaacagagagttgacatcatctttcagatctccatacaaattttaactcattgatgacatatgcgttctaaatttgcagcacatactatttttccaactaaaacacctatacagttctgcgctcacatcacctcagatttaacctaaattggtttgcacgcccaaacactgcacaaacacatactgacatacacacatagaaaaagtaagcactttcaactgtactttgactgcctaggccataatttgtacatatttaaaatataattgtggtagaaacttcctagtgattcagttggattgaggaagaaaacaaaaatgctgaaaaatgaatctccattttccatgttcacagagcagttttaagatgacctggtcaattctgtggggagcagacatcaacacaggcaaagtatccttaaacagcagtctctggccgaagcattctgtgcagggagtgaggcccagtgtccaagtaatacatcgttaattgttgacacggcagagaaaaggtctaagttgaaatagttcaatggccatgtaatacaggtgaacagcgcgattatttcccttatgattatgagtcaactttggtacacagaaatggagtagcttgaaaaaaaaaaaagaaacatgagtaaaaagaaaaggagaaaagatagcccaggttctgtctttatttatttatttattttttggtggctgtttagagcacgtgaagatataaaactgcttctttattttttcataggtttaaatatctcttttccctttatggccatcaatgttcccccattttagttctaattttttagtttagtttatggactaatataaaatctttaatctcagaactaaacatgtactatatggacctcagagtaatctgcactgcagccagctagaaaatttgagaatcaacatctcatatagtttttcctacttccttctgaaaagaaagaaaagcttaaattatctttccttctatagtttgccagccagagggtaacttgtccttaaaaagcactgaaacatagatgacttagctgtttaatctatagatagctcttatgtgctcctctgtcctgcggcctcacttcgtcaagcaatggtgcaagagctgtcaagtgaacatgtatataggtgctcctggcatgcccctaaaacaacagtttcttcttccagtccctgccttttcccagataatgtggctgccagctaatacctgtgacccatttttcatgtattaggcagacctgtgctttctcagaaatatctaagttaaaagaattacattcgaaattaaatggaaaataatcctgtcataatgctgagaagaaaataatggaaaaattacatcatgttctaaattgtatatagatcactcattttcttaaaataaattctggcatattagagtttaaaatgtcaagtatggtcaaggttctgtggaaactagtgaagaattgaagatcaggtgcgttagcatcaggaagtgacttgaatcatgtggtctccatggtaacagccttggtgcttacatcagagggccttctcttacacgcaccacacgccatgatatttctgatgagtgcttgggccatggaattgttctcctcataggtgggggccctctgcattcagggctggccattaaccttaatttaggaatgctgatgggtgaaattatcagtcacagagccctgggtctagcagggtacaaggagcactttgtgtacagaggggtagtcaagaataatttagaagtaccttatatattttcaatttacttttggtaatacagaaaactaaagtgttttgagtcatggtcattatttaacatacagggctgctataaacacacacacacacacacacacacacacacacacacaggcaacactttattattgaaacatgttttatttctgtacatatgttgtgttgtgccccacctgccttcgcctggttctaatcaacctcacgcccccttatgctcactcatcaaactcaccggtttatttgcttggtacatttcaatggtcacactgtgaaaagcatgctaaccaccacatcttgtttatattttaataggagtggcttttattacatccccaatgcataaagttttgtcataatggttcttataatatggggactaagtgtgacatttgttactaaaaacattacagttttcaggtcttttccaacctggccttgattgacacagaatagggcttaaagaagtttgctgaagttgtggtcagaaacaacctctgagctctctgcttctttgaaactttgttttctcatctgttgaactaacatagtctcacaaaggcaagaaaagctctgggaggtttattcagcactttgtaataaaatccatactaccttcaggggatgtttcagtagatctgttctcagtgactaaaattaatctacgtactttccttcccacgtgacacagaagtcccagggccttactctgttgtggaaactgatattcagattaatcaagaacaggaatcatagggacagaaatccggagaactctgtgattactattggttctcagttcctttttatttttgctcctttagttaccttgcttttcatctggactaaagcttactcatttatccacggttctaggacacagtttgtcctcagtaagtccctcaatagttactcattcatctactctttctcttttttttaaggtgtacaatgtgatattttaagatatgtatacactatggaataataacttcatatatcatttttgtggtgagaacattggaaatttactctcttagcaattctaaaatatacattattactaaccatattcaccatgctgtgcaacacacctcaaaaacatattccttctctctaactggaacttgtatctttgaccaactctctgctccctcctactcccagcctctggtaaccaccagcctaccctctgcttccaggagttcaactttagatttctactttagatttcaactttagatttctataggagttcaatatagattctacatataaatgagatcatgcagtatttgtctttccgtacctggctgatttcactcaacataatgtcccataggttaatccatgttgtcccaaagtaattcaaaaaggtttctgaataaataaaaaatacaaatccagcaatccattgttcttgggtctaactacaactactactactacaactgaaaaaaatgctaatactgtaacatttattgaatacctatttactgactgccttttccttcatgccaggtactgtgctgggaaatcgagatacaggtaagtcacaatccaaactgtagggagttccaaatctatagacaaagaaggggaagtaagtatacattttcagtagagtgtgactcaggttaccagagggtatgcacaggaagttactggggaactgaggagaggtgggtaggatgggtgccagagaagttttccttgataaagtgaagtctaagctgagtaaaaagtgatacggagaagcaggctggctggaaagaagtgggggtccaggttggtgagagacacgtcaggtagaataagcaacacatgcaagaagcacagacatgggaactttaggtgctgtcagctgcttttttcttttcttttctttctttctttttttctttttcttttctttttttggggggttttgttttgtttttgagacagggtcttgctctgttgcccaggctggagtgcactggtgcaatcttggctcactgcagccttgacctcccaggctcaagatattctcccacctcagcctcccaagtagttgggactacaggcacataacaccaggcctggctaatttttgtaatttttttggtagggacagggtttcgccatgttgcccaggctggactctaactcctaggctcaagcgatctacctgcctgagctgccaaagtgctaggaatacaggtgtgaggcaccacatctggccaggcaacttctgattaaccaatgtgatgggggtgtagagtgggagtaggcagtaagagtggggcaaggggcaaggacagaagaagtagttacaaattattcaaactcatgattaagacaaaatgagtcaaaacctggtaagatttggataaaatggaacataaaatcataaaatgtatgtcctgataaatattttatttgttaaaagatacctgattcaagaatgcttgcatttcaatgtgagacagcctatctcatggttgcatgggcttctcagctaaacttttttatttcaaatgatcatgggatagggtctatgtctgtgcagataggtgagagggaacacaggctaggagacaggctcttggggtttgaagaagaaaaggttaacatttttaaaatgatacttttatttacatttacaataagaaactaattgtaaatgtgactcatcagacagtgaaatgcctttggaataacaaatgtgagcacaaaattatgttcactatagatctgttaaatatacttctattgtatagttctttgaaaggaagaaccattttaagattaaaaataaaatatctatacaatttctctttcagatgatgaaaaaggtctggagatagtggtgatggttgtacaacactgtgaatatactcaatgccactgaaccgtacgcttaaaaatggttaaactggtaaactttatgttacgtatacctcaccagttaaaaattatttaaacctataaaatgatagttataatttgtagtataaaaatttttatgtagagtaaaacagcattaatgacatttagcaatctatgctttcactgtgaccataacattctagtatataaattgctaccaatcattgacccatccattctgtgtcagaccagctacacaacacatgtattgtataacttggatattggtattttttcattttaaagatgacaaatacatattactgggatagaaaataccatttacatacaaaactcaaaaaacatacatggatattattgctactatcctgcatgccaagggaaatttttaaattgatattgcttattacattattaaatgcattttaaaagttatctatgagctagtctttctggaattaaataacagggcaagcgttaaaagttttttttttttaatgaacaaatctgatttcattttgaaggagacatgtctatctataagctaattttttttcataaattagaatggagaagtagatatcaataaatttatattgcttgatacatttcttttaatgacttcagttatttcatgatctatatagaagtctttgtagatgtgcccaaatttggcaaaagtataaggtttgatagagaagacagttattttatacaatgcataccacccaaatctaatttttaaaagttatatgagtaatttcatggtacaaaacccatcctccattaggaaacattttcatttgaaactgaaaattatatgttcccagtgaaggaaaaaaacacttaaaatatttggaggtgctaatctcatactatcaaagatcaaagatattttctttttattatttctaagattctggtgtcctgatcttttactaaagtactcatattttataaactgaagaactttaccagacagagtatttaagggattagtcgaggcattagaagcccatggctctgatactggcatgcccatccacccatacattgagggcctattgtgagccaggtactgttgttagcactgatgaataagacagacatagtcccctggtcccaaaatgggaaatgagaaattaaacaaaactctgtgtgtgtgtatgtgtatattatacataattataataagtcctataaaataaatgtacaggaaggtgttaagactaaacatgagggaagggatctaatttgccactaattttaatgagacaaaagcaaaagctttgaagtcagaaaaaaaatgggttttaatggtggattctctagttaggagttgtgtttcttaatggctgtgctagtgaacttttctaaacttgttttatttcctttaaaacgaggatagcactactttttcttttagggttattgtaagagttagtgataaagtatgtaaaatacttaatagtataaatttcatacacagtagatgttattattatcataatacctccatttactataaaatacaataactgagcagaaagcacatttagctctgggagcatggaaaatcatgttgcttctctgtgtcagactcaaacttcagagaaacaaataaacaattttattatttgaaaactcactctaggctttataaaacagaaactaaaaattgtaggaaatagattcttttctaattaatgaggttaatcatcagataattcagaacatctaaaaatcctttaaatatttctgaagttcatcttgctttaccagtacaatggagacctaacacatttatcacttaggcaaatgtccaaacaaagtttgagaaatatgaataaagtagcatagtttttatgtcagtgggagctttataagatttattatggttccactctagtacagacaggtgaattcactgcacagctggcaactttttacttcactttgtgtagtgaagacctggcatcaaccaaaggttcccattttcttcatccaaatggataattttgcccaaagagatcactttgtcatatgtgctttcatgtggtgagctggcagaattgctgctgccttatatgatcaaacaacaacaataaaaatcacaggggatgcagtgtataggcaaagtacaattagagccatcaattattctcagggataaaacttattatttagagaataaacattacgaaattactgattatctgttcctttaaaaaaattacccagaatgaagagtaataaaatgtaatacaaatataaaatgtaacacaaatatccaaactggatcataactacacaagataaaaatcctgagccaagaagctgtacccaattctcatactttaagaatcttaatagaactgatagtccccattaaattttgtcccattatcattagtacacagttaagactttatatacaatggatagctttaccttcaaggctatttatagcaagctaataactgagaccccaaagacctcaatttacataaaaagaaggcaaggctacattcacccaggtatacaaatcacaactatatagacaaaagctctaagaactcataatctcttctttttggattttgtcagggatggctggctaattggggaaactcatgaaagtaccttacaatccaattagcacttcagtgcaattaagtggtagaggcttccctattctgcagagactggctttgatcttgcagtgaaaagtgtccttccttaaagctgaggttttgatttttttctcagtaattagtgctaattgtaaacccaagcctgacctgctataaacagagtgttttaccgcatttgacaccaggaccctaaatcagtgttctcttttgtctatattgtacttgcttattagaaatctggctattttgctcaacatttgatgcacaatgggtaagtacatactaaagtcagctgaaacaaatgccttgatcttaagagcttgtgtgggtattttcattgatgtcttttaagcccagttaccataaaagtagttgattgaatttcacttaaggaatatactgtagtttttctacacaaagaatgactattcaaaagcagtttctaaagaggtttaacaacgcttgtatgtttggaaaataaaaacaaaagatgaaaatggtcttttcatgggatcaaatataaagaactgcagaaatcaattgcagaattctcctgaaaaatacctattataacaatgcctgttaaatcaattcattgtttcgatttataaaaatgaattaaaatagaggtcaatgagtgagtaggctggtgagatatctctatatggaaataagatgctgtaaaatagaaaatcccagaccttctccaaggtatagataagatcctttgaaactagcacacagtttccatgcaaatgcaaagcagctggatgttagatagaatgtttctccctcaaatatgtttttaaacataccctgttccattatttagcaaatgcttccttcataggaaaaattatacatggaggtatagccagttgaggttataatgttagacactctgaattaggaccaatttagtgatcttgaaatagacatagtctagtgtacagatacataattactggagggaaaaatatgttcccaatacaaatatgaattacacataaaatatgatgacaccaattagcacttcttacaaatagctattttggtgatatttttccccttagggaaaaaaaatcaagagtctagtgacagttttttttctataaaagacgatatgattgaatctgactaaaacaaacaaaaggtagaatgggctcttagaaattttccctgattttacaccttgtaaatttattttaatcattttaaaaccagagtattacaggcataaaaattaaacaataataaaaagcctgttgaaaactttggggtatttgccctatcccttcccctcctcctctccagacactactttcaactcttgcaagccattgcgttggctcttcatctccatatttttaaatcagaaatggctcaaagggataagccctgactatctgtattttggagttactcaggggaaggggctgggatattacatttagtaccagactctcacccctgttttcagactgatctcaccctcttgagaccctgcagtctccaagccctgaggctctctaattcaatcttccaagagcatcatttcctgccaggatggaagtggtgaggtcatttgtccagtgacagagaatgtttcgaggaaggagagatcaggagatccagttgtaacttacacatacttttcaagcaatccctgtttccactacccacaccttcactacctggctcccaatttctcagacctttctgggaggtaaactgggtagctgctctttggtactttcaacctggaagcatttttgttcgacctcacttctctcactaaatccttatcattcctttacaaaatttgtgtggtaaaatgtatataacaaaattggccatgttaactgtttttaagtgcacaattcagtggcatcaattacacttaccttattgtacaactatcaccacatctagttcccaaattccccatcattatgaacatttttttattcttccatctgctttcctgttttgcaggttgtgttttaggagtacggtgatctactttaataataattgaaatgtgtgtttcttttttccttgttttgggtaatttttcaagagaagaatgcagaagtatctttattctgtcatcataaaaccaaagtaccatcttctcttttaaagatgggacaactcttgcctggaatgattaagtaacttgatctggctatcaatgtgaatcagtggcatgacaagattaaaacccaatttgcttaattatctacccaaggtaccttccatcaactacactattcatatcattattggagtccttgtgagttaggatttcaatttttttttctttttttgtacatcgttttaaattgtgtataccaaggagattgagaatgatgtttctgtaaatattattataacactaactgttggacagttgctcagtaggaaactagatctacctaattcttgtggtgacagtaagtaggaaatcgaagatcagaatcaaatctctagaactgcttagatgtgcaggcatggaagaacttgaccaatgttgacagctaagtttatatacccttctccgagagctggcagtctatattttaggacccgtttaaaacaacattttcactcataggtgggaactgaacaatgagaacacttggatacaggaaggggaacatcacacaccaggtcctgtcatgaggtggggggaggggggagggatagcattaggagatatacctaatgtaaacaacaagttaatgggtgcagcacaccaacacggtgcatgtatacatatgtaacaaacctgcacattatgcacatgtaccctagaacttaaagtataataaaaaaaaaagaataggaaaaaaacaacattttcaatattttacctagtatgcatcccaaattagatgtaaattacagcttaaatatttaatgatgtaatagcaaaaagggtaaaaaaaatttctgtaattggatgcagctttttatgttacaaatactaacttcctatattccatgtatcatgtggtcacctactttaaggtgggacaaataattttatctaatgttagttattatctgcttcaatgataaactggctttaacagggtggtattgaaaatagcacattattttttcagcttaaaaaagctattccagttatactaaggtataacggacaaaactgtacatatttaaaggtataaatatgatgttttgattatgtgttaagttttaaaactagacttgatgtgagtgtcactggcagaaaggaggaggaatagagtaacaagggcaacagcatcaaagaaacagaaaacaatgctctcaggtgggtatccttggagtccctattttcagatgaagagctctttttttcagaaaagttatgtaacttgtctaatatgacacagctataagtgatagagctaggatttgaacacagatccagtgctctcaacaactaagctgtgtgtgcagattaaagagttcctgaaaattcaaaaaaagaagtttacttatgtatataaagtaaaccgagatgtaagcataaaatattctagtacactgatcatggtgagggcagggcaatttcttctcatttgtaaaaggcaatttagtctcttcttttagagtagacacatctgttactcttgctaaaccattcataaatatggaaaacatgggatgagaaacactaaactatgcccatgaaaatgtagttgaaaattttgttcttacttttaagtgaatgtgatgaatcattacaaaaacctaatgaatcataacaaaattattttaatataaaacttagtttacatgccaacaattaggtgaataatccaaaaataaataaaaattgcctctgaataagcactgagaaggaatgccatatcaaatgcactctgtactttctttataggaaagccttatgaaccttgcttggagtctagtggctcttattttagaaacaattctgataagctagtttttttccttgtagtataaagcacatcaaagtaagtaaacagaaaggatatactgctaaaagtaggaatacaagaacactaaaacatcaaaaatggccatgatgaccccccaaaaaaacccaagaaagaaagaactccccaaaattacccaagcataacttggaggttgtcaaaccacagcctgcaggccaaattcaacctactgcctgtttgatgacaaagttttactggaaatcagccatgttcatcacttatatattgtttatggctgccttcccagtgcaatgacacagtggagtggcagcagcagagactaggtggcccggaaaacttaaaacatttactatctgaccttttgcagaaaaggctgtcaacaccgtggtctaggtcattgaaagcatggataaatagctttccataccgcatggggtactgtggacatggcacatttgactcacacagaaattgttcgtttatgattagtacactttagtatacactctttaacaaatctctgaaaaatgcaatgcattttagaaaagtttccagaaaaaatgactcattattgtttaatggatacagcctaaacatttcaattaaccagaaacccatttatatagaacacccaaataaagatatctttcttcatatttcaaaaaaaaactatttagaagttgaaatcccaaaattattcactggcagaagcaggtgaacaaagttaagtcaattcagatgcccttgttaaaatattttttccccttaaggtcaaagtttgtgttcttctaatttccttcaggtgatccacagtctcaggactgtagaagcctcatgttgcctaaactgagcacactggaaacactgatattagacaagggaattggcatttttcaagaactacggctgcaatttaaactactgcttgatcttcccctaaagcatactagagaacctaatttccataaaactttctaacccaatttgaacagtataatgtggacagtggggaatacatgggtttgatcaattatgaatttatatgatatgttagtaagctattcaggcatcatcttacaattcagtattttgaacactaatgccatgctacataattttaaaatgatgcatttcagaaaaacctcactagggcatatttgcatatttagaaatctaattaacccaagcatatcttaaggctttcaaaagagaacatacaataacatttttgtcagctgaatgtttgcttcaggctatgtaaggattgtatcatctggtgtgtgttaacccttcagctccccattttttatgtaatggctgtttaatttgggagttgggcagatagaactttccactccctttctgggctggagactctagggctcagcatgaacaagaggacctgtgatggttctctttgttaccaaacgcaagttcaaaactctcttctctcctgccttaggtaatataactgagagctgcactacttgcagaaacacttgaattagatgaaaaaaaatgaccaccacattgcatatacagcaaaacatccccttatatattttctgtgggaaaaatatttcagaaaaaggacaggtgcccactgagggacactacccaaccccacagctgctaccgcttctgcccttaactttaatttcgtctagtgcggttttcttctatcccttaggccagaatctatgatcaaagccaaaaataagagcagaaagaaaaggcctgttctttagacctatcaactctactagaaggcaaaactttgctcctgcatgcatggctctctctgcgtgcctggtagtagaggctgatcatggccaaagtcccactttcctgtgatttttcctttgaaacgttggccatttatcttgccagagtggaaaaagacctgctgcccttgttaccacacctccccaaggattgctgtaggtatggaggctctgacggcaagaaaaactacctgtgctcccacggccttcacctgttttgccaagttccctgcaggtgctccccgtgttagaaaagcccagagaaaaatgttgctctggaagaaatggaagttgcttatgtgagcgtcagttaagtagaaaattggatttatgtaaaattatgatatgcccgacagaatctagacacagtatgctagaaatttcagaagtgaggtaaaaaattataaacttaatttgcaacaatgtacagtcagttcttctataaaacatgttttgaagtcacaaatttattccaaaaggattgatatatgagggaacaatttgagcataatgcaaattacatttgcttaccgtttctttctggaaaacaccagttcaacatggaaaacttcaccaggcagaactgggctggggagatgaaattcacaaagcacacacaagcacacatcttaaacttctaccagctatctcattctgtgttacgtatgagcacacccctccacatctgctggtacatttttacatgggatttcaaatagttctacttccagcatgtcaccataaccttctgatgccaacttccacacgtaaacttaaggtctttttcaaggcgcactgccacattgattgtagtatatatgtagttctgtggtattagcatgtatttcttaaccacttaatacgtgtaaaactatgctattttttatgaggtccccatcctttaaaaattgtatgtgttcctgataaagttcttgagtgttcgcccctgattctcttttctcataagctacaatttggtgcgtggtgtgatgattttgtcactttataacagaactgaccgtaaattaggtttcattgttttattaaagagcaaacaaagggcagaggacagaatcactaacattttagttgataaagtgaaacaaacgttttcatgtctactgctagtatatagcctgttaggtaggaacaaaaagttcacatgattattggcattttagagcatactgggctcacttcccaccccactccaattcagctcacatgccatctcccccagcaaaccttaactcctcaccccaattctgtattagatgcctccactgtatcccatgtgtttctaagctcctgctcatacctttggcaaaggcctcaccacattgcactgcaattctgtgtacttattatactcattcactagattgtgagctctttagagccctctctgaacatgtatttgaattctgagcatgtagcacagtgttcgcagagtggaggtgcccagcaaatgtgtgtgaaggaagaataaaggaatgtccagttcttctttgtatcactcatagccctgtgcacagtgctttgcacagagcaggcactcaaaagatacttgctgaataaatgaaagaaaagaaaagaaaagagaaaacaaaaagtgtacttatttacagagaggcaaacagtaaacaaaattgtatgttgaatttatcaaataaagtcttaatataaatggtgtaaatgtatctttataggtagataagaaaggaagatgactcatattttataacaagggtagaactgttagatttcctcaagaggttgtctggctcgtttctaccatccagtcaactcttaagcctcccaactaggtaagtgttcattcattttaaacatcttcaaagtctgtattatgttccttggtagccttagacaggcttaataatattttataatcaagaagtttcttccaatgtaagatcaagcttccccttactactttaaactaattttcttttgttctttcttctacagggatggagaactggtcagcattctatttttatatgttattcttattcttataagcattcttatgataagtatactataagacagttattaagtcaccgcttagctttctattttcctggctaagcaaccaaactcctttaatcttttcccatatgatctattttacatcccataaagatttgtcacttttttttacagacctttcccaatttcacacttaactttaaaatgtggaaactcgaagttgtcaaaatagtttaataaaagcttatacaatgccaaatataacaaataattatttcctaattccctaaatcccagtatcatatgagttttacagcatgctttgctaatagccaacaacctctcaccccatctccatccctgttagtcctcatgcgctccctgaatgggtggtgtttgaagagggcctggcacccacactttctctatggacaatgttcaaaggtgccctcaatgcatgcaacattctctgggtctgccctcaccagctcactgaactggggcttcaggaaatggagcctgttcagggtatactccattttaattttctgtagtcctggccacagaagagctaaacgtgccttatgcagagcaaagctagccttttcagccttgttttagagcaagcttgtccaacctgtggcctgtggaccacatgcagtctaggatggctttgaatgtgacctatatacaaattcataagctctcttaattaaacatgatttttttttgtaattttttttttttttttttttttgctcatcggttatcagtcagggttagtgtattttatgtgtggcccaagacaattcttcttcttccattgtggtctggggaagccaaaagattggacaccccatttttagagtgtgcaccactctgctaactgtcatacctgcgctcagaaaatcttcctccctctgctgacagtatagtttttctgtctctctcaggatataaccttgaatttgttccacagttttgaaatgtgatttatataatttattaagatcattttgaattctagatctagcattccaagtgtttgtaactcctgttagcttagtgtaatctccaaacttaatcagtatgcctttaattccgtcacccaggaaataatgaaaaacgcagaatggaatctaacacaggcaccaggactgaatcctgaatatctccaatcaacaggcccctattggcttatggtaaagactttgggggtaatctaaaaaaaaaaaaaaaatacacttaactaattgtgataggctctagttagacaaaatcttatttagtgataaagagtagcaacttatggggctgaattaatgtgatactaaattgataacaattccatccgttgctttcctttagcctgtgtaagttaatacttcatcacagaaaaaaattataccattttgggtagatttgctatttgcaaggcagaaagtaaaattataaccaaggttttgcaaagggtgatctttactacactgtttcttgtcactgtggaacttttaaaagatcagtaatctaatagttttaaaaatgtaaaattacattacattaaaatgtaaaagaatgtttaagtcaatataagaagttaaagatagagacctcatcaatctaggtgactgtgatagtcaacaacgtacgtactgagtaactgcatagagaggaaaacactagtaaaaaataactttattgtgaaatgcattcttctaaaaaaattcctttaccttctagacttcaaactagataccctattatacagttaaacaaaaaagagtaaggcaattatgtcttaatacttataaagacttttttcactggcaatttttaagtaggtaagtaaatttaatttccactcaaaaatgtgatccagagcaatttccatcagacaatatttctttcaccattgctgcagtctccaaaggatctaaataacacacctagagacaattaacagcaatgctcttaaggaacagtgttcggttaatcaacaatatttattgactgaaaattcaactgccatatagtctcttagttgattattttctattttttttttagttttaggtccagtgttttcagattactaggttgttttatgcaactgcttattagatatttacaaaactgcacagaaataggtaaagggagagttaataaaaaattatctcactagactcagatttatggaatgtttgataaagagacatctactaacagaaaaaggaacatgtatcaaaagaagaaaaaaatctgagctgtgatgttcaggaaggagttagtgaactgaccttggagttgtataaacatacaattctccccatttagttttctgctggcacatacacttctgtcttcatataatgttaatgcatcatttatttatatcaaaagcctgccctagacgagagtcctaaaaatatagtaagattatagtctttgttctgggagtaaaataacttgagaaagttctcattcttaaaatatgttattttataaaatcaattcttagatactcagagtctagtcattgagctatgaattgcctataaatatgctcggatatgtctcctcttccttcctttttttcatatattggctttgactgctcattagcacatccaggataagacaggctgggtgacacaaatctaccaatttagaaaacttgccaaaaacttctggaaattgacttctctacagttatcttatttttcattatataatgttcttaatatatgtttaattactaggattaagtccaagggcaagtaaacagattacatacagaaatgtcataatatgtattttcacatctcacataccatcagcttataatgtatttccattaaaagctatctgatatttgttttttattctatacggtattcaagattaaagatgtaggtgaaatcttaaaatgaatgtgttttttaaaatgtgttttggcacactctattatattaaaaagtacctgaaataaatgtatcattgtctgggatttagataataaaaatagtgtggttttcattgtaatggcattaggattagcataatttgacttattaattgaaatgggtaggatgaatttactgttttcttcaataagacacaaagaattccagaaagcaaaagaaaaaaaggatgcatggaatctaaaccaatctacatgtaaatttgacactttgcttttgcttttattatgataattagagggtttttgttgttgttgttttttttttttttttttttgaaacggggtctcactctgtcaccaggctggagtgcagtggtgcgatcttgcctcactgcaacctccgcctcttgggttcaagtgattctcctgactcagcctcctgagtagctgggactacaggcaagcgccaccatgcccggctaattttttatattttagtagagacagggtttcaccatgttggccaggatggtctagatctcctgacctcataatctgcctgcctctgcctcccaaagtgctgggattacaggcgtaagccatcacacctggcctaaaagtctgtcttatgtctactggttataagaagtataaagaacattttaagtattacaaaaacagaagaatctaggattccctatctgcaacttttcatctcatccctggatttccctcaaactaacaattactgaagtaggtataagaatgtctgaaatagggaggaaagaaattatttgaattgttaggattatttgaagctaatagataataatattcagtcaacaaagagttattgggtagatttgttaattttatatagacttagataatggacaaaaaagaagaaaaaaggatcctaccctttctcactcagagataaggagtcataaacacaaagactgagtggtgatgatactggcagcagaaacctgaaggcaggaattgtctgcccatgacttctcatgattgtctagtttaggcttgcagtttgactatttgggaatgcctgttctaaacaacaatgaagaatcaaccatgtgagatatgagtagaaaaaaggaacacatttcattttttaaaaatgctttaatgacattattttttcctcctgctttttgggacatttcatgttatagaatcaattggattaaaaaaagaaaagacaataacatatataacagacttcaatatattaataaacagtgtttaaggtctcaagccatataagctagagataaaagatggctgattctagtctcacaggagttgagggagaattataagtattagaatatactaagacaatgagatacattttaaatcccattcactttcactcccttctctctttccaagctcatatatgattgggttggcttgggactggagaatagggttgggaatatctgctatttaagtaccaaattaaaactaaaaatatgcttatcgcttgccactattatggggcaaaaaatatctagttgggtataggcaagcaggagctaagttttattcatgtattatactaagttattcattggagataactcttcctgagagggttaacaaagaactgtttagtttagggtctagtaaactgcacatgttccaattttttttaaatgagaagcaattgtggttatctctgagttatcatttattttgtttatgggttttcatttattttctttgtaattttctgtattttccaaatgataaggaacacacacacacgtaatttaatgagtgccctactataatgctaggaactttacatttattattgctaaactttcaacaatcttgcaaggttggtattattactcctactttacagagaaaaaactggggctcggaaaaggttagtcttgcttaagttcacacatagataattgtcagaggcaagactgttttcaagaaaaatgctaatgaacagagatgggctgtttattattgttgctgtgaggggcatatatgggtcttgggtataatcttggcattctttacagtcactgcctgagagtcttcacctgaaatctatggactttcaatggattggctccaggcaaacacgatgaacacaatctacatgaacatacataatgtacacttctctgggcaggaagttcataactttcatcagataatgactagataaagtgcttgttcaagaaacccggcacatagtttgttctttgaataaacataaataacatttcttgtatggctggattcattaaaggcatgaacgtggttaaaggaggggctgggaggatgggaagtgaaaggcagaaatcagctgcagctctctgggcagatgtaggttaggaaagctagctggagacccatgcctaagaagggaacagtggaaggccatgatctctaactttatgaagcatgatcagaatcacctgtagggcttgttaaaacagattgctgggccccattcccagcatttcttattcagtcagcctgcagtgggacccaggaatttgcatttctcagtgtccaggtaatgctgacactgctggatagggactgaaactgcctttgcaaagattatgacagtgagagaaatctaacatggctgactccatcttgcttctagccacacacgctggctgccttcactcattcctggatgtaggctaagctaataatgggaggaaatttagtttatagtttaactttgaagcagggatgataacaatccctccctaaaactgctcccactccttgtttgggggctgaaactgcctttgtaaaactaatgaaaggccacaaggttaggattatgagaggggcctgaattctgctaagatatatttgcagttaaatgatatccagccattgttccagagctcatgagatttgtaacttccccattactcctgtagataacatcactattgtagagcctaaaattgacctttcgagatgttttttcagacttttacatttctggccactgactgattctacctggacctacaacttgtgattcaatctgtctatggccctgacccagaggctgactcagtgcatgaggaccattttccacatccctatgatttcattcccaaccaatcaacattccccattccctaccccactgcccaccaaactatccttgaaaaaaccccaatctccaagccttcggagagactggctgaatatttgagatttaagtaataactctgttgtcttgcatgtggctagcctcacgttaattaaactccttctttactgcaataccatggtctcagtgaactggttttgtttgtgcagggggcaggaagaatttgtcaggagattacagaaccacatataagggctgaaacataggctctggtgacaaatggagtttaaattctgggttttaccagatgtggaatcattgtcaagttaacttctatctcagttttctaactgtaaaatggggataaatatgtcttgtgaagattaaaagagacaatgcatgtgaaacggttactccagttcctgacatacattaagagctctataaactttatgtataagtcaataaacttaatagctcaataagctttatacataaaatatatacatgtctccttggagtaaacggaattatgtaatactgaaacaattcccacagaataggataatatattaaatcaaagcaagttgggtataatatagtttaatcatctttcagataaataaatcctgttcaaattattgagtcaagctaatcatatcattactatttccttaaagttccagcatttcaatcaaagtggacccatcaatgttaagggaatccatggtaaccacacaaagtaaacatccacctacccattagtgccagtaattatttggcatttgttatgttagttaaattgcgtaatggtgtgtgagaaatcagtttctgcttccttgaccctttggaaagctggttctccaagccagcatcccttgctgagactccagagtctgacagctgtgacttccggcgctggttctctcacaagccccctctggaaatgaggcagcaaatgtggtcttctctaaaaagagtatgaatctattataggggcttgattattggtaaggaccatttctattacggggctaacatctaactaggacttttattgtttatttgaacaaatattcatcatgaaccctgagtgatccttcagagaacatcaattttagatgcatgtgatacaacaaaacaaactgaaaggtttattttcatgcctttagatttcaagaaatatatcctgtttacttaaagtatatgaagaaaaggaaaagagatttaagaaataaataaataatccttaacaataatggtttctaaatataaatgcatctggtatgctctgacaaatctttaaatttgatccttttttgttggtgaaagaaatagtcatttatttgaaatagaccaagaagtgtcacttgaccacatgcgtgaacctatgtaggatgtggctttcgaatgagctaaaaagaccttaaactgcattatcagaaatttttaaagggagagagcttccagtttcattttgcagaagctaggcagagaaaaaactacagctaaagtaaagtggcaaggcacctagaatggtgaaaatcttattatgaacaaaatgataaaaggacttgatgaagcttggcctataagagaaaagacagaaaggggataaaataatcatctttctatttaaagagttgtcatgactacccttcaattaacttaatcctacaggtattacagatctaaaaccacccacaaattttacttaatatttttttttttctttttttgagacagggtctcctgggctcaagcaatcttcccaccacagcccagctgggactacaagctcatgccaccatgcccagctaatttttgtattttttgtagagacaaggtttcaccatgttgcccaggttggtcttgaactcctgggctcaagtaatccaccgacctcggcttcccaaagtgctgagattacaggcgttgagccaccatgactggccaataaaataatatatatatatatatatattttttttttgagatggagtcttgctctgtcgcccaggctggagtgcagtggcgcgatctcggctcactgtcagctccgcctcccgggttcatgccattctcctgcctcagcctcctgagtagctgggactacaggcacccaccaccacgcctggctaattttttgtatttttagtaaagacggggtttcaccatggtctcgatctcctgacctcgtgatccgcccgcctcggcctcccaaagtgctgggattacaggcatgaggcaccgcgcccggccaaaataatattttttaacacaacagctatttactacatctccttagtacgatatcctgtattaaattctgggaggtatacaaaagtgagtaagtgcttcttagtcattagggagcttataattcatagagaagatgagacacaactgtgagggaaaatgggagggcatctgagacacaggcaacgtcacagaaactgggctgagggtagacactaaagagagagtgaggaggagttcagcatggcttgagcaggagtccatgctagaaaggagttggagataacgctaagtacatggagaaccaggggtgaaaatgaatcctatggactggatcctgttcaaagctaaaggccttgtaagtcagaattctggtatcagcctaacattttcttctttactgtttctgcacatctgtgctggtcacggatatgcctaggaggatgtttacatggagtgaccacaactgtgggtcagtgctcctctccatttccacagcatacagattttgctaggggagtagccccttattggagcagaacggaaagagcagaggtgggaagctactcagtcaggacaggcaatggtgtaggaaggactgacgaggtcatcatcacccacccactccattccgctttgagtgtcccactggtctaacggaacacttctccgttctgcccagaagaaagcattttctctttaaagaaatctcagttggctttcgcagtttctgttttaaaatctaacaaattatggcaccagggcagggaacattatagaaaaaaaacattctccttgatattcttgccagcatgcggaggggagaaaaaccaatgaacaaacacagtaagtaaaaacagcattgattctagagccacatctacctgaattttttaccccaccatgctgatttaccttttctaccacttcccttcattacgactgaaaacacaatgcctccctatggataaaaccatgaatgtaactttattacagaaaaatgtacaaagaggtctaaactaaggctgattgtgaaaaatattatacatgattgctagttcactgtgcagcatttctaatataatacggagtctcaaagagtagggacctaactatgaatataatgatagcttaatgagggcaatttcatataatatcttaaggttaaaaaagaggcaaagatgaatattaagcacaaaggtaaaagatatttgaatatacagtactctccacttaaagtaaaagagagtcttgtctttagtacataaataaattttctttcacttgtaaactgaaagcttaaaaggataactgtactttaaggtacatcaggcatactttataggattacagtactgggccatcaatattgaccttatctacacaaaaggcttttatattaggatgtcaaggaaatgtaccaggttcatttaaaaaatccttcaatattcagtaacagaactatgaagtgagtactctttgctttatgaggcttttctcaatgctttaaaaaaaaaacaaaaaaaaccacatagcaatgaacttgctataaaaataacaatgatatttcagaacaaaactttccgctactgagaaccagaggaaaaacatgcaaccatttgctaaaggtgctgcttagctacacttcatttatggagattttaggttaattgataggacacacagccaagagttctataaaccattttactgagcatacatcctgattataatgtcatgttaagaaatggagtgcaatctgtcttcatgtcatatttaatagatttctagtaaatagcccagaagtgctccctctaacaggtgatgaattatattaatgccctgttgtactttcataattaagggtctggcagcacttccattataatcaagacttgagattggaaacaaaaggagtggtttccatgtttcctggctctgactacagtgctcctcccatgccccactgctacgtttggccatggggaccacacctagaaggctgttctcagaaataaaagctggggagttcgctaagattttcttagcagtccattatcaagtcattcctttttttttccctggttttgtagccccttcagtcagcctctgcttctcccctttcttattaattcatacaagtcctattctcttcatctggcctagacctgacgacttttctttgatgctatttgcttacccagatggggtgttgccctgctgtttcctccaaatgaaacctgactgcccagtgtctgagttgcatgctgtcagtttttgttttgtttgagataagagtctcactacgtcgcaggatcatagctcactgcagcctcaatctcccaagctcaagtgatcttcctgccttggcgtcctgagtagctgggactacaggcacgcgccactatgcccagctaattttttttttttcttagtagagacaaggtcttgctatgttgcccaggctggtcccaaactcctgagctcaagtgatcctcccatctcagcctcccaaagtgttgagataacaggcatgagccactgggcccacccagcattctttgtcttttgcataacaaggaatgaacttcataaaaaaaaaaatactgagatagcaaagagagagggggatattgttgatgtggaacttccctccacaaaacagagagaaatttaccagaaaattcagagaataaaaccatatcctctcgggtccatcccaaagaagtgcttctagtggtaagaaagtcagaacacctaagccaggacagaagggcaaagtccggagaggactggaaactggcatctttgctgtattccccaaattattttgggtagatgcatcatacttcacctgcattaacaacacatcataaatagaaatggaagagactaggcatggcagggaataatagagggagggagacaggaagaacaggaggacacagtgagaacaaaggtggggagggtatcctggattggttttacgtgttttgcagtgaagaaaaataattgacgcccagaaaacaaaagaaaaaaaaagaaaatggggtcgccaagtctgctcctcaaacataagtgatttttataagtcttcttgtatctgtaaattctttatattctattaatttctatcacaggcagactatctagtgagcaagctcggccttggggatttctactggtaaggttttttattctcagcttttttccttatgagctggtggcatcaaattggacaagttatatagaggtaatattagtaacttcccacagctgttataaaggtaagctcaggtatttaaaaaacttcaaagagtcacagtcccatttccctctccctaaactttcaagctattaaattatgttaatttgtaacataaattgtacttcatttttacaaaattcatacagagtatattactattaacaagtgagcacatattgttggaatgacagtattaaaaaaggtctagtctctcatgctgatgctgatgaggtcctcaaggttacttgggatctagttccagggtatagcaagccagccacacaacttcagttcccagatgcctgtgagttcctggtacctacttgctatagcatacacagcatccttctaatgtcctctccctttacttgctcaaacccacgcacgcctttgtttcttgaaaccaaaatagaatgaaaccattgaagcaaagtcaaataaaaattaaaaatggctatcatgccatctaaattcctacttgttttgcactggcattatatgaccacagaggaaaaaataatttgttatgcttttaagatagatcagatatacttaaatattgagaaatactattaaatactgagaatactagaaaatattcagaaagctatcattcattttggcacacaataaggatattgtgcatagaatccttatatgtgcattttggggcaaaaaggacaagagtatttttgttgctgaagttgtgtatacttttctagagtgaaaactttatacctaccttttgtagaaaatcagaatgaattagtatggtgtatacaataacctactatgtcattgtgccagaagtttgaccaattccttttcatggaagtttgaaaatgtcaagttcatttttaaacccatggctagtttcatctagtttaaaccaaaagtgacaaaataggaactgactggagggaaaattctgcaatccactgttcttaacatttgataatccatgtgaagcaggtttaccacaaactgctgtgacagaacaaagatgacagataaactcctgtgaccaaattaattggaaatagatgcctcagtcttgtgatcctatttcagtttttgaaagaattatatgcaccttcagagcatgccacatctaaggatgattagtccttgtactgctggcattgggctgatatggcatgtggccaagtgtctcaagaggaagctaaaagttcagtggaggtgatgcagactgtgtagttattccaggattaccttggagaacattctgtcttttctgctgaaagcttgtcagagtttgatatctattctctctatgcctatgatgtgtgttttcagattgccctaagtggaccttcttaaattagtctcttgtttacttcatttttttctacactgctgagaaacataaaattactttgatcatcttatcaggtcatctatatccacataccttttctcacctttgttatgatctatatacatctgaatgatctcatattaaactatggcaactactcccaaagggaactcttaatgttttctatttgtcaaaaaacaataacaccatgcaagaggcaaatggtcaactatttataaatacaaattgctaattttaaataagtcataatctcttttggttttgcttcaaaataatccagtgtgtgggtagaaagtagggaaggtgagagtgcagacgaaacaagtttagctgtctattggtcactgttaaagctgggctatgtgtacagggtttcattatagtcttctgtagactattgtcaatgtttgaaaaattacattataaaaacagtttaaagacacaaaacctaacaacttagaaaagttataataatattatatgtggttaaaataagtctactcttttgactagagatataatctattagattatcagtaattgaatctactctacacagccaaccataataaatttatgagataacccatatctgtagctgaggtaggtagtttaatatctgatacaggtataaactttttatactgataaatatacttcttgccttcttatgccaaccataacaaagatactataagaaaacctgaaataaacaattattctaatagacttattttgttagcatgtttaacttacaatcacaaatgatgctaaccctagcaaattaatctttttaaggctaaaaaaattataagattaaatataaagaaaaaagcaatttaaacaaatgttagaacaacataacacaaacctaacagcaatttatattaatatatatttatcattttgtttgcaatgtaagattgcaagtatcttactttacactacagaattaaaatcccaatgtgtcatatcttccttatctcttgaatataacagggatacctactaaaatcaagtaaactgtttaaaaagacctaaatcacatcacttaaaattgtaaggttaaagtacaatattcttttaaattatattttattcaaattattttaacaagaacttgatattctcatttaaaagataaagcagattttacaatagtgcactataactttctagttagtagaatgacatacaactgtacaaccctatttataatgacaattttgaaaaccattagtcactgaaaatttaaaatatattctaagaatcagatttgagggtggaaacatctaacaaaaaatgtaattttaacctggaagataaattttgggaaaactatgtttatatggttgatcactttttttttctaattttaatgctactgtagtttccaaaagtttatacaaatttattgacatgttaaactgaaaacacgaataaactcaggacaaaaatgtcacataactgaaaccttcatacatttttgagcaatggcatttatgaaagaatggctgaaaatgaactagctcctttgaaaagagataggaaaacacaagagagggaatttaaagtataatatagcacataaaattgagttatcttttctgtacagtcctttgattattttttaaaagtagcattaaaatattttctaattgatatgcaaaaaccaaaaccacataagtagtatggattttcagcttctcacatctgctattgcttgtttttttttttttaaccaacaatcacctttttgtaaaaagaaatttcaaattcataatggtcaggaaggtgaatgaattttacctccctggtgctaaagccgatcttgaaaataatatttttattttaagataataataactatcacttgcagaacgaaacttgttgagctgggtgctttttataagttcatgtgtgcactccttcctaaatatttcagttttttttcagttgaagcaaaaggctcaagtagctcaagacacacaactagtaagacagtttcagtggcctggcatgagccctgctcatgctctttgcatattgtgtgtccagaagataaaacctcttcgtgaaaatcttgtctactatttttaatcgatgtttataataaagatattcaaaaccaagaaatctagtgtaatttagcacatgttgaatagatgctatgaaaccctggttgggtatgacaaaattggaaaagagcttttgaatacccttaggatggagtgagaagctctggtcaggccaaacaatgaatacatctataccattttaataataaaatataattctttggccatgttgaattcattacaggatgcattagatgaaactgaattgatgctgatagctgagacgattattttgtaaatcagttagatattactgtctaaatattggttaaaagagtactgttggatttatttttatacagatatgtttgaaaacgaacacacaaaatctaccaatgataattttaaatcaccaattaaaaacaagaatgtcatcaggttttctcaattttaaaatatttctcattttaaaaaatataattaaaataataaaaatcaagtgacgagatattcagaagtcctcttcaaatatatcctgcgtataatacagttacaatatcctgagttctgtgattagtctgaaaccaagtaattctatatctaagagtctagcaagatatctcctttcaattcattaccactttttttctactgcagaaacagattaatctgggaacttactggtcaacactttccctccacttttgcaattaaaattttttttcaatcattttctcttgaagatgtcatacagagtgctaacactttcataagcaaaatcaacacctttagagcactgaaaatttgatatgagttgaatatataggctgctacaagtagtccttttctacgtttagttttaggagtagtatttttgcaaaggaccaaataaatcattctattaaaatgaaggcaaagcatttaaattaaatattatttaccacatataagtgaaacatcaaagatccaaataatgggttctattgataatagatcaaatttggatgatagtttttaaatgtaaaactcttgcttaagtgaattaaaaggatgaaattcttttattatagatatagtgctatctttaaatttgttggtccattaattaaaagtgaataagagcatgatgatctgatgttttgtttagcttaatgcaagtaactgcccacgctggaatttaactccaaggcaaaattttctaatagacagtactgaaatttggccaagaaagaatcttgtacaaagaagccaactcttaattgtacctgataatgaaaggcataatcccaaatgactactttaactcatatcatggctatttgcccatggggatgtcttcattttctttttttctctttttattgatagataataattgtatatatttatggggtacaggcgacattttgatacatacatacaatgtgtaatgattaagtcatggtaattgagatattcgtcaccctaaacatttaccatttctttgtgttaggaatattccaaatcttctcttctggctattttgaaatgcacaataaattgctgttaactatagttgtcctactatgctatcaaacaataccacgtattccttctattttaacgtatcttcgtacctattaaccaacctctcttcatctctccctacccccttcccagtctctggtgaccaccattctactctacctctatgagatcaaatttttttagcttccacatatgagtaagatcatgtgatatttgtctttctgtgcctggtttatttcacttaacataaagtcctctagttcctagttccaaccatgtttctgcaaataataggatttcattcttttttatggctgaataatattccattgtgaatatgcaccatgccttcatccattcatctgttgatggacacaggttaattccatatcttggttattgtgaatagtgctgcaatagtaatagaagtgcagctatctcttcgataaacactgatttcctttctcttggatatatacccagctgtgggactgctggatcatatggtagttctacgtttagttttttttgggaacctccatactattttccatagttgctgtgctaatttacattccccaagaaggtgttttcatcagaacatctaaataagggtgtatttgcagcttgtaatatttctacataaataaaaaaaatattgtgacttcctgaattaagacaaatataaaattggttaatttctccaccaggtttactgattggaactgttcctggacttctacatgaaaaggaccaccactgctgggctctagaagaaagctgtgaagttcttttcttctcttcccctaaccccttttcatttctctcaaaggaggaggagtgcagatctgaaactggattctgggatagtaactgagcaacatattctagggatgaaactttagaaagaggtaagagcttttctttatctactgtggttgttgctttcttctggcatcctcctatgacaggaaactagtaaggtaaattcaagatccctaacattcctttttctttcagctggggcatacagaactggggctatcgccctagggagacaaggtctgggatagtagggatgggtatggctttttatttcaacagggttactaattataagattgatgtttgggagcagaaactcatttggtccttaaggcaaaaggaccatgtgtttttaaaattagagttctgcattagctttggggtaaaagatgtttatcatcatttattcatttatcatttgattattaagtgaataatgattagagcaaactctggagttggtctctgtcaatttgaattctggctccatgacttaaaaaccgcattattttgggcaggttatgtaatttatctataccttagttttcttatctgtaaaatggaaataataacaataacaactaataataaatccctagcagaagagctgtgatacttgattaagttgataaatgtgaaatccttaaaacagggctggcatatagcaagtgctcaataaatattagttactattatgaataattatttaatataagaaataatgttagtcttatttggcaaactgataagcaacagaagatgcaaacagaaacatgaaagacaaggtccctgtccccagggaacctatctcatggtgtcttgtgtatgtatcttctcagagactgacatcttctccgagactggtaggatttgtctcagtctcagacttccggaggcgaattaccatcttaataaccatccaattttatccttataacaaacatcgactctcagaatgatgccaggaccaagtctgaggcccactagctgaaatcttttgtttttatttgaaaagggctagttacagacataaacgcagaggctctgagctaacactgatgtgtggcatcatcaaaaaggaaacagaaaactgtaggggtaatgtcaaaatgacctacttagattattgttactgtacctccagaaagataaaggatatgggcagtcttaaagatggacaaccaaagggactgaagggatggaaattttcagtggttacaggggcagagaactagctcgcttagatgttgagaagtttggaggaaactgaggagatactgaatgcagcagcaccctcatgagaagaaacccacaagagagctgctttagttccctagacctcttcggtttcacacctaggttatttgcctttaaatatatcctcttttggggggtggggttgaggtgggaagagatggcctgagtgagtccctgtttcttagtccctatagttaagagctcataccatgcccatgcataggatttctctactgctttcactccattccctttctcagttgagactgtttcccttctactatatttagagcctatattggttttggagtgtcaggaagaaagattgtattggccttgcaagttactgtgttcttgcccaggcaggctacaacagagagagaaggtggccacgacagtttgcagattagctatattcatccctcctattccccagaaataacctgccctttcagatctaagtttcccttgctattttatctctatctttggtatttaaatactgcttatgctgggagaagaacaatcctgcatggtttaatctgctcttttataatatcctttcattagcttggaaaatgaggagtcaacataatttattttcaggagtaccctacataaaacccacttaaaaatatgtaagcatatcattgcattgcttaaggtagagagatttaatcatagtatttaataaaataaaaactaattgcttaaatcagagtatcagaatttctttcaaatgaagtgaggggaccaacggattatgacttttccctgttcacatctaaaatattgagataaaaattatacatgcacacacatatcatattaattgtgtgtgtgtgtgtgtgtgtgtgtgtgtgtaaaatgacttctaaatctatacaattggggcaggtaggtgatcatttaatgttgtaattttctttatgataaataagaatcaggtaagaactgcctctctttacagagtttaatgatcaatagattgagtcaaattaggatggaactaactttctattatggaaagaaaacatatcactaatcaaataccctgatttaacatgaaaagtatagtattaaacacagaacaaaggtaaattttctaatttggtgtagcagaagaaaaaaatacattgtctccttgaaactggaactacaatcagaaaaatgttggccttgaaaaagtcatataaaaaaggctataagtctcccaatttctgtcattatttatttaatgtgaaaaacactgccattactaagcagattttcccctttgtccttctacatgatgaaaaaggcaactgatgccacttgtgtcactgaaacaggaagaattatttaagtaagttctatgtgtgctttggggtacacattttaaaaatttttttatcaaggaaaattttaaacataaataaaagtagacaaatagtataataactttcatgtatccaacacctagctgcaacaattaacccataaacaaaagcattttttatatatccctacctacttcccttattctgtggatacactgactgattgttttacagcaaataccaaatagcatgtcctatcattttggtggttcatttaattaagccattacccagcataacaataattacacttttgtttttccttcctcttttttttttgagatggagtcttgctctgtcgcccaggttggagtgcagtggcgcgatctcggctcactgcgagctccacctcccaggttcacgccattctcctgccttagcctcccgagtagctgggaccacaggcgcccgccaccacgcctggctaattttttgtatttttagtagagacggggtttcaccatgttagccaggatggtctcgatctcctgacctcgtgatccacccaccttggcctcccaaagtgctgggattacaggcgtgagccaccgcacccggcctgtttttcttttctaagtcctatcacttgtacttttcttattcctcaatttttttctctcatgtcttaatgcttttataagcctgcaaggggtaaaaagaaagactctcatactgttatggtaagatgatgagtgattattctttatccacgtgtatttctgatatataatttgtgagtctattaaacaaataattaggtaaaaaattagagatacagggatttattaaaccaccacgtgcaaatatgttctaagcaaagctactaaatacatatgattttctgacatttctaataaattaggaaagttgaatgtcagtgaagcttccatttttacattcagctgactaagcaataaatagtctaggcagttgctttttcacatatctaaaagccaagacctgcacaaataggaatatttcttatatttttctcaaaacatttaatctaatatacattttcctactgttttccatttttacatctgatgtctactttaaacatgttttatgtttaaaaggaaggtacacattttatcatttttcaggaattttcctgtcaaatcacactccttggtatcatggtgctagccccagtaattaagtcatggcaataccaaaacaaaatatgtagcaaaccaaaatttatatctgataatgccacagctaaccaatttttgaatagagcctatgttaccagatcaagctcatttcagactaatatcctttttttaagaatatacattcccctcatagtgtccctctcagggctgtggtatagaagttaaaaagttagaattagctgataagagattttcaaaataatgttaaaatcatactaaaattataattattattaattctacatgttttaaaataaaaatttaaggtgaaaattgtttcattaattaagaaggcttggaaaaggcataatacatattgattcataaagccagattatttcctctaccattctaggaagtttctaatttatttccattaaagcctagtgacatgatatcgcaaatattgattttaaaaataaaatcctctgttttaatgccaaataattccaaatattaacaaaattaaatgaataatgtttttttttcttcttaccattgataacatgttttcttgctaatacactgctttaaatcagaataatttgtggtagggcaaaatctttttagtgtgttgtgtgtgtgtgtgtatatatgcacacatgtatcagtctccctcttctttgaggccacaggtaattaattaaaaattagtttatcttcaggctgaagatagcattaaaactgcatattttaaaaaataaacataaagggcaataaacatactatcaaacctatacaaggctgggcacggtggctcatgcctgtaatcccagcactttgggaggctgaggtgggtggattatgaggtcaggagttcaagaccagcctggtcaagatggtgaaaccccatctctaccaaaaatacaaaacttagccaggcgcggtggcaggtgcctataatcccagctacttgggaggctgaggcaggaaaatcccttcaacccgggaggcggaggttgcagtgagccgagattgcgccactgcactccagcctgggagagagagagtgaggctccatctcaaaaaacaaaaacaaaaacaaaaacacctatacagatatttctataatgtcacatatgtttaaaaaatgttttctaagtataagataagttaatattaatcaacgtggttaaaagtaatgatactggttaccctcggggtagggtaatgactggaaagggtcatgggggcatcgtggcaataatagaaatgtttcttgatctgaattctggttacagagtgtattcagtttgtgaagattcactgaactgcgtacttatgataggtgtgcaattttctctatatttacatcaataaaaagatttttaaagcagaaaaagaactaaaaaggtattagagcattttaacactgtatctcctacaccattctgctatttcttaatttttacatattagaaaaatattttcacatttataaatacatataaaatacagaaatgattcaatgttttacaagtcaactatttcctatttaacctgatttatttaaaacacatgctgtttgaaaaatttggaataatcttgcatatgacttagctcccattaagagaggcaagcatggctaaatgaactctttcctacaggatatttaaactctatcaggtgaaccaaaagaaccaaaaagccaggatacagtcttcattaattctagtaggacttatttgagagaggacaaactttcccttacttttaagaaaaaaaaatgttttataagagtttgtgtgtgtgtgtatgtgtatcaatataaccaaagccaaatcaactcaaatttctgaaggcttttataaattattcagtatatttaaaatacttattttggaaaattacatgagatttatgcttagaaattcaagtaatctggcctcatttaatgatgttatgaaataaaaataaataacattaaataaattaaataagtagtattaaatcaataagcatttaaattagttctgtgaaacctaataaaaagcacaaagctgttattctaaaagaaggtgaaagttgaggacagtaaatttgaaaaatggaaaaatacagtcatggaaaaatgagacaatgaagcagcccaaaaaatcagaatctgtagttgatgaaacacagtgcagtagctgagtctataaaagacaatacacctcaacagatctattctttttcttttcttaaagctacagctatatgttcaggcagaagcaaccacttaattttatggttggttatgaccaaaaactcaacaacttggaccatgtctaaatgctcaaaaaacatgacaaatgtcaaatttcctaatacacgccatgcctgatttttttccctttgtttcatacaatatcactctgccttgctgagttctcctgtccaaatcctcccttcctttctctaccagcctaaaatttcattttttcttaaatgttccctgataacattcctgctcttaaattatctttgtctttctctgaattcctatgacactattttttgtttgtttgtttgttggagaccgagtctccctgtgtgacccaggctggagtacagtggcaagatctcaactcactgcagcctctgcctcctgggttcaagtgagtctcatgtctcagcctcctgagtagctgggaccacaggtgtgcgccaccatgtctggctaatttttgtatttttagtagagacaaggttttgccacgttggccaggctagtctagaactcctgatctcaggtgatccgcccacttgggctcccaaagtgttgggaatacaggcatgagccacaacgcctgacctaacagtaataatttaacttttatataagaaatgttttacaagtaaaactctcaaagaataaaatatatctactatattttatcattaattctttaccacagtccaatttacagtgaagaaactgagatccagagagattaaaaaatgtgcctgtcttcacacagatattaagacacaaggttgggttttgaacttaggcctgcttgcctccaaagcattgaagcttatacctttaagcagatagtaattttggaagacagaatttgatttcatcatggtacctctcctggaaaaatgggttgaatttttaacatcactactcttcgcatgttgcctgtgacagatgcagatgtaaaatattagagggaagatgaggaatatgcacatgttcttataaccagttaatatcagggctgagactggaaactgtctcctggtccctttgcaccatgccccactgaaaacttacagcatggagtattccgggatgagagattttatctaagtaggcagtacatcgtagcggaaagtttagggtcagtgacatctggttttaaatcctgtttctactgtttacattgtatccttaggcaacataggcaaatactctaggtatatttctttatcagtataatactaataatacagatattgaaggttgataactgtgaagactaacaaaatacttagagctggtctctctgctccatcctaacttatatgtaaaattgaaatgctgaactctaatattctagtgacatgtcatcatttgcaggggtttgtcatacagcaaagtccacaattcagatgtatgttctctacagtggctcttctccacatgggtgtccaagacccctccaggcatcttaatgagggaacagtgcttctcgctattcattacccaagagaattagggagatggcatcttgaaaacaatttcaagaattcattatcatatcaaatactgcaggtttcattacaagagggcaagcagttacaaaggagatggtttcctttttctttctctgtctgatgttcttgtctgtcttccaagatgtcagatgaacagtctgctttatttataaacgcgactgaggctgagaacaaaaggatgtgattataaaaagaaaggaaaagcctcagaaggatgaggtaggaggtgaacttaaggtctgttaactagatggataaatcaacaccctgagtcactaagacaataaacaaaataaaattcatgttcagtgactgattgcatatttgccacaaagaaggaaactaaagtccacactgacagccattttctcacgtttcaataaatttagaatgaatcctgaagtggagttttaacactacagaaggttattctagagctacactgtccaaagacacacatggctactgagcacgggaaacatagatagtccaaattgagatgtgctgtaaatgtaaaatacacacccgatttcaaagacttactataagtaaagaatgtaaaacatttcattagtattttttaattgattacatgctggaataataatactttgattatactgtattacataaagtatattattaaaataaatttcaccagtttcttttcactgttttcaatgtggctactagaacattttaaattatctatgcagctcacatttgtggcttccattaaatttccattggacagtgtttgctaacaataagaatgaaagacattttaggcaagtgacaatacatagcaattactttcttcaactcaaacgtaaagggttaaacttcattaagaattccttttgcaaactgtttcttgagtcacagatgttcatgtgatattaaacagtaggtatttagtatgttacagtgctacctgaaatattttggccattaagtttataatctacagagataagatttaaattaattctaaatatatatattctgaatataatttctaatatataagtataaattctaaatatatacaatgacactgataaggtgtcaccagaataccagatttcaacatatatgtatataaaatttttgaggtcagaaagtcaaaagcaaaaacccgagaaacctgaaatttctcatcctcaagtactctaacatcttccttattgttgatttcttcatgaagctcttcccagtgccatccatcctccattgctaaagttctgtcattgcaagataaatctgacttgacacttgcctcttcaaacatctccaacaactcctaacatttatagcatagagtctaaactcagagttaaagcttgacaacaccttactccaaaccccctttccactctcatctcaggtaattctccaccatacagtctaaatactgaaggcgaataccatgcccttcccaatcagtccaagcttgagcagtgctcctgcccatttccctccaggtctgctggcgatctctccttgccatcagtgccagctccaggtgacttgggaggaccttgtctatactttccaggtatctggtagatgaatatcatcatatattccacctgtcatattatgttatataggtctattgcaccccaggttagtttgcgacagagtgagtaggatgaaaataagaataatgatattttatctttgtgtctgcagtatctagcacagggataggcatatactaggtcttcgacaaatacctgttgactgagagcattatgccttttaccctccatatcttaggcactagccatgcaagactcttatgtttctgaaatatctaaaattggacctatatcactgccgttctacaaagtgtgggatgcttttttgaaatttacttttttttttttacttttgtcagaaacacacacacacacacacacacacacacacaccacacacacacatacaaatttttaaagtcaaatactacaactagcagtctcatgctgtatgcctccacattcccaaagccccaccactttcaactcatttagctgcttcttgcaattcttcccttcattctcatatttctaaataacacatgcacacacacacacatacacacacaaacacagacacaactcagaccttgctttcaaagaggatataagcaaaaggaggcaggtctatctttatctttatgctcctccaaatatgggactttacacataatgaatactcaataaacacttactggttgattgaatgaatggataagtgaatacacatgttctttggtgcttaagtgtgatctattcaacagtctgaagtggagatgcattcatataccacattcaaggcaaagaaacaaatggacacaccaattaagaacaagtagaaaggcgataatgaaaggcaagaaagacaaggtgggtagaaactaggaaatcctcctgaaccaaaaagtcaggatatcctgggaatagaggttatgtgaatgagttttacttctagatgtataatcttgggcaatttgcttaacttccctggattcctgttttcttatctgtaaaatgggataatgcctcctcccttctagatttgctgtgtctagtaagctgtataaatgaaagctgtattgtttttattgttgtttgtatgcatatgtgaataataatatcaataacaacatcaccctggcaaccctgaagatgagctgacttccggtctaaccagaagcttcttatacgcatactgctaaggcttcaccaggccaaggtgaaaatagaaagatgtgggtacacttggcaatgaaaagtatgcagggagaagatgaagacaggttccttgcagcagtactataaaaaactgaattctatttagagctgcatgttaatcaccttttctgtttgttcgttacagactctaccaaggaaaatccagtctgttctttagatggcacacacagaagcaataacaatattttacaaatgacaatagatatctgatgactgcaaaaatttaatacatatacttgatggaaaaataaatttcataacatcctatactaatgtaatccatacactgaataaaaactctatcttcaactttctattaagatagatatgccagaatctcaagacaataaaatctcactagagagtatcatataccagaacctcaaactgctttcagcatctccacaatgttcagtgcattaatgttaaatgattggttaaaagcatttaaatcaaccttccgttcttgaaattttccatgaatgaaaacaacatccatttaaaaagatcttgcaaaaatgattttgttgaaaagaaaaagaggaacatagcacaataaattattttaatgcatttggctagtgaagtagaatacagcagaagcccttgaatcctaagtgctcatagatgataaacatttaaacacacctgtgctccctttaatttcaatgtacacaggaaattataaaatagctgtgcacttattaaaatgatctgcaaatataaaactgtaaagcaactaataatactaaaatgttgacctcaaagccctaaataacctaaaggtaaaaagaagaaaaattatcttcacatgtggtagtacacgttgctagccgtgtaatttatatatatacatacatatacatatatatgtaaaacaccttcaactactcaatagttttgatccaatttagggaaaggaaaaccccaaacagagaaataagaatgacatgtgtgaatgtttttatgtttttagtgaaagcacaagtcaaaaccatgtctgcaaaatggaattaatccctaattaaattgcttcatcatttaaaatgtctgaaattaattatcacaataataaaggtagaatttaagtactctgtatttaaatatttgagtaaattaaaaatatatttatttggctgaaaatgcagaaggaaaattagtttttttttgtatttttttttgttttttgagacagagtcgcactccatcgcccaggctggagtgcagcggtgctatctcggctcactacaagctccacctcctgggttcaagccattctcctgcctcagcctcccaagtagctgggactacaggcgcctgccagcacacccagctaattttccatatttctagtagagacggggtctcaccatgttagccaagatggtctcgatctcctgacctcgtgatccgcccatctgggcctcccaaagtgttgggattataggtgtgagccaccgtgcccagccggaaaattagtttcttaaggttagtttccgacatctcaaaattaaaaaaaaaaaatcctgggctaatactttaaacatcctattgaaatttttcctcttgtgctattaaagaatcttgatgattctaataactaaaaataaaaaaagacatgcaaaaatatgatcattaccttgcaagtgagtattttcaaatgacataaatttcaaattgcaaatttctcttgtagatttttttgagatggagtttcacttgtcacccaggttggagtgcaatggtgcgatctcagctcactgcaacctccgcctcccggattcaagggattctcctccctcagcctcctgagtagctgggattactggcacacaccaccacacccagctaattttttttttttttttttttttagtagagacggggtttcacctgttggtcaggctggtcttgaactcctgacctcaggtgttccacccacctcggcctcccaaaatgctgggattacaggcacaagccaccgcgcccagtcgtctcttatagatttaaaacaaacaaaaaaaactccttctctttcaaaaactcttgtgctccagacttgccaaaattttttcccacttcaacagagatagaaatgctggataaaatacaacaagcattctttaaaatacataaccgacttagtaagaaagtaagaaaaaacttatgatgcttctcagtaatacttttcccaggtatctacctaagataaatgagaacacgtgttcaaatgaaagacctgaatgagaaaggtcatagcagcattatttataatagtgaaaaagtagaaataacccaaatgtccatcaactggtgaaaggataaaaaaaagtggtatagccataaaatggaatactatttagcaataaaaaggataaaatactaatacatcccacaacactgacaaatctcaaaatactaatacatgccacaacatagatgaatctcaagaaacttactaagagaaagaaggtatatgcagaagaccacatcttgtttgattccctttatacaaaatgttcagaaaagactaatctatatagacagtgaattattagttgcctgaaattgaacaggaacggtgattaactgtaaacagagaagaggatcttaatggagtgaaagaaagttttaaaactgaattgtgatgatttcacaactctgcatatttactaaaataattgaaatgtacacttaaaatgcatgaattttataatgtataaagctgtttaaacaaatgaagtaaatgtaaaaagttaaggacccaaaaattaagtatgaatgccacagctaccttgaggaagcttgctaatatttgtggccttttgaatttaatggccatgtgtgataaggggaaaaaatatctcctctgagaatcaaagtcacaggccaatcacatgaatatggagtgtgagttacccttttttctgctcttagaaacccctgcccaagaactgaaactgaaagtagtccaaactgcccaagaaactgaaagtagtccaaactggtagtgtaccagagttcctggtggagcaaacacagatctttgaaagcacatccgttaacacaggtcacagtgggttcccatagataaagatcaagtagaagttcacaattaaaaacaaaacaaaacaaaaaacccaattcactatgaatgagagccagaaaaaagaagaaagaaaagaataaaaccctaaaggacttcagattttagattatcagacataaatgtagtaaaagtatatccaaactgtgaaatagaaagagaactgaaaacatgagcaagtaacatgttactataaaaaagacaaagcagatttatgaaaaagaatcataatttccagaaagtacaaagatgatcactgaaattaaaaatccaacagatagcttacagagaaaattggacagggctgatggaaaaatcagcaaatcgtaagcagatgtgaaaataacatacattatagcatagggatggataaaataaaagagagattaatagattaaaaatatagcatgagaaggtctaatatatatggctaaatgtccagaatagagataatgggaaaaaggcaatgtttgagaaaataaggtttgaaactttccccaaactaattaaagaactgagtccttgggttgaggaagatctataaattctgaacgtgataaataaaaagaaacacataggaagagatataacagaaaagctgcgcaacattaaaagtaaaaagaagatattgcaagcaaagaaaaaagacaattactaacaaaggaataatgattggcagctctttcaacataatgcaagccagaagacagtgggataatatcttcaaaatacacacaaaaaatttaattcctaaattgtatacccaattaaatattattcaagaacctgggtaaacttatgttttgatattttaacagacatttgtgtgtgaaagcctcatacatttcagttaacgaacactattttccccattttttaataaaaagtaataatgtaatcctacttattctaaataagtaggtaagaaattgtatcttatttgaaaaagcttatgcaagaaattaataaaaatatttctaaaatcattacatgatagaaataaaataatattccactatcatataacatgatttaattggaaaatactcatattttctaccccctttgcaatactactgagtaaaggtatgtctggttgtctcacagaaaagttcctgggcaaagaggaggaaaaagtgccatagttaagcaatgggagggaaagtactccagcctgggatcgaggacagcttagttctggttctagagctgggaaaaaccaggcctcagttttcttctgaatgaaaatggaggcttcagaggaatcagcattttctcacagctcctatagctctgaagcttgaaaaatttttagccaaattctataggatgccactgaaacttcttcataatctcggaaccaataatcaaactagtgggaaatacttctagacagaattcgtagcgtattatataatacattcttgcaatattttcccacaaaaattcatattagctaggaagcttccattctgattcctcatttccccaaccctaagaaattagataatagaaatacttgttttaaaagatgtttgcaaaactgacaaatttttgccaagaacactctacgctggttaggggatactgggtgcctgtctcccagtgttcccaatagtagcaaagcaaattgctagagtgtcaaattttcaatgactttttttttttttttctgttttgctctgtcatttggagaccagactgaataggcacaagcaagattctgggtgattttgctgcctcgtattagctaggtttttctccctcatgcaaaaataaaataggaatctaatggtacttattcctgtggctatgtctggacgatacgtaaagtatcagagtcccaggtgaggccaggactggctggtccagaggctggaggggaggatttcagaaacagcactgtcatcctttcatatgccctacctcctctgtctcaattttaggagtataataaatgttctcttaaaaagcatgctgggcagaggaaataaaaaatgtggtatggatggtggttaaatatctgccctctaatacatatagaatcgtttttacatttaaagtcaaatctgaagctgatttaaaaattcctacagtgggtaagagctaagaaacctttcccatgaaaatctgacctttggttaacttcccagatctgttctctggcaattctaaaatggtattttaaccatgttattataagcaactattattgcttattgtaacaatgatccctgattgataaatagcatctgtctggtttgagagaactataaatacctgatagggacaccattgctttcgattacctgaatgcaatcattgatataactggacttataacgtgtggcaattctagaagctatgcctgttgactgttccaagacatattaggtggtgggggcttgaagcttctaagccagggtaatgcctgtatctatgttatgtggatcttacctccttatacttgagccttcatctggtgggtgaaagaagagcctcctgactgctgggtgaaccgtgacgtgggactaccacaaggtctcctacagaagctgaccgcctgacactgccctctggcaagctaaggctcttgtcttgctgagcacactgtgccaagggtggcctatggtggctaaatgtctaaatatttatttgaatctaaactaaatgggaggcgaggcaccggaatgtttaaattttaatgtttcttttggttttaggtctatatgtaacccaggataaacaccatattgctaaagtcataaaaaaattaatttaaataacattttaattcattcaaaaaattgtagaatgttcattgaagccactctgtgataaatagattataagataggaagaagacaaatagcggatacagttaagtggttaccacagttatcagtggatttggctctacttaaatatattttgaggatagagttgaccgggcttgcaaatggatgtgatgaaaggtagaaagaaagtgaagcatcagggagatcaaagttttggccaagtaaaaaggtgaatagtgatgccatttacacagggaagaacagtagtggttatgacgaagtgatagaaatgattgtgagaataaacagccttctattctgcatttagattaacctactgaaaaggaagtacttacattagccagtgcagggatatgatgctttgaaaacagtgataatgtggatccagttttataatcagtattacatacttagctctttttatgggaagcaggtatgaataaagaagaaaaagtaggaaagtcaaaacgcagctttaagtgtgcagcagcacatcatgtgttaaattgaaacaaccccaaagttcaactttcttcactgttcaaggagaaaatcctttactatgtacttcaggataaaggatttgcaactatatggtggttgagaaatatgctattgctgtaatttaactcactgtatgtgggcttcaagatgcacagtggcattccaaaccaacttttaaagaaaattgcatggaattttgaagacatcaggagcgttcttaaaagttatgcagagaaaacggatttttgatagttatgaattatatttagtgctgccagattgcagggaacgctctttttgcctcagtatggttaaaattactgttgacaaagttttaatttaaaattttaaggttttaaatggaagaatataggtcactgaattttcattcactgtttaagtatgactactggcagaaagcaagctttgttagtgagggtccaatttaggccctggagtccatcttttctgtagtagttgggaattgagtatgtgttagtgagaataacttggctctcagtcagtcaatcagtggactgaacacgcacagttagaaacctgcctggcacacaacagaagctcagttcagaaaatactaaacgcatttgtgagacagactagagtccacacaaatcatatattacaatcacaagctggaagggatccgatctttcctagcaggttgtagatttagatagaaatgtaatagtccaaaaatacactacacagcttcaaagtctaattctacaattttcaaccagtttcttaaaggtgaaaaaaaaaagtaaatatttgtagagcccactgcacgtaaaaaatgtcttaaaggaccttcccattaccagaaaaacttgggaaattatagtaggtttctaagttaaatgccgagtatacggtatgtaggctactaaatatcaagaccacacttatgaacaatatttaaaaagtatattttttcataaatctgagagcgtagatttcaaatgaagtctaggaacgaagatgaagcatgaacttcatgcaaaagacagcataacgatagaaaggctgtacctttccacataatgtagagtatgtgagagcgtcatcaggtttgtgctgtttggtgtcctatttgtcctcaaggacctcctccagctctagaatcagcatgttcctccaccgaatgatgaatgtgatggataatgtttacatgtgcggcacatattcatgcgcattccctgaattttctgtagccccaaaatattgtggaaataaaagaacgtgacagaaatgtggggggaatatgcattaggggaataagggactagactttataacaataatacacttcacaggaatgtaaataactaataaatcgtacactggtaagtacaagcatcaaaagctgtgacaacaaagaaaccagaaatcatgtgcaaatatcaacatgcttgataccctcatccctgtttctagcgcttaaaattttgtcagggtccaagagagtgaaaagaagatatcacttaatctgttccaatttataatttttttgaaagttaatcatttgcaaaccttgaatgcaaggtgtgttataatggcaaagttgaaaacgaatgctttagaggatttcaaccaatttcttatgtaaaccagagcagaagggatgattctcagaaaaaagctgaagtacatttgcctcaacataaaataggactgattaaatttcaaactcttcatttattttgtagggcagaaattttaagttccttattgctgttcaacattggcagcttaaatcttatttattattgatgcacatatataggtatgctactataatataaatgtgtgtaataatatgtattattcattaaaagttaattggttactataagatagaaataatttaaagtttcaaatataccatcttctagcatattcagaaaatatcattctggatgcgcgcagcttggttgtgagttgctccctatacaagtgcctgctcctcagaacaccagagacacatctctggacttcaaacctccaaatctgacttcataaggctgacttcggagagatttccaaacatacaaagggcaaggaagggattggatcctattaggattttattgtgattttatttctaatagtagaacagaagaatcctttatgagcggaaataaaatatcttcaaagcaaactgctttcttggagaggctcctagagccatatgtgaggaaagagatagtaagtaggaagaaaaaaaagggaaatttaacctaagaaagaaatagagatgattaaaaatacacaagtatcaatcatcaaacagtacatagctagttttccacacaattttttttctctgcttctaagaattatttgccatatgaaagcattttggcaggcaaaatgtatattatatcagtatgaacatagttcatttgaaaagcatatatatatatatatatatatatatatatatatatatacagcttggtcgtgagttgttccctgttttatatatatatatatatatatatatatatatatatatatacatatatacatacacatatagttttgcttttgtttttcatatatatatatggtgaatagaaaagtaccataacttcctgaagatgaactgaattttctttgtttattcctaatttttagttttttaaaatcttttctctgccctcactcagtcattttcaatgaaagccaagtcactttcagtcacttggcatacacagagcacagaggcacggaggctggatcagccatgtcgactcaacacaattgtttgaaaagttgaaaagttcaaagtatttatttaatgtcatgcagataaacccaaggaaagaaacacatttgacagataaattctaggtgactgagtctttacaagcccaagggaatgttttaggataagggtgaaaattaacagcttaatatttaagttaaaagtaagtttgatttacttaattaggaaattagatgaacaaaacggtctttttgcctaaggagaaagttccatttaatatctatcctacagtgaaatcatcaatctgtctggttctttgcctccaaaaaatatgagatggaaagaatattaacccctgattttatagctaataagatcaacgtgtgggatctgatgagcttgggaaggctggcaccttctacctcgagaatagtgtccattttgtaccgaggaaatctaccggttttctaccctctagcaggtcattcactgacagatccagttcttacttatatattgagagagaagttgaactagaccagtatttttcaaacttctggtcattgtgttaagtgacaaaattaatctactgagagtccaacaagcacttcaaatgcaaaatggatttctcactgcaggacaaagaagtttgaaagcccatgaatgtaataccatacagttttgaacacttttctatttatttccaaatggctgggtccaagaggtccattttcaatacttaaaacaaatgcagaatatttgagacaaacaaaatcagaaggtaatacccagcaagttgatggactagctaaaatgtaaaattacttcttcccaagtcccacctctaacttctccaaaagtagaaaatgtgtctggggattaagtgagtattgggtacaagaaactacaagcttttagtccttgaatgaggatgctttaaaacctgtgtggaggggctgactttgctgagttgtaatgagaaggctggacctgtgatgacgaatataataggttttaagctggaggaataaaagacagaaaaacacagtgatgtaagattcgggatgtagcacagacttagaaaaattcaatcaaaggaagcacggttctttagaaaaatggattatcccatgtctctaccataacgtgcataagaagagcctggtgtatcttgacataacgagtccatgtcaaaagaaaacaggaatcaaatgaagaagcttccactatcaaaaatagggcaatttgagcatcaataaaaaaaaattgcaatggatcactgagtttaaaatgataattaaacaatagttcttcactgatcacctttatgggatgatgcaaaaccactgcatattttaaaaactggaaaataaaggaaaacaattacataccattcctgcctttcctaaataaattgaactcaggtaaactggaaagctgatatttatctaaagtccagctaggagatgaaaagggaaagaccttctggagaggcttaactatgcctatgttagtggatacaagaatgtgactctaatctgtgataaacatacaatataatgaattattttaatgttaaatttatattgtgttttgagtgttactctcactttctaaataggaaagttgggacatgtttgttttgtttttcttcaaaataaatcatgtgttatgtgtctaacattagtaggctaattagtaagtagcgaagtagatctagtccaacatcagctggtgaggacaaaattatcttgaagagcaggtaaaaccataagacagcacttgggaatagaagacatatggtttgatactttagaagaaagggatgcagctcttgggctttttctccctttttgctcctacttttcattgtatctcggaaaataaggaacactaaagctaaagagaacaaagtaggtagaacacaaagccacactgaagagggatttgattttttacttctcagagaacattcttggagaggctctctcaggagaagaaagttaatggggctgggtgcagtggctcatgcctgtaattccagcacttcgggaggccaaggcgtacaggtcacttgaggtcagaagttcgagaccagcctggccaacattgtgaaaccctgtctctactaaaaatacaaaaataaaataaaataaaataaaattagccggtcatggtggtacgtgcctgtaatcccagctactggggaggctgaggcaggagaatcactggaacctgggaggtggaggtcgcagtgagttaagatctcgccactgcactctagcctgggcaacagagtgagactctatctcaaaaacaaacaaacaaaaagttaacaggcaactgagggtgaatgatgacactgaggcctgagaacttctgagtgtagggttaagaaaggaattcaagaaagcaattgcttacatttctaggaatagtaaaattatgtatctctagaaatatctgcactttaaagctactatgaaagtatctcattgaatgttgtcttaaattgctttaaaattactacttaaataaagaaataattcttatatgaaaagcagagaaatttgagaagtcatctgcaatggggaaattttagtttttgttttgcaaattaactaaaacctgtcaggcctcagcttcctcatctattgaaaataggtaatactacttctttcataagttagttataataattttaaaagaggattcagaaaaaatttaactcatgaagaaatatatacacttttgaaatcattttaagaaaatatttgttgaatatattaatacatactgaatatcaataacaatctccccctttcagctacagaacacttaatcatggcatgcaacttacatttggtatcagcatggcaaagttatagtgaataagtaaattaaacctattaagttctagaagaatataattagatctcatggggtagcgctttatgacattgttttttcatatgcagattaacaaatatggctgtctggatttagttatatttttaaggctctgacatctggaaaaatcctactggaaaaaaaagtgttgctaataataaatacaacacttctctgacctctgagtgattatgcaagacactgacttaatactgaatgcatactatagtgttacgcacaaattatgtaaacctgaagctatccaggtctcagtttccatgtctacaacttgaataataatagtacctagctggctgggtgtggtggctcatgcctgtaatcccagcactttgggaggccaaggcaggcggatcacctgatgttgagagttcaagaccagcctgaccaacatggagaaaccctgtctctactaaaaatacaaaattagccgggcgtggtggcacatgcctgtaatcccagctactagggaggctgaagcaggagaatcgcttgaacctgggaggcggaggttgcgtcagccaagatcgcaccattgcattccagtctgggtaacaagagcgaaactccgtctcaaaaaaaaaaaaaaaaaaaaaaaagtacctatctaaagtggaatattaataaaattaaatgaataatgcccacagaaaacatccaatacattttatctattttatctttattattattgttacgaaagtttgttatttcacttatttctaatttaactggatacttgattagtagtgataacccaaagtaatatttccttttacataatatatgttaatggaagttgttaccatgggaatgctgaataagacaggaaaagtcacaacaaaaattggaacttaccctgaattttcaactagaatattttcataaggtttcttcaaaaatttgtccgtgtttgcatgtaatcactttggatgatttctattctttcttcagaataaccaacgcatacaaaagcatccattcagacacctgttcttgctctgagcctttccaagggttgttctacctcaaatgcccttccttctcctctctgttctcccatgtctcctcttccacaaatccttccccaaatattgcagtctatgatgattctgtcctctcttgagccccaacatgtcataggcagaaaattttacatggtttccgtcttctttctcaacacaagagtacttcccatccatctctgtattttccacagcaccctgccagtagcatgcacacacagagtaaacatttgctgaatgaaacaaaaataaaaaaccagtctagaatgaaccccaggattagaatggaatttagagatcatataggctgatttcctacccaatgctttcatctttccacatcctccctcagatattatctctgcttgaatagttctcgtaatagagaactcactaccactcaagatatctattttcaagaagttttaaacattaggaagtcatttcttgtttggcatactggaagtctagcattattgcaattatcttggtattcattccagctccatttagaactatccatcagtgatataatactgataatcgtcaataataattctatatatatacctttagatagtacttggaaaacaatgcttagtctgtatatccaagagtactatgcagtgagggttaaagataggaactctgtgaaaaatgatgctttatatgatttgggactaatttcctatacctatagaagactgtttcaaagactaatgttaaaaatagctagttaaaaattggacaatatatttcagaaatgctaacaggaattgaggaaagaaaagataaaaagttaatatttcagttaatggttaaatatgtaaatttattatttagcttaaaaactaatttggaacaacatacatgtacttcaaagggtaagaaagttaaggggtaagcacgcaaaaacaggttcatttgtcttttaaatgaaggctagaatgtttcttaatttaaaaaaacgactaaatgtgaagctagagttaatctttgaattggttgtggtggtattttcttggatgaacgttttaagaagtccctctcaatagatttgacatttgtagtctattctagcaagacacagtgataagagttgtcactgctcagtcttttatttcaaggttacttagctgcagtcttgggatgacctaggcaataggaaagaatgtcaacaatttctttgctgtagagcaaaggagaaaggagaaaagattaataattaaataccaaattttgggtgaaaaatcatttccattatatactagtccgctttcatgctgctgataaagacataccccatactaggtaatttataaagaaaaagagctttaatggactcacagttccatgtgactggggaagcctcacaatcatggtggaaggcaaaagtcacatcttacatgtcagcaggcaagagagaatgagagccaaatgaacaggggaaacctcttataaaaccatcagatctcgtgagacttattcactaccgccacaacagtataggggaaactgccattatgattcaactatctcccattgggtctctcccacaacacatggaaattatgggagctacaattcaagatgagatttgggtggagacacagccaaaccatatcacattactaagaaaaagaacataacacctgctaaatgtaacagtaggaatataaatctggtaaaggggaactccaggaataaaagaaaatttagaaatggagagaaataacttttaagatgaacataaaaacaagggaaatttgcaagcatagatttagcaatttagtactattttgttagaaacaataaaagttacctatatttaaataatagaatggaaaaaaaagtgtgaataatcaacagtaaacattaggacattctttttgatttacaaatgtcttttctaacattcttctctatcaccttacaactattagagttattcctgctgacaaaaggagtggaatcttacctagcaatcttggagcagtttaaaatactatttaaaaatgaaacaaaatataaaatgaaaaaaacaggaatttcatttaaaatgggagatcattacatgtaatgcatgcctaataacataaaacataaaataacataataaagagcaaaattattttgggcatagaaatttttttcttgaataatttatcagtgctagtctggcaacaaaagggataccggggtaacccagaatgcttgttggggtttcttttgtttcatgagtgtatttactttgatgatgtatcccagatcctaatttgggttaactaacagcttaaaagggttggtatcccaaggagaggtagggaaggtataaccttttaatcttccaatagtatcagaaggtcaacaaggctggggtgaggtgtgggttacaccaaaacgatgaataatgtcaccaggccactccctgctattcttgtctggaaaacaagatgcattttttttaataagcaggctagcctgtcctctggatcctaccagcattatccctttaggaatgcagaaactaaacatctgtatgtagtacatggcccagcacacggtgggtgctgactcaatattttttgacagaatattatgtttgacagaatgaaatttttttatcatgtctgacatatggcagcccaactaaaatgacatctccaatcataatcatggacaaagtgacctccttgacttggaagaccttttgcccagagcaattcaaaagttttgtcaagccacatggttatgttaaaaagtcccagatcagtactgcgatcaagaatacagggcagccaaagacagcctcaggagagcagtccacgggtctgtggaaaccacacagaaggatgtggagtggtactgagtgagcctgtgggttgtcagcaacctgtatgcccccaaacaacagtgtcagtatttgagtgtttccagtcctctttaattaaagattattttactactttaaaatggaaacaaaaaaatatctctagagtgtatttctagggcccacaggagtgctaaagtgaaaaaagaatgtgacaactcagaaagaaacctgggtcattttacaactgccccctgacacaaggttcacaatggtaatattcactgtggagacactaatggagataagcgctttattcatccatcccgttcagtacaccatatgaagtgctgtgcggcccaagagaaataccacttcctccacaggcctgagtgacacaggttgatttcaccttcttgtcttcttcttaatcccaaggacacactttcctgaaggaagtaaattatctttttttctttctttctttctttcttttttttttgagacagagtttcgcttttgtcgcccaggctggagggcaatggcatgatctcagctcactgctacctctgcctctcaggttcaagcaattttcctgcctcagcctctcgagtagctgggattacaggcatgcgtcaccacgctcagctaattttgtatttttagtagagacggggttttaccatgttggtcaggccggtctcaaactcctgacctcaggtgatccacctacctcggcctcccaaagtgctgggattacagggatgagccactatgcctggccttgaaggaagtaaattttcaaaagaaaattgagcaaaaaagtaggttgggaagtatttgctgacaaattgttccaggaacaaagaaaagcacaaggggagcaatgagaaaattatccacataaaatgaaagtagcacaaaggagagataggtgagaaatctacgacaagaaggcaaatgaaaggttttagactttttgctgtatctttttctattgcctactaataatcttgtttagctagcttagctctggagatcaagtaggcaggtatagactaatgtaggtcaaatttctaaataatgatttccacaaacagaaaagtcacatttggaagaggagaaggctaattcttcttcagagggaaagagaaagaagattctgtatgacaagaactgccaattagtgagtgtcgactatgccaccaggcactccacaagtgttttatattgattttcactaacgtatgtggcatgtatcatcacgtggattaacagatggcaaaactaggaagttaagtaacttgctttaggtcacaaagaaaataagtggcaaagctggaattttaaccgaactctctgacacctaagtttgattttttttccacaacactgccaatgacatacatttgttcagtgataaaggaatgacaatattatatttctctttagggagcaatttcccaagactgtattttctatttagctgtgtctgaattattgatttgtttatagttgctaccctttaccataaatatctatgttcagtttggggagtaagaagcctattagcatgatcgttttctttatgacaactatatcatatatcaattaaaataaacataactctgtaacagcctggccaggtgttaccaagtactataatactacatttaacacctgtgagaatcttgacaaaaattacaaatgatatgccaggtgaggagctgttcctgaatcaatgaagcctgtaaaaaaaaataaaaaatctcagtatactgtactaaaagaatgtacatacccaccaccatagaaagaggaggccaaaaacagactcaccagcttgaatacgagtaaagcaataggaagcagaatcatggggtagtctcttaaaggatgaatttcccgctgtatcagatgtacatcaaattttacaatttctaagtagcttcaataatcaaaaagtcctatagaatatgtttctactcgtccagtcaaagaaggaaaagggcatctgctttttgttcttagaatttgtaataatagggtaggggggacacagtctctccagcagtgcagttacctttaataacatgctgtttctctggttacaatgaataatctttttgctgcctctttgacaaaaattactcatatagcattggcattgtagtgggtgaaaagatgagatgagctttcagtaatatgtttaattttataatcaaatagctattgtagtacgatctcataacctatcaacatttccctctcttcctcaattgtgcgccaacattttggagaacagaatcaacagatgcaaaaactttcaccatgaaccttttgaatacctgaaatcctaatgaagaaggaaggtaagatggggcagagagcttgagagctggagggactgaggtgcaagaaaaatcatgatcaatttcttatcaccacggagaggaaagtccacaaaattttcacttccgattccgctcaaatggacaagatcagttgtcaactttgcctgacattatcttcatttaggcaagttttacaaaatgactggttgggccccatttcatagaaattctaatttgactagttttaggtgaggcttatacgtcaatatgttttagaaactcttcagacagtctaatgtgcagacagggttgagaaacactgaactaaaataattcagagacacaaataaatgtaaaccatattggtaaggttttaacataaacctcttctaagacttaggaaaggaaaggtggcagaaaaattctaagtgaatcttgtttttatcccactcctgtagaaaaacaacacttactagcagtgtacactgtgctactcacgaggttaggtaccagatacatacagaagcatgaagtcagacattaattccccattttacaactgaggaaatggagtgtcctatatgtgaaggaacttccctaaggtcaaagaacaaagacagaacttgatcccagatctgtctcaactccagagctttttaccttctcaattatcttctggaacatttctttttgtacttgataacttaatagtaggtgctgggcactgcctttgttatgacatgaagtatctctatgccttcaggataaagtgtgactttaacaacattttacactgcagaatctcagaagagttcattataagggatttactatccataactcctggctattagctacctgacaattggcagtgaaaaagggggaaatatacaaaaagactggaagagcaggtaatgacaagtttcaaatgaacaaatcaaagtattagttaattaacaaatctacatgggtatatatacaatatacatatataatacacacatacacacacacacactctctctctctctctcaatatgccgtgtgttggtcagggagaactctttagggtctagacaatgcaagacataagaagttttagagagataaccatgtctaagtagcaatctaattgccaaaccagaaaacaaacaacgtaagtaaagaaaaatatatcaaaacactacttttacaaggcaaaattaggaaaaaactcacaacccagaaacattataagacatattctccaagataaactgaaattaggtgtgtttctaaatgtaaaaaaaaaattagattatttttaaaattatagcttcagtagagtttagtaaaatttttcaaaaagatgaatttagtagctaataaaagacaactctcccatccatggtagatggtcagtgtgacatcctaggactggagtcatttattattatatgtcagagctaacaataaaaacttaatggattattaacttccctcaaggtagaaagaatattctcaaatttaaatgaaaaaatcaaaaagtcagagaaaataaacgaaaaccatttcattctcttataaagcctaatatattttctgcttaaaactctgtaattagattaaatacacaaatggttaagaaaaaatttacaaaattaaacaaaaaaggaagggctaggttatttttctttattactgcgacaatatgacttcatatttttcataattgtagaaaacaacttgcttttcaccactttaaaagaatattgaaatgtaagataatttaaaatgttgcatataaatgtataccctttacttcctatatccacaaatggacattcccaatgctttccagaatttaaagtgttaagaagtttggcatttagaatgtcagcagatatgcctttgatatgatattacattaagcaaataaactcaatgtaataattttcttagttatatttattatgctcaacattttattgttaaacttattttcattgtatacctcttttagctatactttttaattttgtgtgagtgtgtgtgtgcaaacatacatgtgtgcatgtgtgtgtgattgcatgtggcaatgaagtaatatgcatattcattttactctggttcttagctcataatttttttatttttattttttggtatggtcacaatgagcataagtgacgatagacagtctctatgatatagttcttgatttctttttaagaactttcaatgattttgtaactttttattcttagaaaggattaggaaaatggttcattacctaccataatctgtgattttacaggacaccaaatatagctctttcaggttttgtccttcctttgcaatgacctccacacacctgaaacatacaaaaagtggttatactaatgcgtttcaagttaaattagcaggggtttgaatataataggaagaggtcagtatttggtgaatgccacagcttctttaatggtgtttcaggaaaggtattatattccctgctttaaagtcaagtgctgtcatacctaaatgactttatttaaatacatttatgactagtgcatcttttaaaaccaaacagcttaaaaagaaatattcccataagagtaatgttacatttggtaataaaagactagtaaacatatgctatttaatgaatatatattatttatataataataatttattataatagaactgtagaatatagatagatcgttattataggtagatggttatatgctcatggttcaattattaatgatggaattaggtagcactgaaatagtattttttgcaaaattttattcaacataatatcaaatatattctaaaaagctataattttacagattaaagatgaaagaaaatatacacacataactttaaaatcttttactttaaagtatcttattcttaatattgtaagtaatttgttgtaaaggtttaggccattttaacaatatagatacagatatgtaagactgtcttttctggtttcatttaagtttcatttttttttaatggtgcactctgctctaataggcctagcggaagttgtatacagattcgaatgaactttaaaagtaatgattaacaatattatccattttgtggctcagtttcctataatatcagaaaaatttgtgtagtcatacagacacacaggcaaatgcacccttcaatgcagtccctcttttaatctttataaataacagttaagtaaaagggtaaaagcaaaaagagtcattaaccttttctaggaagtaaggatcaagtaatttgatacctgtgtgcataatctatcaaaaaattactcagtatccatctctgtctttcctatattttatttgctgtctggcttatttgtaggaatcttcataaaatgtcaggaaattttatacaattttacttcacataattcattattgaaggttaaattagttatagagaagacatatatgttttttaaaaattttttatggaattttgttttaatggaatgataaacatttcaaatttcctcagaataaccgaataaacattatttttcttcccctattcaaaaaagatctataaaaaaatggataaacttttccatgtctaaaacaggaaacttaaaacagcaacacaatgcaattatgattgatacaggttgtgagggaaattttaaagcctaattccacgtcatttggttataacataatatttaaataaattcatttaaaaaagaataaaaacagaaacgaaacattaccaacaataacaacattttatatggtaaaaactatttttacacgctaagagtacaaataaaggccctagactataatatcctaaatcattaaaaaataatctgacggctttctgtcaaatcaaatatacatatctcactgtcctcttccattgcctaccaaaaaaactaacacatccaatattttgtgtggccaccaaaaatcattaattgcagtttgttctcatgctctatttgaatagttcaaaatgcctgattcatatttgattatgctctaaacaagtgcaatatcctatttatcttccttgtacttgattttacattaaatatgctataagcacatatgaacattaaagacatacagatgactacaaatagcaaatgacacaaattgacttcactgtacaagccaagtcaaatgttagtacataagcaacaagaaccaacatttatataaaataagatgatcaatcactggataaagactgtcctaaaaactgataaagggtcatgagcatcaggtttccccgctattcacagagaaaagttcaagaggtgtagacaattatgaatacgtattataaaatcatttagcatactcaggaggcaatacagtggccaagagacaacacatgattaagagtgagcagtgtctttcagataaaaaagggagaaatataagagaaaagcaatttgctttttataaagaatcacctagcatttctgctgttcttgaaagttcaggtaaacaaggttttccaaatacttttaattaccttgatcacagccagtgtgctaaaagtcatgtacaacataaaattattcctgaagtaaaaattcatggagacaaaaccatactccttggaaaacttgtagcaaaatattaattttatatctgttatggattttacatttgaaaagagaaaccccaaattctgtgattttggacataaacgtcatatatactgagacacaaaattgagtggttgaaataggtagataaagtagctgttgtttcaagaattgaaaatggaagtggtttgtattatcccattactacaaattggtggaaatggaacaccacctcatgttcccggctagtgtctaaagtctcgtaatccacctatgtcgcgtttccctggcagcatgtggtgatagcagttcatgatgagagattgtgggtggtgactatccttttctcctgaaacttttagagtccattctataacatgcttacaagtagtacataacacaagtctgtgaacatacttactttaaataattccactgtttcacaaagaatcttggctctagtcataacctttggtgtattaaaatcagagcaattcccagctcactgtatagtatgtatgcaaaaaacaaagtcataaatcttagtatggactacaggtacagcaagttaagaggcatttataaactgataccaataaaagagagaaatgtgtgcaaagtgataatcttgaagtgagaaggagagtgacagaaccaaagaccacatttaaaatgtttacttcttcatcacctttcttacagatactacatagaagaacattcattaatcatagtcatgaattagtttggtctgtaggagcaagccatgagtctctaaactcagaatctagaattcaagttattcctatttttccccaaccccttgtccccatcactcctataggcaaagctcagaatatcacatggccattctctatggatcagtaggttcaaagatttcccacttcatgtatgacaacataaggagttataaaatttggaaaaagaactgtctccttacagaaagtatccgtgtataagataattaagaaaaattcataacatgggaaaatggcatagtggataaatgctgaggaatatcaaatacttttaaagtagctcatgaatgtcaagcacaattaagattactaaaccctaaggagagatctgtcttaacaagagagaataaaagaatcaaaagacattctagtcttacctccagggaatcacagaacaatcacgtacattttttggagccctatatcatcattctctacaagataactccatatgaaaaagttatccaaatcaaatgtcttcggttcatttaaatatactttaatttattctgaattgcctaccctcagtttattttcctgcttttatgttttggcaggggtctgaagagaattaaaaaaaagacattgctaccattgtaaattcttgagtaacagctgttgagtacatatatataaactcttttggaatacagagaaagggccagaaaacctgctccaaagtatcctaagcatccagagttatttttgataataatgtaattttatgctcacttggttttgataatgttctaaaatgcacctgaaacatttgatgaaatatgaaaagcaacagaaaggttactttggtaagctagataggattttttttcaaagatgagaaggcattacttactttcagtggagggaaaatctgtctccttagcaatagattcgtaatcatatgatttatgtgaagggtaaaggttaatgaattaagctgtgtaagcttcaaaactatcaaaggaattcaaaagagccttgaattatggaaaacaatggcccattctacatacataccaaatttttatgtttttttgtctcctactcaaaagctagaacatggcattagtgacaattgaaaagaactaatgaggaaatatgactacatcgcttgcaataggagtgtcctaggagaccttgttactgtttgtgatgtgcttcaaaccctaaagaagctaattggagctgccagacactggtttgcaaatctcactttaaaggacaggctccatcacctcagaggtgtgaaaagaaatgtccccagcagagatgcattagtatgtggcttggtgaatttctaaataaactttaggatgttctttcctaagtcacttttatatttgaataatagatatatctttaagtgaaacacaaatgcaacaagacaaaaacaaccccacagatctaaaacaaagaactatgaagagtgtcgtaaagtaattggcaaataagtgcatctgggagctaggtatgtttaggttgaataaacgtgtggatcaaacctcaaaactcctgaaacaaatcataaaagtgatctatttggggttttagaaatagaacctcattttcatcatttcttgaaactaaacaagccaagaatccaacctatgttacatagatggtaagtgggtaggggcttaagtagctacaacacatacacacacacacacacacacacaaacacacacacacacgcgcgcgcgcacacacacacacacacacacacacacaggccccacacgaaaggagtaaaaattgtttacgagatctaaagagagtaacgagagcaaacagtccaattccatgctgcagaagctcatccccactaattcatacgtgggtcatttaaatgatagcagaggtcaccaaaacacaatttggtatcttacagaaagaataatgatatctgattgatttttctaaagctccaaatcaggttttactgaagaataatccaatcccagtgcagtaaacgaatgggtataatttataggtttactctgctttcagaaaatgcacaatataaaagatttctatgcacaaaagaggtaaatttacaagtaaacttttacaagatgagtcaattcgagaatctattaatacacttgatctcagtcaaaaggccaagaagtaatcaagtatctattaatagtatgcttccccttaatacatttgaatacaatttcatttatgagtcttatatttatagttactttttctaagtaataggacatcttaaccttgcagaaatggcatgaaatagtttttttttaatcttcaagttaaacagctatacataaatgacaaatataagattatttctggaacatgacagatggtatcaaggtgatatgttaaatccactttgtattttacagtatactttttttgtaaatgctcttctattcaatcctattgacaacacaataccaaatatacacctaagtcaatttttcatgtaaacttctaaagatgtgctcatagaagagatgtttaccgcaagaaaaattcttttttaaaggttgacttgcaattaacatgcgagagcatttgctcaaagcacgttcttaatataccacaggggcaaagactaggagtgacatgcaaaatatcaccaactccaccagttaacaacaattatctccggacactcattaagttctcactaccaaatgttattctctagaaagccaatatctgattagtgtggctgagattaatttaagctcttgctacttaaacaatagcaaaccgatgcccattttgtcacactgagaagtaatggaaggctacaaaattagaaaagcagtgttttgttatttatgttttaatgagacacatcacaagaggtggcctacaaactgaaatgttattaaaacttaagtactacgggtttgcatctttgccaacagagggtgtcctttaaggaaaaggaggcagagcagatgtcatttgctgattctttctggaccactctctccttgagtgtctaacattaaataggttttctcattggagaacaggatttagcaatgaaaaagtaatataccaacaaaataatatttttcatatatttaggaatggccatcacaaacctgctgttatgaaaatacatttttcttcatttatatagtaaaatgtttaaacttaatttgagtgtttcttagaatactttaaaaatgtattttagacagaataaagcctgcaatattttaaaatgcacattttctttaagctactaagaaacaagacgattaaatgtttttctgaggggcaggtacagaaattgaagtaacaaacttgcaataaacttggctctggctttaatatttcagatctacttaaccaaaagtcttgctttttaattttagccattgatccatccattaccataactaactaaaccttacataacaagttaacattttctaagcattcctcagaatatgcaagaagcagaaaaaagatgctaagctttatttattaattaattcacttaattcaagaatgtttcattgagtgtaaactatgttttagaaatactaaaagatataatcaaaagccacattattataaaatgatgaacataatacttataaccttgatggatcaaatattgtttattttttgtgactgtagttgatattaatgttcctacctaggagcagcaaagtcatattactatctctataactatcaaaaatcaactgaaggtcagcatttcctttagtcctgtaaataaaatatttcaggactaaaggaaacgctagaaaaaaaattaaaggcaagctttcctaattcaccagtttattcattcttcggtagaaacacatgtagttagttactttgaataaggaaatgctaagaaacctcctccatcttttaaggtttgtgagtttccatcaattcataatccgtaactctaatggaatccagatactgtaaaattttgatatagttaagactggtgctatctttatggtgttctggcatattttaatacagacagcagaagagaagactttgtcaccctacatgtaacaaggatttaccatgtggaaacaaaagctcaggaccctagaaaagcagaaatactaaaacatttaaaactacaatctaggttaatgaattgtaattctttagagaccattcttgtcctgaaaaagagtcaggcaaaattctgcaactcgaaactgatgcccaccacaaaaacattaatagtgaaaactagaaacattgtaaagagatttgtcagggctccaaatagctaaaaaggataccgtgaaatttaggtgaaatattaaacatataattgatgataatctctctgcccagcctgttccctttatcttaactgctataagtattgatatgaaagtctcagttcaacagagcatgtattttaagcttacttttaatttaaaatggctaagactaaattattttagtggaatataaaagcactcagaagatgagatttcaggcatcattcatgaaagagttaagcacttcctcaccagaagacagccacaactctgctttgcagtgactaattgcctctttaacccctgtgctctgggagttggcctgtgcttcaatactagttttgtgctacagccaaagactgatgttcaacacagacctcccatgacctgtgtagccaaggaggcaactcagacaagatgctgacaaaaggtttccttctcatttgggaaggcataaaatctctttttggataagccaaattctcagaagactacaaaacacaggaggtaaagataatttataaaagttaaaggaatggtttctcacttgagctaagaatgattctaagcatcccaatgtatcactcaaaattttgttcaaaaatggttttagtaatacgaaaaaaaagtttagttattttaaatgcaatgaagacggtacctaatttgatgcctttgaaagcttataattagatagctataatcaaatacagaggaaagcaggtcaacatcttcattccaaatgtttcccgtatgctttaaacattcataaccaggaagcctgcactttgtcattaatttttaagcctggcaacttctggtttgatcaaaaactaataaaaaaattttacaggagattttacatagagattatacaaaactaattaatcctgcaagcaggatggcagaataggatagtcatgacttcttgttattttttaaaagggaaggaatgaggaaggagttgtagattagggagcagaaaaagtgtaggcagtgggaacaaagtaacccacatattcattcagaaataagaaaggagaagaatcacacaagcttgaggaaggcagggacctacataaatttgacactattgatacttagccagattgtactctgaatcctttgagtctcaaggatcatcactgaatatataaaacctgcttccaaagctcttgggactgccattgctttactcttatttttcccatataattgcacattaatgttcacatcagaggcaaatcatctttgctgtaacatttgtaagaaagaggtagcaggtcatgttaagttgttttggtgcactgtgtttatgcagagagataactttttacttaaaaaataattctttttatttatagaaatatgtggactatatttaaaaaagaatgtgacaataaaaggcatcaaccaataattctctataaaaattatgtagtttatttttttaatccaaaagaaaggaagatagctgattttggttattttttttttaaccgaaggatagagaaagtcttccacatttcctttttaatgttcaagtaaatgctataggattagaattcgagattccagaagaggctattgaatcttacgtagcttctcaggctatcaggccatttcagtggttcctaacgttaaaaagtccatttgtctgtaaaataaatatacttctagaggtttctttctaaactgtttaataatgcaaaaacttggttataaataacttataatcaaaggactatgtagtatacgtgtacatgtatgtacatacacttatgaagagaactcttaacaaatatattttttccttatcaatattgtcactaaatcaacaaatacatagttgttgtgtgtgcactaaataaaataatttagcagcctaacctctgaaataccataatcacaaaagtccaggttgctctgcatggattagtcaccagtctattccctctgaagagaaacacatctctgttcatagggagagtggtggaaagctaatgaaaccagtgtggaagactgatagagaccacagggaggaagtattacccattttctccttgcagaaagttgcaaaagcaagacagtaagtaaacacggagaaaggagaaggcacatttcactatttgtttcagacagtgggtacctctgcaggcaacatcatgtctgacagccagcagaaacaaccaacattcccaatccagtactcagatttgcgttattttaaaggataaaccaaaatgaacagtgcatctctttggcgtattttgaaatgatctactattaattaatacagttactgttctgtctgcataatcaacaaaccatttagcaaaagagagtaactgtattaaaaacttctgctctacacaaacagcactcctttcaagtacccaactaaataaaggcataacattctggcattctgtgaaagaaagattgagagttcaggagaaatagtttattattttcaaaagtcattagtggaataaggaaggggagcaatggcaggtgtttgaaagagatggcaggtaaatgtgcctggaatcagttggtcagttttgtgcttctataggtcgtgagggcatcatgaattccatcctggtaatgacagaattttatagaaaaaaataaagttagagcataaattcattttttggagatcttttattgaaaggtaagcacagacagggtcattagattcacaatactattaggccatttggcaacatttggggctctgggaaaagtaagagcaattcaatgacatatcgcactctgaaaaaggtgacaaattataaaaggtaacagtataagcaagttagcgaatgtggatatatactcagggaagcattagttgagttagtaatttaagtttgtggagagaacactgtaatggggaaaaagaaaagaaataatactccatatattgcacaattactaaggagcccaaatttattttagctgtttacttatatttagctgtattcgattagaaattcatataaaactataaaagaaatatttgagaaaggcaatgagggtaaaaaataggtagaaaaataataaaatctgggatatacccatcctgaaggcattcatataattcagacctggaaagcttccacaagtgggataaaatttcaagctttcaaagaaccaaagaaagagggaagcatggtaatttatgcataatatcataggagttaaaaaaatcagatgttcaaaagaagctacaaaaaggctagatatgcttgaggcatttctggtggaaggctgacgttttaagaaagttcaaagtattctgcatccatttagaaaatgtcctcccacttcttaatagcattgtaaacttaatccatgagaaactggtctctcaaaaaaaagttttaaaaatcagaaagtatcattgtacatggttagcaacataatacagtaataaaacagagatgatacttcactacacctgtattttactgaattttaacacttcaggtagaaaatcaattggttatagataatggaaatgcatctgcaatgctgactgccaaaattctgtgtgtgtgtgtttagaacctggtactgaagttgggaactaaattcaacttctctaagtctcttctataaaatggaaactacaatatctacctccaaggattttgtgaaggttacatttcataacgtttgcaaagacacttttagtcatttaacaaacatttgctaacatctactttgtcattaattatttggatacaaagacagataaatctcttcccaaagggaattcacaatcttctcaactttaaatatcctccacataaataaggcagggttatttagaacaaaatagtatttcctaaggtacatttctcagaaaactagcactctggggctttaatatttgacatatgcaagaaacagtaagtttatgttaaatcaagtccatttttttttatttagcaaaaatacaaatgtaaagtacgtagagcagcacctagcatacagtaagcaattaaatgttatttatcattattgaggccctagcatggaacctggcacacttaaaaaatacctgtagtaggccgaacggtgacccccaaggacatcaggtcctaattcacagagccaataaatgttaccttccatggaaagagtgtctgcaggtatgattttgagatggagagattttatcttggattatctgggtgggctgtaaatgcaatcactagcatactcacaagagagaggcaaatgaagatttgacactgacagagaagagaaggcaatattactacagaaacagagattggggtgatgtggccacaagccaaggaattcctgtagctatcagaagctggaaagacaaggattggattcttccgtagagcctccagacaggggatgacaccctgatattggccagggaaactagttttggacttctgtccttcactattgtgagagaaaatgttttcattgtttttaaactacaaggttgaggtaattttttacagtagtcacaggaaactaatacagtgtctaagaatgatattaatcactggattacatgtgtaacaccaaggaatttgatttataaaggtaacatgttaatggcaattaagatgatgtgattggatggaacaaaattttaagttgttgtgacaaagacaaaaaaagaaaacctatacttagagaacgctaccatatcttcagcctgaattagaataaattccaaaaggtatgtatttaaaacttgaaacttttttagaataaagactcattttcctctgatataatggaaaatttcaagtgaaaaagttgacagaattgtgtagtaaaaaacccattatccatcacttagattctataattaacattttgctatatttgctttatctcagatgtatccatctatctctttattcatccctgtatccatccatcagtttatcttattttttatgcatttcaaagtgcagacattgatacattttactcctaaacactttagcatacacatcataaactacagatgaatgtttgttaatggttatttattaagtaaattttactcactgtgaaatttgtgatgtgggcacaaatcttaaaagcaatcggttttgacaaatgcatatatatgtctacctcgaacccctaacaagatctagagtattcctaacaccaccgagttccttcatgcccaatgcccattcccactcacaaatgcaactaccgttgtagatgtttttgttactttgttttattttacagtagcttagttttatccattttcttttgtgagtaaaaacctaaaagtgaaattgcagagtcacagagtattagtagtacacacgtagtaggtgcgcaattagttttataagaaactgccaaatcttcttccaaagctgttataccattttatattcctaccaacacacagaattttagttgctccacatcctcaacaacatagatgttatcaggctttcaaattttagacattctgatgagttcgtaaagacgagttcaacattaaaaaatttaaagattccataataacaattctactcttattatttttcattaaggaaatacacaatgacaaaaagtaactagaaattgggtaatatttttaaagtaattcatatacttcctgaattttgaaaaagtgtacaagacataaaaatatatatgtgtcatataattaatgcattttacaggcaatacttgttgtaaaccccatgcaatagctttctgggcccagataacatttcacatgctagttctttgggatatcttcatggttaattctatttatttcatcacctttattccaagcaacctacatatccagcaacgaccagacaacttcaggacacacacctttagtcattgcatatagccctcaatattatattacatgtagttctccactttatctctaatgagttgaactggaagttgggaaccaattttaaaatcagccccaaactgtcatccttgttagcatcaggcttttcatttaaggtttctactctaactgaatacttgatggaagaccttacataatgttgtaacttaaaaggtacactgcttatcctatcaccgaaagaattcttaaaattgtgttgccagaaactggattaggactctggcattagccagcaaatagtaaagctagataccatgtacctcccagcagttttcttcaaatcactgaaaataaaaaaggaatttctttttttttactatttctaattaatacttgagtaaattgctcaattttaagaaacatgcagttatttattttcatagctatgaatactgtatatgaaataaaaatcttcactgaaacatgctaaaaccttagaagttttcaaatgaacataaagctgctttgtattattagagagacaaactattatttttcataagattaatgttttaaaaatggaaaccactgagaaataactgcaaagttaaaaactgtatcaaagcttttaaaagtcattttacactgttacactattcaattatgccatataattttcagaatattcaacctaattctttttaaagtaaacttactatcaacctcaaggttttcatttattgacatgaagggtaatttatcttctctcattgttctttataatgtttggcattttgaagcaatgaaagactattcacaggaacccttcccccaataaacattacataatttttttctactaatgatctaatacagaaagccatggaaagtgactccaaattactcaattgttttcaaatttaaagaaattgatctctcagtgtgtagttatgtacctttatagttatgtacctttataaatagttatgtttatacctttcttctaagaacaatgattagaatcaatgtctacaaataattgcaaaggagaataaatgcatacttattgcaaaaattaatacagagtccaaatctgtgagtttaaaaatctctcataatagctagcataacaaatgccaaacattaattataaaaagacattcagaattatgtgggagaggaagaattttttgttcgtttgtttgtttttttcttttctgagatggagtgtcgcttttgttgcccaggctggagtgcaatggcgtgatcctggctcactgcaacctctgcctcccaggttcaagcaattctcctgcctcagcctcctgagtagctgggattacaggcatgtgtcaccatgcccggctaatttttgtatttttagtagagacggagtttctccatgttggtcaggctggtctcaaactcccaacctcaggtgatccacccgcctcggcctcccaaagtgctaggattacaggcgtgagccaccacatccggctgggagaggaagaatttttacatggccagccagctttgtattcacacaaatgcagtaccaccatatttattattgagccttgtttccaatgcccatgcccagccaccttaagtctagagttcagccaaacacctaaagcactctacccttgaaatctgagatattattgcctgatccaagccagattaaaggtgtggagaggccatgaagacctgggaaaaaaatatggttccttttccctctagttttgtgaaaaataacaatgaaaatactaaattgtacaattaataaaaggaaaaccaaagtctaatttttttcagattgtttatgctgctctcgtcatgctgatacactaaggctgtgcctggtatacctaacaataatccaggagaaagaatgagtttgtagaaagtgactgctgaccgtactggcaccagtctattttcctgttttatggattgagatgactgtgccagttttttttgttgctgttcaaatgttggccccatctattattttcaatgtagctagaaactctggatattgacttctggttcatatattcttcataactttgtctgtgggtccactggacatatttattacaaagatggtttctcaaaacaataaacctttcatacacttagattccatgagagtcacaaggaagcatctcaggcatattttgcgtggctgagtcagggtgtcaaataaacttctgaatatggatacctttagatcagatgtgcactctccagtcctgagcattccctaatgttacatttgatgcactttcttcatttacattccgtatctggccctcacagaaatttaagtttgcaacccctacgaataccatatacattgcctccacatgaatttgaaacccataattcagacccaagcgcttatgtcttctcatagtgaccattgctcctaacccctagtttcccttcattttgttgtgaccattgtatgaagtatgtcatcatgctgacccgacttcctcctgctctggcctgacttttccggctaccattcatcacatagccactggcagcaggactcacgcttatcttagattagatacgcaaaacaggtttgttgaacgaatgagagaagaattgatgcacagtaataaggcaagtcatattgttatatacttagcatttgaataatttttattattcagaatactacttttgttaagaatatttcaacaaagtagggcattatttttaggcatgaggactggtttgcttatagttaggaagagaaatacctaggcaaaacttgtctaataaaagggataaaaagcttgtggtaacaaaacaaagggaattaaaaggagaaaaggctgcatatgtagatccctagggtttaaaatataaataataaggtaagaatatgtaatgaaacataaagtagcttctgctgaatttctctcagtaaacatatctcctatgctaggtaagacaaaaggattgagaagacaccatgatatttattttacagtaagcaaaaaaacaacagaagctataataatttttgacaatattatgggtattgaaaattataaagtgccattaatttcaagaaactcattttacacttcttgatattggaaaagaaacatttacctaagggaggtaaatttactttccatgaaaatttccactgtaagacaaggaaaatatcacagtttgtcaatgtgagagtaaataccatagtaagacaatatgggatttgctagcgattattttcaaagaaggtagatgaggtaaacaatatagtttaaaggtacattttattaatactcttaacatttatttacttacagaattaagacaacatgtttacttgaggtacctggaacatacctaactctttttagtttaattcagaagtggcagtggctttaacaggcagaatgacagggtgctctggccacagactcagcagtctgagttcccaggaccaaatccaggcttgcagacctcagcaagttagtgtctcacattccttatttttacagtgggggcaataagatctacctcaaagggtttttgtaagaattaaaataaatgctgtatgtaaagagtttagaatagtgccttggatacattggtacatgtgttagttattattacttgaattaaattttcccttatctctagacattatgtgcctcgtgatttcatataacaagacataccccacaccatctatgtagtatcttgccccaaaataaaaaaactgaatttaaacaagcctctaatttacctatcaatttacaagaaatgtaacggaaggaggcaagcagcaaaacatatggaatggcaccataagaagatgattagctaaatacagaatgaaagaaattttgcacgacaaatgattcatgttcttcaacaaataaatgacatgcaaaaatagggaacgggatgttagttatttaaaaagacctaagagctatatcaaccaaatgaaacacttgacctaacttggatcctaatttgaataagtaagctgaaaagggcattttttgagacaggaaaaatttaacataggttccatattatataatattaagaaattattattacatttgttagttgtaataacaggactgtatgtgtacatttttttaaaaaacccatctgatagagataactgaagcatttatacatgataatttttttgagatttatgttaaaatacgccaaaaaaaccctcaaagtttaggggatcagaagatgaaatatcaatggcaaaatgttggcaattgtgtttcggtgatgggtacacaaagtttcattatatgattctatatttatgtgtttgaaactttccacaataaatgtgaaatttcacaaattcattatcttgtggatttaacatttctgtttgcccttaaatttgtttatatgcctatcatatttgttactttacttgagcaatttaattgaatgttatattataatgaataaatatgaacacaaaagagagataattatttctataaaactacattgaatgcatatatttgataaaggcaattcacaaaaaaatatgcttttgaattagatgtgagtgagataattgtaaaaatttagagaatgtaaaagttggtaaaacttaaaaggtttctacacttaaattgcttcacaagtatcttagtgataacctcaccatgatgtactgaaaactggaaatccttgatgatatactcggggtgtggtttatattagaaagaaaacatgaaactcccaacagtacacttagatgcagataaaaggtctcaggtctaagtagaagactagtgaataaatggacatttaaataatttttaaagatacaaatgtttaaaatattttattttacaatcttcctcttgctttacctctttaaatgaacaaatactaattcctaccagggcagaaaagagggccttctactgcgttacaagtttttgttctttaatgaagtttttagatcccttgttgagtgcaaagattatttctattttaaaatactgctgaaaatagtgtttcaactatgtaaatcaagtatttaattaataatataaaattaaagcagtataaattgaggaaatgatatgatgttttacagttttaataataaagactatgtgatataactgtagtttcaataaatataacctagaagctagaggctgttccaaaagctatgttttgcatttgatcaaagacaaaatatatcaactagacttagtaaatactataactgtgacaagttatttatttatattctgcctacttaacaaaagaattgataagtgtttatataggctagttgtaaaaaaataagatgcccctgaactttgctgtaaaaaataaatgcctaaaataaaattacttcccaaagcaaagttatgtaaaatattcatagtcaatattataagtaccagaatttaaatatcacttgttaaaattatcagttttcatagtatataactggatatcagctcaagcacaattctgagttttattcatactcttgggggacaacagcaaattcacagaaggctacccaaatcctgaccattaaagtagaaaaaattaatcttaataagacatattttgttataggtttaatttaatatagtccccatctcaaagatgttagaaaatgtaacaaagcagcaaatcagaataaaattaatacataattaatgcctaaagttccatgccagaattctccatcatacattttaaaatgatatcgtttggtatttatttaaaaatagtaaaaatgttgaagcacattactttagatcttgggaaacaaaatagaaaagtttatattatagtttctctaaaccaaacttcccaaattataaaaactaaatatttgggtataataattagattttggcttgacaataagaatttagaaatcagaaagcgccttttcaaaaatgctgtgggcatttttgctgtttgggagtcaccctaaacatagtcactaacacgagcctctaatcatttggagtttctaccttcactctacaaacagcttacttgtgaaaaagagacttgtggacttagttgccaactttcatgccttgctttgggaaggatctggggaaaaagacacgtacatggtggcagcataaattagcaaaaccattctagagtgtggtctagcattatttattccttaatgtatatacttctagaccaccatatatgacctaaagttatactagattctagtgatatatgatttttaaaaaactaagaatgtttttaataactatgttctgtaacccacaaattctatttctgcacacacaaatagactaggttaaataaattatggtatccagatgcaagcatttaataagacgatatatattttccctgacatgcaaagatttcaagaaatattgctggattttaaaagaaagtcaaaagcagcatgaataatataatcctttctacataattattttatatttcttacatattcttaaactggcttgaatttaatatctttatccttttcaaaacagtaagttaattgccaaatgatatgcaggaataaagaggtaacttctgaggctttgtggacatgaggtttttaccgtggaagttgactaagagacattaaatatgtaggaagataaaagtggagtgcagctttggcattgtaagaatgatttggtttagatcaggcaataaaacagctataaaaatcataataatgtatcataaatgggaagcattatggcacaggatttggaatcagagaccttggtttgagtctggtttctgtcttgtaatgtatgaatacagaccaggttatataatctctgtgatcctatcatcttaataacaacatggagataatgacttcatgggattgttgggaatattaaatgatgtaatatatgtacagtgctttatattcttgagttcaattattttaattggtagctactattattaaatacttctaaatcagaaaatacatatttgtaaaatggttaagggcttttttctttagtattttatattccatctcacaacatgagaatgttcccccttctaacaaaggaggctcatgtttaatcaaccttcacaattgggtgttaagtagaaaggatttctcatgtcgcaaggcatttgtcaagccaaaatcatgctaagaaccttgaattgcttacctttgacactaagcaaattgcctttttgtttttttgttttgttttgttttgtttttgagacaaggtctcactctatcacccaggccggagagcagtggcgcaatcatagctcactgcagccttgaaatcctgggctcaagtgatcctcccaccttagcctcccaagcagctaagactacaggcacatgccaccacatctggctaatttttttaatttttagtggagacgaggtctcactatgttggccagggtgatctcgaactccttagctcaagtgatcttcccacctgggcctcacaaagtgctgagattacaggtgtgagctactgtactcagccccttttctttaaataaccccaaattctcaaattccattttcttccttttattgtgaaaatttcgagaaatacaaaaaagttgaaagaattttatagtaaacaccattatacctaccacctagtgtctaccgctaacgttttactatacttcttctatcatactcatattcatctatccattctataattcaggggtttttctgagatggagtttcgctcgtttcccatctagcaatggtgcaatctcagctcactgcaacctctgcctcctgggttcaagcgactctcctgcctcaacctcccaagtagctgggattacaggcatgtgccaccgtgctcggctaattttatatttttagtagagagggggtttctccatgttggtcaggctggtctcgaactcctgacctcaggtgatctgcctccgtggcctcccaaagtgctgggattacaggcgtgagccaccgctcctggccttcagttttttatcaaactttttattttgtaagaactgtagattcacatgtagttgaaagacgtagagagagcccatgtgccctttcccagtttccaccatcttgcaaaattatagtagaatatcacaagcaggatattgacattgatacagttgcacagagaacatttccatcactagaaggattcttcatggtgtccttctatatcccacccattttcctcccacccctacatcttatttaacccctggtaacctctaatctgttctccattcctacaattttatcatttcaagaatgccacagaaatagaatcatagagtatataatttggggagacagactttttaactcagtgtaattctctggagattcatcaaggttgctgcgtctacaaatagtctgtacctttttattcagtagtattccatgatatgcacataccacattctgttcacccattcacttattaaaggacagttatttccaggttttggctattttgaataaagcttctataaatatttgtgtatagacttttgtcttcatttcccgaagacaaatgaccaggagtgcaattgttgggtcatacggtagttgcatgtttagtttttaaagaaagtgcctattttccagtgactacactctttaacactttaacaatatatgagtgatccagtttcttaacatcctcaacagcatttggttttgtgacaatctttttttaccattctgattgtagtaaaaatctcaattgtggttttaatttacatttccctaatggctaaagacagtgaacatcttttcaagtacttaatttttgttcatctgtatatcatcagtgaaatgtctatgtcatttacgcattttctaactggcttgtttttaattataaaatttcaaagtactttctatatgcgatacgttagtcatttgtcagatacatggtttgcaaaaatattttctcccattttgtagtttgccttttccatcctattaaaagggtctttcacatagcaaaagtttttaattttgatgaaatccagtttgtcaattttccttttatggatcatgtttttggtgtcaagtctagaaattacatgcctagccctagaccctgaaggtttttccccccctaggtttctttctacaagttttatagttttatgttttacatttaaatctgtgatcctttctgagttcatttttatataagctatgtgacaggttgaagttcacatttttttgcctatgatgtccaatttttccagcaccatttattgaaaaggccatcttttcttcattgaattgcatttgcatctttggcaaactcacataagcatatttacgtgagtcctttctgagtttcctgttctgttccattaatctgtatgtctagtgctccacaaatgccagacagtcttcattgctgtagctacataaaaactcctgaaattgagtaaatgtattcccccaacttcactgttttttaaaattgtttagttcttttgactttccatgtaagtcttagaatagtcttatctatatctacaaaaaactttctgagattttgatagaaattgcattaaacccatgtatcaatttggggagaaattacatgtctcctatgtggcttccaatccatcagcaaagtacatctttccatttatttagctctttgattttcaaggcttgtataatttctggcatacaatccctatacaagttttcattggtttacttctttattttttaaagtgaatgtaaattgtattgtgttcttaattttggtgtccacatgctcattgctagtatacagaaatacaatcgagttttgtatgtttatcttttatcctaaagtcttgcttactagttctagaaatgtttttatacattccttaggatatttcacataaacaattcggtcatctgtaaataggggcagtttcatttattcccttccaatctgtatgcctttattactttatctggccaactgcactggctagaacttccagtactatattaagagtggtgagagcagatatccttaccttgttcctggtcataatgaaaaaaaacattcaatctatcatcattaactataatgtcagtggcagtatttttttgtagatactcttcatcaagttgagaaagttcctgtctgtttctgtctttctgcaagtaatttttattattaatggatattaaattttgtcaaatgcttttttgacaactgatatgatcatgtgatcttttgatttttgaataccaaaccagccttgaatcccgggaataaattccagttggccatagtgcatgattctttttatatggtcctgaattctatttgctcacatttgtaaaggattcattgggaacactgttctacagctttacttctttgaagtgtatttttttctgattttgctcagcagggtaatattaactttataaaatgaattgggaaatgtttccttctgttctagtttctggaaaatattgtctagaattggcattgattcatcttaaaatgtttggtagaatactccagtgaaactatgtggacctggagatttattttgggggattttttttttaaattatcgatgcaatttccttaataagtatagtgctgctaaacttagctgttttgtattggataagttgtggtagcttgtgtttttcaaggaagtggtctccttcatctaaattgtcaaatttatgtgtgtagaattgtttattgtatttctttattatctttccatgtgtgcaaggtcggtagtaatatctcgtttcattcctgacattggcaatttgtatcttatctcgttctttgtcagtattgctagaggtctgtcaattttattgatcttttcaaagaaccagctcttggcttcattgactttgttgtttactgttttcaatttcattgatttctgatattatctttataatttctttccggccaggcgtggtgactgacgcctataatcccagcactttgggaggctgaggcaggcggatcatgaggtcaggagttcgaaaccagcctggccagcatggtgaagccctgtcgctacaaaaaaatacaaaaaattagctgggcatggtggtgcgcacctgtaatcccggctacttgggaggctgggtcaggagaatcacttgaacccaggaggcagaggtttcagtgagctcagatcgcaccactgcactccagcctgggcgatagagcaagactctgtctcaaaataataataataataataacaataataatttctttccttctgctagtgttggctttacactgctcttctttttctagcgtcttgatatagaagcttagctttttgatttaaaaatttccctcttttctaatatctgcacttaacaatataaatttcctcttagcactattttagcagttttctaataccaaatttagaaaattgtattttgtattttcatgtcaatttagtccaatatattttttcaaattatttctcttgtgacttcctctttcacctatgaattatttagaagtcttttctgtttccaagtgtttggagaattttctgatatctttctggttttgatttccagtttgagtccactgtggtcagacaatacaatccatatgattttaattcttttaaatttgaagtttgttttatggctcgggatatagtgtgttttggcatgtgcgacatggttacttgaaaagaatgtgaaatactgttcttggttggagtgttctataaaaatcaattaaatctgttggttgatagtgttattgagatcatttgtttccttgctgatattttctaattgttctaccaattgttgagagaggagtgctgatgtctccaactacaactgtagatttatctttctcctttcaattttaccagtttttgcttcacatattttcctgctctgttgtttgctgcataaacatttaggatggctatgtctaatgggtggattgatccttttatcattacataatgtccttatctgtctcttgaaattttctaaaatatactttatctgatgttaatgtagccattcctgcttttctatgtttgcatgatatatcttttcctatcctttaacttccaacctgcctatattgttatagttcaagtgagtttattaaacacagcatatacttgggtcatgttttaaaatcaactctgtaaatctgtatcttttaattggaatagttagagctttatacttaatataattattgatatgttaggcttatgtttgcagtttcattatttttgttttctatttgttttctctgttttgcatttgtctgttttctctttcctgcctttctggggttacatgaacattttttagaattgtatcttgtttttaagagtatctctttatataactttctaaatggttgctctaggtattatcttatatatctataatttgtcacagtttactggtggtgtcatttgatcaggttgagtgaagtatataaaccttactcctctttgcatccctttactccccatatttgtaatcaaatatttcctctgcatatatttggaactacatcaggcagcattataatttttgcttcaaccatcaaatacaatttagaaaactcaagaggaaaataaaatactattgtatttacccacatgtttgcttaccatgttctttttgatattgcaaagtcccttcctttattatttcctttctgtttagaaaatttccttttgccattcttttagggtaggtctcctggtgacaaatactcttacttgtccttgatctgaaaaacgtcttggattgggtggggccaagatggccaactacaagcaggggcaatgggaggctaccatgaaaaagaaccataattagcatatgaatcctacgctggcaaccaaggtatcaaggttctttcaacagaactgactagccagctggcgtgatctatggaggggaaggaagagtagtatggtgcggtggtacacctgagagccacacggggcaggggagccacccctcatccaaaagaggtggcgagtaagtgtgctacccagctagggaaactgtgctttccgcatggaactgtgcaacccacagatcagaagatcccagtcgtgaacctacaccacggggacctagggtcccaaccccagagtgacgcagattctcaacagcctctcagctagaatccgcttaagcctgccaggtccccagggggaggggtgaccagcaccaaagctgcagctgcttgctgtttaagtcctgtgagctccctgggggagggccagcagccagcactagcactcataactgcttaacacgctaagctccctgggtgggggaaggatggcatccatctctgtagctccaggcagtgcttttcccttgctggagccagggaggctggataacttggttgcaagagctgtcccccatagctcaacacaccggctgtggcatactgcggccagagcacctcttcaggcctcattctgacccatccttcctcactgggtatggcctccctgcaggaactccaacaactccagccagaggctcagggacagaacctagatctccctgggcctgagcccctaggaggaggggtggccactgtctctgcagaccagcagacttaacctttcctcctaatagttctgaggaatccaagcagcccagacaaatggggttccccccagcgaagcacacccctccaccaaggaacagtcaaagtgcctcattaaacagatcctgttccccatgccacccaactgggtgagaccctccaacaggggttgtcagacaccctagaaaagagcgatcctactcgcatcatgttggtgtccctcaaggtcagagatcccagaggaaggagcaggcagccatctgtgctgttctccagtctccttgagtgacatctccaggcatgggagcaaagcagatgaagagggcttgaagtgaacccccaacaaactgaagcagccctacaggagagggacctgaccattgaaagaaaaacaaacaaacagaaagcaacaacaacagcatcaacaacaacaacagaagtccccacacaaaccccatccaagggtcagcagtctcaaagactgaaactagacaaactcatgaagatgagaatcatcgaaaaaatgctgaaaacccaagaggccagagtacctcttctcctccaaatgactgcaatgcctctccagcaaggttacagaactgggcagaagatgagacggacaaactgacaaaagtaggcttcagaagatgggtaataaaaaactctgctgagctaaaggagcatgtcctaacccagtgcaaaggagctaagaaccttgatagaaggttagaggagctgctaactagaatacccagtttaaatagaaacataaatgacctgatggagctgaaaaacacagcatgagaacttcatgaagcatacacaagtatcaatagctgaatcaaccaagtggaagaaagaatatcagagtctgaaggccaccttgctgaagtaaggcatgcagacaagattagagaaaaaagaatgaaaaggaccgaacagagcctctgagaaatatgggactacgtaaaaaggcggaacctgggattgactggagtacctaaaggagatgaggagaatggaaacaagctggaaaacatacttcagtacattatccaggagaagatccccaacctagcaagacaggccaacatgcaaattcaggaaacactactaagatactccaagagaagatcaaccccaagacatataatcatcagattctccaaggttgaaataaaggaaaaaatgttaagggcagccagtgagaaagcccaggtcacctacaaagggaagcccatcagactaacagcagacctctcaggagaaaccctacaagccagaagagactgggggccaatattcaacattctttttttttttagacagagtctcactcttgcccaggctggagtgcagcggcgagatctcgactcactgcaacctctgcctcccaggttcaagcaattcccctgccttagcctcccaagtagatgggattacaggcacccaccaccacacccagctaatttttttttttttaatctttagtacagatggggtttcaccatgttggccaggctagtcttgaacccatcttggcctcccaaagtgctgggatcacaggcgttagccactgcacctggcctattcaacattcttagagaaaagaattttcaacccagaatttcatttccagccaaactaaccttcataagtgaaggataaataatatcctttccagacaagcaaatgctgagggattttgtcaccaccaggcctgccgtgcaagagctcctaaaggaagctctaaatatggaaaggaaaaactggtaccagctactgcaaaatcacaccaaaatataaagaccaatgacactatgaagaaactgcatcaactagtgtgcaaaataaccagctagcatcatgatgacaggatcaaattcacacataacaatactaaacttaaatgtaaatgggctaaatgctccaattaaaagacacagactggcaaactggataaggagtcaagacccatcagtgggctgtattcaggagacccatctcacatgcaaagacacactatacaaaataaacggatataggaacatttaccaagcaaatggaaagcaaaaataaaaggcagggattggaatccaagtctctgacaaaacagacttcaaaccaacaaagatcaaataagacaaagaagggcattacataaaggtaaagggatcaattcaacaagaagagctaactatcctaaatatacatgtacccaatacaggagcacccagattcataaaacaagtccttagaggcctagaaagagacttagactcccacacaataataatgggaggctttaacaaccctctgtcaatattagatagattaacgagacagaaaattaacaaggatattcgggacttgaacttagctctggatcaagtgtacctaacagacatcaacagaatataccttcttgttagtgccacatggcacttattctaaaatcgaccacaaattggaagtaaagcactcctcagcaaatgcaaaagaactgaaatcataacaaacatcctctcagaccacagtgcaatcaaattagaactcaggattaagaaactcactcaaaaccaaacaattacatggaaattgaacaacctgctcctgaatggctcctgagtaaataatgaaattaaggcagaaatcaataagttctttgaaaccaatgagaaaaaagagaatctctggggccacagctaaagcagtgttaagagggaaatttatagcactaaacgcccacatcagaaagctagaaagatctcaaatagacaccctaacatcacaattaaaagagctacagaggcaagggcaaaccaatcccaaacctagcagaagacaagaaataactaagatcagagcagaactgaagaaactaagagacacgaaactcccccccaaaaaatgaatgaatccaggagcaggttttttgaaaaaattaacaaagtagatagactgctagctagactaataaagaagaaaagagagaaaaatcaaatcaaacagaaaaatcaaatatatttgatgaaatcaaatagaaaaaatgatatcagttgatatcaccactgataccacagaaatacaaaatactatcagagaatactagaaacacctctgtgcaaataaactagaaaatctagaagaaatgcataaattcttggacagatacaccttccaaagactaaaccaagaagaagctgaatccctgaatagaccaataacaagtttgaaattgaggcagtgattaatagcctaccaaccaaagaaagcccaggaccagatgcattcatagcccaattctaccagaggtacaaagaggagctggtactatcccttctgaaactattccaaacaattgaaaaggagggactcctccctaactcattttatgaagtcagcaccatcctgatagcaaaactgggaagagacacaacaacaaaaaagaaaacttcacacccatatccctgatgaacattgatacaaaaatcctcaataaaataatggcaaagcaaatccagcagcacatcacaaaacttatccaccacggtcaaggtggcttcatccctgggatgcaaggctggttcaacatatgcaaataaataaatgtaatccatcatcacctaaacagaaccaaagacaaaaaacacatgattatctcaatatgctcaaaaacggcctttgataaaattcaacatcccttcacattaaaaactctcaataaactagatattgatgaaacatatgtcaaaataataagagctacttacaacaaacacacaggcaatatcatattgaatgggcaaaagctggaagcattccctttgaaaatcagtataagacaaggatgaggctgggtgcagtggctcatgcctgtaatcccaggactttgggaggctgaggtgggcaaatcacaaagtcaggagattgagaccatcctggctaacacattgaaacctcatctccactaaaaatacaaaaaattggccgggtgctgtggctcacacctgtaatcccagcactttgagaggctgaggcgggcggatcatgaggtcaggagatctagaccatcatggctaacatggtgaaaccctgtctcttctaaaaaaatacaaaaaaactagccgggtctggtggcgggctcctgtagtcccagctactcagcaggctgaggcaggagaatggcgtgaacctgggaggcggagcttgcactgagccgagatcgtgccactgcactccagcctaagcaacagagtgagacttcgtctcaaaaaaaaaaaaaaaaaaaaaagaaaaaagaaaaaagacaagaatgccctctctcaccactcctattcaacatagtattggaagttctggccagggcaatcaggcaagaaaaagaaataaagggtattcaaataggaaaagcggaagataaattgttttggtctgcagattacatgactctatactgagaaaaccccatcatctcagccccaaaactccttaagccacaagcagcttcagcaaagtctcaggatacaaaatcaatgtgtaaaaatcagaagtattcctttacaccaacaatagacagtcaaatcacgaatgaactcccaatcacaactgcaacaaagagaatcaaatacctagcaatacagctaacaagggatgtgaaggacctcttcaaggagaactacaaaccactgctcaaggaaataagagacaatacaaacaaatagaaaaacattccatcatcatgaataggaagaatcaatatcatgaagtggccatactgcccaaagtaatttatagattcaatgttactcccatcaaactaccattgacattcttcacagaattagaaaaactactttaaatttcatatggaattaaagaagaccctgtatagccaagacaatcctaagcaaaaagaacaaaactagaggcatcatgctacctgaattcaaactaaactacaaggccacagcaaccaaaacagcatggtactggtaccaaaacagacaaatagaccaatggaacagaacagagacctcagaaataacaccacacatctgcaaacatctgatcttcaacaaacctgacaaaagcaagcaatggggaaaaaaatctcctattcaataaatggtgctgggaaaactggctagctatatgcagaaaactgaaactggaccccttccttacacgttacataaaaattaactcaagatggattaaacacttaaatgtaaaacccaaaaccataaaaactctagaagaaaacctaggtgataccattcaggacataggcagtggcaaagacttcaggacaaaatgccaaaagcaactgcaacaaaagccaaaatgacaaatgggatctaattaaactaaagagtatctgcacagcaaaagaaactaccatcagagtgaacaggcaacctaaagaatgagagaaaatttttgcaatctacccaactgacaaaggtctaatatccagaatccacaagaaacttaaacaaatttacaagaaaaaaaacaaccctatcaaaaagtgggcaaaggatatgaacagacacttctcaaaagaagacatttacacagccaacaaacatatgaaaaaaagctcaatagattgcgccactgcactccaacctagacaacagagtgagactccatctcagaaaaaaaaaagctcaacatcactgatcattggagacatgtaaatcaaaaccacaatgagataccatctcatgccagtcagaatggcaattattaaagtcaagaaataatagatggtggtgaagctgtggataaatagcaacacttttacactgttgggaagaatgtaaattagttcaaccattgtggaagacagtatggcaattcctcaaggatctagaaccagaaataccatttgacccagcaatcccattaatgggtatatacccaaaggaatatacatcattctactataaaggtacatgcacatgtatgtttactacagcactatttacaataccaaagtcatagaaccaacccaaatgcccatcaatgatagacttgataaagaaaatgtggtacatatacaccatgaaatactatgcagccgtaaaaaggaatgagatcatgtccttggcagggacatggatgaagctggaagccatcaccctcagcaaactaatgcaggaacagaaaaccaaataccacatgttctcattcataagtgggtgtggaacaatgagaacacatggacacacggagaagaacagcacacaccagggtctgttgcggggtgtggggagaggggagggaacttagaggatgggacaataggtgcagcaaaccatcatggcacatgtgtacctgtgtaacaaacctgcacattctgcacatgtatcccggaacgtaaagtaaaataaaaattaaaaaaaaaaaaaagtctttatttcttctgcatccctgaagggtgttttcactgggtataaaattctgagttgacagttatgggtttttttagcattagacctcctccaataagactccaggaagaaaaggagggtcacctcattactgctgggcagtggtggaagtcaggctccttatagagcctgactcctcacagagtttccactgacagctctgcatgtggggtatgtatggcagatagttgctagctggcagaagtggaagctccaactccctgtttggccttctctgctaaaaccacagtggggttaactgaggtttccctttgcagctgtgctcctagtcagcctttgctgaatgggttaagagtagggtcacaatttttctgtggtgcttgcctggaatagagtggttattatctaaaagatttttctcttataaggctgtcctttcctcatcctttggctacagaaagcaggcttttgttggagcatttctgtctgtgcccattgctgtctctagattgccagcttattcacctccaagtttgggatatatgaaacaaaaagaaaatccagggagcttaccaccatgttgttcgtcaggtcccaagttccctagttagtctgcctcttctcttccccatttagagtcttcttatgtttgtttgataggtgatgtctgggattttagcagtacttagtggaggtaataggaaaaagtatgcctattctatcttcctcaaagtacaagtttgtcatagagttttaaagacactgaaaactcttgaatgccaagcatgtaataatgtcatttgaattccaagggtttttaaaaatttttcatcttcaataaaataacagaacgatatgaatttttaaattcaatattgttcctcttgttttttaaataataaaataacattattattgataatatgctacagtattattaccagatgagtattctccaagatgacttttaaaatttagactgctggtgacagatttttaaatgacatagaatttttagaaaaaaaaaaaaaaaaaaaaaaaaaaaaaaaaagaaaaacgcttcaggccgggcacggtggctcatgcctgtaatcccagcactttgagaggccgaggcgggcggatcacaaggtcaggagattgagaccatcctggctaacacagtgaaactccgtctctactaacaaatacaaaaaattagctgggtatggtggtgggcgcctgtagtcccagctactcgagaggctgaggcaggagaatggcgtgaacccgggaggtggagcttgcagtgagccaagattgtgccactgctctatagcctgggcgacacagcgagactctgtctcaaaaaaaaaaaaaaaaaaaaaaagagagaaaaaacccttcaaaataaaaatggttccacatgcttgtaaaataaaaggtatatgaactataatgaaaaaaatgaatttttaaaatttagaactggacattcagccttaaaaattatcttttgttattcttcacctggagaaataaatctttaaaaagttcctcccttgttataagattttcaagtgcacttcctagttctcttctgtaaaagaaaaaagaaaaaaaagtctagtcctcatgtcatttttagcttagtttgaaagtaaagacttataataataaaataataaaaagttcatgatgatcaaggttatagagagactaagacctacatggaatcacataccttcctgccactggctttgatgtaatacatggaaaataatcagaggtagctttctaaaactatttatatatatcatagcatttttcaacatgactgattatccaacataaagttatctatctagtcaaaatattcctattaattcttttataccctacacacattcctttggggtaaaggccatggtagcttgattcgtaggtgggtgtctgtgatggtcctttagttgccttgtggatgtaaatactaataatttccctggcaactgcctatcagagagaagccaaagcctctggtcagagacttgcctctcaagtgttacaaagagttgcagaacagcacacacctgcagtgaaagtaagtctttgaactacaaaagcttgtgtttcttacaacaggtagtggggaataatttgtctgtaattagttttctagttttgttcactccctttctgtgattggttatgtgcaaaatagaaaaccctaatatgatctgagacaagattagtgcatatgctgggtctatcaccccagccaactggtgatgagttttacaaatacataaagtagtcaaccctaatatattgatgcagataagaaatgatgacctctcagtgagatgtaggcagccacagtgttgagacagtgctgtgactacaaatgaaacaatatagaagttcatatactctatgatgacctcctagaaaactagctaaggagcactctctgccgtcattaatggaataaaaatagacacctagtccatgaacttttgaaatgtcaccaatttaagcacatcttagatgggacaataatttacatgtttggacagcttttctcaaaaatacaattttaagaccatttctgcatacacacttaactcctacaggacattataaaatgccaacctaactattctcacttggaaagtgaactatgaatagacagttgcaatagacagaataagcagccaggtcgttagagacatagcccagtaatctggacctttctcctaaatgttcaaaagaatagagatttaacaaaaagcatccaaaagcatccaaaagcattttgcatccaaaagcattttgcaaatgacttcaaaaacattattctattcaaagaggttaactatttaaatgaaaaatttaagtaaaaagtgtttgatataatgtaagataaatataatacatgtctcagaataatctagtttacaaaaaaatgccttaaatttttgggccaaactactaaaagttcacatcagaaattaatttgaaaacacattaaaatagccagagcaaaactgtaataccaataatatatttgtgttgtgaaattaatagatttaatgacatatcttaagcatgacagaagaaatagtatgattttcatgtaggaatttaaagacagtttcccagagttctaaaaatgtagtttttaagcctctcaaaaacacatttttcacatctttcccatttaagggtcccaaagacttataaattgttaactccatctccccaagctctataaattttctttttggagcctttctgatgcatggatttgatctgtacacaattcagctacaaattaaatgcacaatcttcaaaaactctaaatctcttacagttgtgcagctgaagatgaaagaacttgtatacaaatgtttaaaagtatataaaccttcccatgtaagatggaaaacaagaggctctgtactttttcttaaatccgtcctaagggattttgttcaaatagtgtgctctttcagcaatcccattacaatagctattttactagaaacaaaaagtccctctgtcagactaatagtcaataataattttaccactactaagaataagtgtgattaactggcacattttttgaaactttcaaaattaattacacatctgttatttcagtttatccataaaaaacaccacgtgaggtggttttatcttcatttgacgaatgaaggaattgagttagagagaacttaagtcccaaggccaacaatattctatgttgtgcaaagtagcaatgaattagtaaaggaatgagactaagttactagattcctaattctaggaccacctgctagacaatgaaagaataaagttacctaacattagtgaacactcggtagtaatggtaatctgttaagtatttacttagctaattcttcacaatatcagtttgttttaccatttgaccatctctgttttacaactgcagaaacagaggttcggtttgatagtggtctgatttattatatctaagtggcagatttaaactgaggtaaatgtgattgcaaagttcctttctcgaagaggaacatcttacatttagaaataatttcaaagccaagatatgcactcttactattttctacagtctacatggattctttctttccttctttctttctctttctttcttctttctttctctttctttcttctctccttttctttcttctctctctccttttctttctttctttctttttctttttttttgacagagtcttgctctgtcacccaggctggagtacagtagcccaatctcagctcactgcaacctcagcatgctgggttcaagccattctcctgcctcagcctcccgagtagttgggattacaggcacatgctgccacacccggctaattttttgtattttagtaaagacggagtttcagaaagaaaaggagaatgaaactgaaatgcaggtgaatttgggccaggtctgtactgtaattatttattctgatattcctacacttcttcctaacactgaattcatagcccaatgccttgaggtacttctacagaagttgcccctcaaagctaaagcaagctagtagaagggcagattttagcaagaggaacactcagtatatttgatgattgtttagctgaatatgtctgtgggttgagaagagcccaaatcatcatttcccagaatgtagagactttctgcacaaaacaggtagacttcattcaaatcattctggaaccctcagatccttgggtcacaatgcatatatgaccatagaaaaagctctgagcagtattgcggaacaaaggctcgtttcacttggtatttactgtttcccaagtataagacctattaatattccatagaacaacttctgatgtttcagacttgactctgaaaataatctgagtatggactgcactgtgctattcctgtgcaacaattaccacagagtgaaacctttactgctttttctcaaggttcagacctgtggtacattattctaaaggtatagacaagaaacagttccaaggaggataagactaaatctctgaatattagacctgacagaggccttaggagttatcatctctttccattaacatatgaagaagctagagtctacagggattgagaactggctccaagatcataagatcttagaaagtggctgtcctgctgccctctcattaccagacttgacaatggtgcctcagcaggatggcatttcagaggcaacccatcttgcacaacctggaattctctggaggtctagtccagggccaccaggtggaaggctaaggaggaacagctatgagcactgcaggagaccgcctcaggatactcttgttctctcctcttgctttgctgtttttgttctccaaatgaccatcatcgtcagaagacaattttgaccacgaaatgtttgtagtgagaatatcaggcaggtgtctgatattccatggtttacagtttattccaggcaggtttatgtttccttgctaatacacgtacaattttacaactactgtattaacaggcatttacaacactcgggagtatttctaaattttatatggataacttgggggaaaaattaagtgtttttcatcatacctacatagagagtgattttaaagcggtttttctagtggaaatgtatataaattatatatacactttcagcatataaatatatataaatatacactgaatatgtttttatatactgaatatatataaaaacctatatatcctgaatatatatatttacatattcatttactgaatatatataaaacatatgaatatatatattcagcaggacatttgaagtttctatatttgtagtaatattatactaagtacaaatctacatgttatctaaatatctctattccacatatgtgtacatatatatatagatatagatatatcaccactaaaaatatattgattggtattactacttctgcttcacactatttttcagctaaatggagaagaaagtttattttagagttgattaagtaattatattatttaagaaattactccggttggattacacatggtaaagaggcagtgagattgtgtcaccatccctctgctgttcagccaatctgtttattattttatgtcatttgttctcaaccagccatctcaaattagtacatgggacatatagcactttttgatatattttttacaccaggcaaaaagtgtcacatgccagtgagttcagtaatctcttatcaagtagtactctatgtagccactagtctcttattgtctagttacacttctgaaaaaacctttttcagaaagtgatcttcctaaagtcccattcatcctagaaaatcaacaacttctaaccagtatatttaaatctctcagttcccatagaactctctctcagaccctgtcttccctggttttaacttttctcattccatccccccctcccacacacaatcctatggcctcccttctcagtgtaaaccaaacttcccagagtcctttcactgccacctccatatgcatgtattacatcaatccgcacaccaccaccaaaagggaaagtggaaaaaagacgttcttagtccccattcctttgattttctacatccctggggcccttccccacagatgcagtgtaatgcagggggagaaccacaggccaacaaccagacatcttgccagcaagatgatctgggttttttaattcaaaaaaattttcctgaccaggcatggtggctcatgcctgtaatcccagcactttgggagggcaaagtgggcagatcacctgaggtcaggagttcaaggccagcctgatcaacatggagaaaccccgtttctactaaaaatacaaaaattagccaggcatagtggtgcatgcctgtaatcccagctactcgggaggctaaggcaggagaatcacttgaacctgggaggctgaggttgcagtgagctgagatcatgccattgcaccctagcctgggtaacaagagccaaaccccatacaaaaaaaagaaaaaaaaaattccttatttcctattaatctcttactcaagctcttacaaataattatccacatttctcttagtaccaatgagatgatttatgcctttggcaaaagagaagaggaagagaagagagaaaatgagcacaaggctcatttccagaaccagcctttcctgctgccctggccagaccccatccacaggctgccctttctctggccctctcaaccacagtcacaaatcgttcaaaagttgaccctgacaacactttttcccactcaatatttttataattttgatatttaaaagtattaaacgaatagtcaggtctgtaaaattaggctttgttagagctcatttttgttatgccaccattactcgtaactggattatgacaagaatgcactagtacctatttctactctccacaattttgttactcgtcaagagaagtatataaactgatatctaggtccaagaatcctcagtattttcacaggtatatatatttaattaaaaccatgacttttgttgttacaggtttgggtttcttttagtgatttaagctctctaggcttcattttttgtacttaaaaaaaaaaaagccaagggaaatactacttatgcataaaacactttgagctccccagatgaaagcccgcatacataagtgtgatgcgtatttattgccgctcctctgatgaaaagtggcagccttctgcttaaaatgggattacaaattctgagtataacagagaagagagaagcacaaatgagtaacaagcagtcagaataaataaaattgaaaagatggagaggactccttttacaaaaggaacatcagttgcgaaacttgtggtttaatttcgtatgctttccacttttaaaaagttgggctcaactgcttttataatgagctacaagcagaaggtacattcagtagtacatgaataaaaaatgaccttttcatttgctcttccgtagcttggcattcctatattattaaaatataatgtattaaagattaagtaagcatattagcatatagacatcatgcttctgtggtcatggatacgaggactatctaacatgaggctagaaatccatccatgcaaaattcatatctttaatagtatagatatcaattaaaaagaacacaaaacttttccaacaactattatagttgactattctattaagtatggaaaagaaagcaatgaggagagaatctctaaaggaagtcataaataataatcaccaacaattgtagctgggagtgaactgaattctacactataggaaacatattaaatatataaacttcctactctaataaaacttaacagtttttaaacctaggaatttaaacgctaaagcaattttcatgacttttttggagaataaaccattcattaaaaatttttcttgtatttatttcatttctatggcttatttttctgtcttttcgacatataatccataaatgtacagagtatcagaagaagtaactgcacaaagaagtaactgcaaaaacataaacaagataaaattatcagatttccaaagcagagagctttcctttcacctcattattatgtaaataatatgggttcataaaagaaaatttgaagttcggcaaagtgaaaagagagaacaaataatactatgagtattagtgcagttgctggtcacttcttatatatttacttttactgttttctttttgtatttttttctcacttttatctcatacactattatagtagaaatacaatattatatcatgctcttttcacttatgtcaagaagtagtttatacccaagcatgtgtttttcttttttaagttcattttttttgtcttgttaaaacttctgtaacctctcacaatggaaagctgacattcctaaatgtacaaagaggaggcactgttgaactcagagattcagcatttgtcctacagactgttcccaatggtgagaaatgacagtggcagtcttatttggagtgctccaagaaaaggagacaccatagtgtcttggtatctaaacttacagagaagccaataactaaccttgtcaactatccaaggatttggtctcatattagttacaggaaagtcttgggtatttccaagtacagtataagatcataacgatccagtaacctaaccttagcgtggctttcaaaaaccagaactgtcaatctctctctgctgcagctctcccaccctcagcctgctgtaatacctttaccatgtagagaaacaagaaacccaatctatgaactactattctgaattcctcagattcacaagggaagtaacatagaagtgtatattggaaaggaagacagtccttcatatatacattcattaaaatgagtaaaaatcttccttatgtttaaaaaatcaagtaagacagaaatcatataaaaaggtaagctaaactgaaaatccatggggaaatgcaagcttttatttttaaaatgatatcaatacaaaacagatatttataatagatgtatctttcttgttttttgttttcttggatgaaaaaaacaacagtgatttaaaaaaaatttgctttgaataaaatttatcatctgctgatgcattatttctcaatttctttttcatattatctcttggagataaatggcaataacaaagacacattaacatgacactaaagaacagctttttatagttttaattattttttcctttttggtaataaaaatgatgtggtatgtttgcatgtgttatatattgagaagcaataatactgtttaaatattcataattatgaatataactttcactcgatattttaaaaatgaaatagcttctgaccccttaacattatggccctgtttattaatatatattgcaggcacacctatatttatgtcagtcaatcacttactgtactttttattctattctgagttattctgcataaagataattttctgagtccatcaagtttcactttctgagaaataatttcacaatttgtaatgtagataatgagcagtcattttcccacttctcttgggatttgagctcatttcagtctgtgaaataaaaactgaagaaaagaaactaaaatctaaagtaggggagaccatgatgagtggtgaacatgtatattcatccctgctacaagcagggatggagatgccaagggagggtgctggccagcagctttgcagagcctctcaatggcagcacttatccaggtcactacagtcagggcctagtcttacctctgcactccagaaatgattttgctcttatagagaaattgagaagcctctctgggataaactcatgaaaaccaaactcctttataatgtgactttataattttagaataaaacattattgtaatgcaagctgaattgctagtcttgtcagattagttattctcacccactcagaaatttatagtacagaatttgcctgatgggcagagttagaactaaagggcttggtgattttatctcacagttcctaggctaaacagttaggacagccttcctgcagcttccttccagcagaggatctcatctgggacggccttcctgcagcttccttccagcagaggatctcatctgggccactgctttttaattttagctttttaaatttaattttaatattagatattttatttttttattaagataggcattacatataaaagctacaacagttaagagaatgaaaatgaagtctacctttctccctcttctatccctagaagctcagtttctttccttggaggctaccctattagcaatttcttaaatgacttttcagaggcaacgagtgaatttgcaaatatatgccatgtgtgtgtatgtatgtgtgtgtatgtatatgggtatgatatgtacatatgtatgtatatatacaatttgtctcccctttaataagagcatagcatacatgctgttttcatgttttgcttcttaactttccatatatagaagttttaagttttaacatgtacgtaggacatacaaagcacatacaggaagcatccttaaatattattttacacatgtaggagtttaaacagctacaatggaatttctgtgtcaaaaagtgtacactttttatttggaaagatattaccaaattgttctcacattttatcagtggtaaaaacttggattcacaatcacaacgtggcaattaatcccttgtacgttgtgactatggaatgatttaccatgaatttttacagaagggaagacaattcaaaattaataaattctgcttctagttgccttcttattctcaaggctaataattcaaggtgtatgattgattacagatccctagaaaataagaccatcagtcacatggagtatactgcttgatagatgagaaaacaagaaatgaattaggtccaacatgaaagaaaacgttttggacttgggttttaaaagagtctcctttcccaagtaaccttggagtttccaggcaaaatttctctccgcctaactctgaagcaagagttgatgagacaaaaagaaactgtaaaaagagtaaaataaaacaaccaggactatctgaaccggaaatcctaaaatttccaacagagtctcacataggaaagcgatggttgtcaacaaaacaaaacaaaacccccaaaactaatggtacatgagtacctggggaaggaaatggcttcataagggaataggggactatcgaaggttaggtttatggaagggattttcatggactcccctcctgataagaaattctccaaaagctaagaagaagaaggagggaagagtaagtgggtagacctaggctttcaaatgtcagaatcctaacccaaaatacctttactggggacaaaagagacatcatgacattgattataaagaaggtcatgaaatctaagagattattcaaactcagctaatttgtactgttattaaccatggcactatgttggcttaaagaaaggacatttaaaatatccagaatacaacaactattaatattcatttctataacatataaactaaacgcccacattagcattgtatcttttttgacataaaaagtttgggatatgtacttgttatgaactaatacatgtatataaccttattgcctttattgaaagacttaaaatgaaagaatttataaaaattattataattttaatataaatgacttcaaacaacttagataattcttgagaactataacactatctcttttattaactatttgtgaatttttctaactaatgcaggacatgtaaaataggtttcaagtgtataatttgtacctaaatttgagggcagagccaaaacattaaaacgttcttttcataatgtatcattttagaaggaaaataattataattttcctccattttattattttatcttttctataaacttacatattttcacaagtttttaaaatcagttgtttttataattataatgtttacctgaaatgggatatattaattactcacttttattctcaattcttcgaaatacaatagatgtgcctttacagtatgaatttctgatgtctataaaaatatgagaaaattctatctgaaattaaagtctttgaatattgaaaatgagcactaagcatttagatgtaaaagctaaataaaaatttaaagcaaaaatacattctacaaataaaattttttgaaaatgaactattaattttcttcttatatttataataaagcaaggtcacagtactatataaacctgaatctacagtagttttaaataaatgtactgaaagacatactctagaatgtagtttgcttgttgaatgaatattctaaaggaaatgtgatgaatgtcattaataatttacacaacatagaagaaaacttgttatcgtaacaatatgggctttgttaatgaccctaacagtatatggtattatctgagacatgtaaaacagacttaatatctacttcgtatttttgttgttgttgttatatgtatacttctatcttccttctgggcactatatcattttgttccgattagtaagcatagaacctcacaaattggaggagttcaacaaacactgagtaaataaacaaacaggcaaaaaacactcctaaagttaaaaggagacaaattactactataaataactagaaaacaaaaacttaacagaataaatatatttactagaaagtcagtttctataatctatgagcttgagggcctctagattgtgcgggctatttctaaggcttgagagatgtcctagcactggattcacatggtcgtttgtgtttgtacatttttcatattttaactataattaagactactgcacgtttagaacccaactttgtatttgtagttttttatatgatttcttaaggggtggagggcaagtataaaagtgaaaggcccaataaacttggatctgctcctacatatttccctattgtactgtgcatagcttaataggagaattgaaactgattcaacatttggacaagtaacaaaggtttagtttacattcataaatatttgtcactccctgttgaaaaataaaaatatagccaattctaagttacaggctaagcacatcattctgaaatacattttatcatctaacaaatcgtgtggtgagatctccattatgtatcagcacatatcctcaaattgcagatttcttttctggtcatcatgcttggacatttattgacagttaacagctgcttcactacttcactcttttaaacttaatgtattgacatttcatattcactcatactttcagatagcctaaagtatttgaaaaaatccagctgctttaatagactatcactttttagattctttacttaaaaaaactttgccttttattgcgtatatgaaattatcacaaagttgttaatttttgcttatggatctaagatgtttcataaaagtgtacagtaattaaaatacacaaataacactgattttcagttaaatattttgacatacttattctacggaatatcaaaagtcacttctcagaaaaccatcatcaaaaactttgagtcaaagaactttgttaaaactagtcccccaaaaagtactctttatacccataaaatctaaatactcctaatttcttttcttattttttttctttttttggggggggggcggggggaatggagtctcgctctgttgcccaggctggagtgcagtggcgcaatctcggctcactgcaacctccacctcccgggttcaagcgattctcccacctcagccccctgagtagctggggctacaggcgcgtgccaccatgcccagctaattttttgtatttttttagtagagacggggtttcacggtgttagccaggatggtctcgatctcctgacctcgtgatccacccgcctcagcctccaaaagtgctgggattacaggcgtgagccactgcgcccggccaatactcctaatttctaacagactttttctgacaagtgttagcccaaaatgaatgtttacaacctatagtgtgcaatggatgcctgtaaaatagcatttacaatggaaacactgacacagtttaaaacaaaaatgaaggaaaaaacatcaaacttgtacagcagtgctagctaatggggtgattagaatactcctggccttggaattgatgtaagaaaacatttagagaacatcttatttggctggaaacaagatcataagataattctgttaaaacaagtgcttgaagttgtgagtgtaacactttcacacacatacacacacaaacatacacacacccctcacagtctacaggaagaaatattttgatccatgagacatgttattttgggggcagagctaggagaaataagaaaaactacccagagaacatgccctaaaatttacaactgaatcttgtcaactgaaaccataatatcatttgttttcccctctaaataagtggcactgtattgaaaaggtggatatcaaagatttaggagactagcatttgattcaacaattcggcttatggcgaggctactctagaatacatattttattttaaaaataggaacattaaggatatactatttttaagtcaaacaacatatggaatatgagtgctatctatgtgcaatgaaacaataaggaacaatcatttttgaagaataattttgtgttatctctgttaatgtgtttttgtgtatatgcatcaggccaacagtaggcataaataaaaagtaagaactcacaggaagaagtcacaaaggaaattatactcattaaaaagcatgattctataacctgcaagtcaggaaaccacagaggtaaacttcctgctgatccagggaagaaaggaaaattttccttccccatagcctggttacagttggtgaagaaaacgtcttaacttttcttggtttcaaagggtgtcatgccccacacagctggaggaagaaataagagctgacaactccttacatatatctttctaatttcaaaaccttcctcatgcagatgcctgaaacaaagttctatagtgctgataacggattttttttcactttatattccagactactagctgtaattattttgaagctagacagcactccagtggtcaaataacaaaactaatctgtagaaacagtcttacaaagagaattacctatctaagttagttggttgattcttcctctattgctgtcctaagttgtttctctggacacatggcatatatttcaaattaaaataatatgcattaaaacatcatattaagtagaagtatttcttcatgtagcagatttgtaaatgagcctgtgaatgttagaaaactcatcaaaaattaatatgttcactctatcattccattagaaccaataatgtcctgcaaagcctaattctacaaaagatccactaacatgtaatcttaaggctctgatcaggttaatgatggtttccttcaggattgcattaatctacacaaagtgtggtagtctttaaaaaccactgttaggttcagaggcattaactcttaaatatattttcaacagtttttcactattactaaaaatcttatatttcatactggcaaatgcaaagaccttttgataataccatgaagaactaaattgctataaaatgaaaaccgaaaaattatactgttttaagtccccaacagggtttacttaataagggtataccttatcactacgaatgcttcaaacccatctcacaagatgcatctgcttttcttactgttgtttccattgcataaatcaaaacagtactcattagtgtaaactgattagggtaaaccaaacctcaattgcaaggatctcagcatttctgaaaacatagatataaagatatccaagttaatgtcaattaaaaatacacagtttgctttggacagtttttactaaccctagtccttattatcttgactagtgagattaagataatttaaggctgaatagttcgagagtgcagcagagcataaaggccctctaaagtagagaggcctaaacccagaatacccactaccatgtaactaccactgggaactgcaattttaatttgcagcaggatgttaaagaaactctttggtgtaaaagagtttatttaagttctacaaatcttttaaattcaggaattttgcagatgaagcagataagacattgccataacactttcatttttaaaaccaaataaacacagtttcttgatggagaaaatgctatctcaactaactgcaatccaaagcaccttgagataaaataaaagaacaatttgtgacaacagtatatgttcactgagatacaaatggcactatcaggtacaggttgcattgcagcgatgaactcagttgtcacactgcaattctcaaagtgtaactcttggcttggttgccaaaatgtgcactttagtattgtgtttcagcagtagaaatgtgagtactaagattttcatgaccctactacacttgaccttccaggtttaaggcattggagcataatctgtaaacagtaactatctgcttcaggcctcaagaacagttgaaaaatcaagagctctatttgggtcacatctcatgtgtagacttgaaattagaaagaaaaattcatgtcatgattgtgatctccagttgtgaggatgacttcactgaagtgcatggattcctctttgggccaatctcaatccagatctaagttgacaaccaacttaattccatgtcaattccctcccctgctgtcccctttcccacctccttctcctcctgttcctcctcgtcttctttattctccttctctctttctctttcttttcccctctcttagtctctttctctgtttcctcatgttcaagtttttcaaatcctaaaacaaacttcccttattctactttatcgtgaagtgaatactgcattttcccctttcattcatgagtaaaggccaaatcatttacacttgctatccctgcttctacatatttcacttactcattggtatgttattggtatgttataatctagtttagagtacaactccaacaaaattacctaaatcacaaaatttcttaaatcaaaggcctagcacaggatctcatgtgcacaacttctgtggaatctaatatgccaaataattccttcatgaaactgtcttctctgcagcatcagattggttcttcctctatcttctggattgtttcttagtttcctaacataaagctagtgatgtttcctcagcactcttgaattgggtaacctcatttactcaaagtgatgggtacttcactttgcctgaatgatttccaaatgcattctgagcactgatctttgctcttatgtttatgccagcaacacttatctacatggaattcaactgagattccacgtgtctatcttcctcatacttaactatacctagctaaagttttagatagttcaggtaacagagtgtaaagaagtaagaaagaatacccaaaaagctccttattaacatctcaagcctttacaaaatattgtaaaaatgaaatagttattaccagaaattaaagtgtgagcaatagcaagtcagttaacagttacagggcacaatcgacagaaacgttccttagaaagtacagaaagaagcaggctcacgcctgtaatcccagcactttgggaggctgaggcgggtggatcacaaagccaggagattgggaccatcctggctaacatggtgaaaccccgtctctactaaaaatatttttaaaaaaattagccgggcgtggtggcgggtgcctgtagtcccagctacttgggaggttgaggcaggagaagggcgtgaacccgggaggcggagcttacagtgagccgagattgcgccactgcactccagcctgggagacagagtgagactctgtctcaaaaaaagaaagtacagaaagaaaatcctcaaccatatcttgacttcaaccaatcacaacatttattatctcattcctcattaacgctttttcattagaaccatttcagatgcctaaaagaaggctaacatacatttaccttctctgatatgaaatatgttgtttttagcagaaagatgtcctatagttacacaaataaaaggactaaatctgagatgaaaaagataaaagtatatgagatcatgaccacaaaacgagtgaaatatatatgcttattttttgatagccttttaaaatttacacatatttttacctcaggatgaaaactctttagtcctatgtctagttacagaagtcagaaaggctatattttaacaatattctacagcaatagttggataaaaggcacagtaaagaggacaaaataaaaaatgaaaaactctggctatacttctaaactgagtaacaccaaatctactgggaaacatctcttaatggataaaaatcggaaaaacaactcttgatggataaaaatctgaaccacattggttttgaaatttagcgctaaagtggggacaaggggtgaagagaatacatattttaaatatttattaacaccctgcttagtttctgaaaagaaacatgacttgagtcatgtttcattttatttgttacttgagacacaagtaaaaagaaagaaaatgttactcatgaatttaattactgacaattataaggtattatctacaaggacccaaattgaagtaaaaaaccataaaaaatattacacatgaagaaacgaaaaataaccaaaactaaaaaactagagcaagtaatatagaaataaaaatatacagcaagtaattaacctgctctatctggaaggctcatcagatgaagataataagacaaacataacgaggctttacagtacactataaacaagtttccctgaaaatccaacatgttaaggttattgtcatggaaagcactcagtgtcatatttataaataaataagcaagagttcacacaagatctattgtttaaaagagcctggcacttcctccctctctctcttgctccctctctcaccatgtgataaactggctccctttccaccttctgccatgattgcaagcttcctgtggcctcaccggaagccaagcagatggtggtgccatgcttctactgcctgcagaactgttagccaaataaacctcttttctttatatattacccagtctcaggtattcctatatagcaatgcaaacagactaacacactggccaaggctccactctcccccatagcctcttgactctataacctgatttaccaccattacctgttttgggctatgttctgagcccccattctttctgtaacctcaagaatgtataaaactgtaccccactgggggactgtgatgctcccagtgtacacattaatatgagcggtccattttggtttgatatttgtgtgacctttgatattttggggtacccatttaacttcagagaatatctttcataaaaaggaacttaaaagccagggttatcggcagtttgtcctagctaaaatctgataagagatttgaaaagatttttttttttttttttttaaggagctctacagtcagaagtcagcttaattaaaagctagttttcaatatatgtatttaatggactttctgcttcttctctttttggatcctgttttggggatttttttatttttttaggtgcccaaataacatttttaaaattacgtgtttggtccctctgtttgcttccttgttttatgaattgttttcccattaattctatttatctctactctttcttcctctttgccttttaaagtacacatgaaaggatctacagaggacgtctaatgactcaaaccccttaaggaacacacaaaaaaggcaccactcacctctcttctgccttttctgtcttcctgaggagtctaaagtcatggacagattcatctcaggtctaaaactctgctctcttttgtattacattacccgatcgctttggcttttgtgggtaccagagattactttgtactatgagagaacacttgacctttgtatctgtgatggctgacaagtcactggtgagagctgcagttttggaggtagctgacagcagttgtttacagtaaatggttattactacaggaggctactcctttctttgtgcatttggataagaaaggcatgatttaaacacttagagaaatgtctttgtagcaaatttcattgtgaaaggattgctctgtccagtcccatggtggttcccttttgtggggaacccaggattccgtgtaaaagtgaaattctttattttttaaagatctagacggtctgccttccagctgtgcatgtttttcacatgtttacattattaggccctaaaaactgcaaatactttgttggctctgtttctttatggactccaccctgagctcagttgtccagttgggaaagagatcaaattaaaagctacctatctaaatgaaactggtcttcttacaaaaccctatggtaaattcctgtgattttgtgctaccttagcatcattctttatcttcctctaactaacacaaaatcatctttaagcttaaactttccatcactctctgtgctttgagatgtaaatttgccactgttttctctaaaattccataagggcttcaatcatgtgaaacagataaactttactttttccagttacacaaaagcacagtttgaatcccgtgttgtttgttttgttttgagatggagtttcgctcttgttgcccaggctggagtgcaatggcttgatcttggctcactcaacctctgcctcccgggttcaggcaattctcctgtctcagcctcctgagtagctggaattacaggcgcccgccactacgcccagcaaatttttggtatttttagtagagatggggtttcaccatgttggccaggctggtctcgaactcctgatctcaggtgatctgcccgcctcggcctcccaaagtgctgggattacaggcttaagccaccgcatctgaccccaactgtcctttcaaactagtgagttttacctttctcacagctaaacttttaaagtcaaggttatcatgtcattatttgtgtttgtctgtatttctatgcatatatgtgtatacatctatgtttacatattgtctttatgatgccaaatcgacttacaaaacaaatgagtattcataaattaaagaaatgatcccaaatgtttttcaaatccaataattgtagtaatctttggtaaataaaggtagttttaaaagtgttggtaaaataaaatagaaatgtctttagaatttcaacattttggcctgggttgtttagtgagacaggtttatactatctctgctagatgttttaaggtcacagtattgttgtgtctgtgatatttctcatacctgcttaatttgtctttgagcttatatctttggatgtgagcttttcaactctgaggtttagacaagtgaccatagtaaggcctggggacaacacccaggccctatcttccctggctggggtgtggatcttggccatgctaggaggaatcagattgtccaggcattgccttcatagctctgtcctttatcctacagtttgtatctgttatataattaaaatggcttacttatatctttttcactgaaaataagtgttattaagagttaacattataataagtatataaattaaaactcctatacataagaaaaacaattctatacataaagtacaggaaatttgtttttgttaagaaaggttattaaaaagcataaaatgtgatttttttaaagaaaattaaaatatatcaccctgaaatatatttctttgacatattttaaaatggctgctgcttgggcataaggcagaagtggccttgcaaagctaccttaagtaggaaaaatttgcagccatagagaatctaccttaatacggcaatgtcccctcccctttctacacctttccccagatcccagagagactgagagtctgacacctttcaaagtctgaaaagaaacatttaccacctattccctctgagggaggcttcatctacataatgaaggcatttttgctagccagacttcttattttactcaggctttgactggaatggcacatattcaaatataaacgaactacttcaaggaactgaggttgactttatggagccaataagaaaccccttggaaagactggtctggtgccttgtctatatggttcttttacaaggttccagacctaaggtaagtacagaatatcactttctgacaggtccaggaacctcaagttattttgggacctcaaaaaaagaggaattcacccaattcatacaggtattgcaagcaaagtctgatggtaaatacttggcttgacttcctagcctcactgatatcaaaagtctaatctgagattccttacgcattttccttatgaaaatcttttagtaaagctgatttaaaagagcccacacgatcaatcaatattcttgatgcaaataggccaagtatgataagactaaaatttattttgcaaataagttaatcctactatgattttctctggtagaaatggggggctggaggaaaaaattgtgtttcaaaagaaaattataggctaggaatgatggctcatgcctgtaatcccagaacactgggaggccaaggcaagaggatcacttgagcccaggagttttagaccagcctaggtaacaaatgaaaccccatctctacaaaaaatcaaaaaattaaccagatgtggtagcatgtgcctatggtcccagctacatatgaggctgaggcaggaggatcccttgagcccaggaggttgaggatgcagtgagccatgttcataccactgcactccagcctggttaacaaggcaagatcctatctcaaaaaaaaaaaaaaatgaaaaaaatgaaaatgatagtatacccatttttggattgtccgttgtttttgagtttttattatttgtctacaatttggactgaatcctgaattgtttcctgggtacaagtctccaaattaacattttcaaatttttcttccatttcttctaacttagaatcactaagaatcactaagaaattaaaactgtgcttttcttaaagccctgaaaatggaagctaaacaacttaaatgaacttcaggagaacgcacaccaacttacatataagcagccttcatgtctgttttgctgtataggctactcagaaagttcacttaaacacctgattaaaactacaatccagaaaaatacctcagaggcgctagaaaaactagtctatagactactccagacattaacctttgtttttcttatgtttctacagaaatgcctcttgttaaaaatctgtttgcctacatcatatatacaggcctcgcccatctgcaatgccaccacatgggctgggacacagctgttcaactgaactaatctatgctcaggagtaagagactgattcaagaagatatgagatgatatacttaaatttgctgttttttgcttatctcaagttgttttcccattcctttgtccatctctaacaacctctaacccaaatctctccaaaggtatcagcttggttgtcatatgtgaaactttttaaagtttcaaagtgggaactgaaagaaatcaaaatattttactccaaaatatatttctttgacatattttgagatgactgtcagaaagccagcaaacagaagtggccctgcaaagctgtcttttgtgagggaaatttgcatctgtagagaatctacattgatgccagcgggccttctctagctgggatctcggaaagattaacccagagtttgacaccttaaagatctgaaagaagcatttactctctattttctccgagagctgctatctgtgaggtttcatctatataaaaagactacctttgctagctaaggcttcctcttttctccctcccataacctgccttgccactatgacctgatttatcaccattacttgtttttggctatgctctgagcctccattctttctgtaacctcaagatattaatagtatataagcttctgtactccactacggggttaggtaatcactgtgtgatgttccctgtgtccagattaataaactgtatgccttttctcttatttgttcatttacttattactagagatggatcacactctgttgctcatgctgcagtgcagtggcacaatcagctcactacagccttaatcttccagccttgaacgatctaatttttttttttccctgtagagacagggtctcactatgtggtccaggctggtctcaaactcctgggctcaagtgatcctcctgcctcagcctcccaaaggggtgggattatgggcatgagtcaccaggcctaacctctctttctttttttttttttttattaatctgccttttgtgagttgatttttttagccaaccttcagaggaaaaagaaggcccctataaatgcttattagaaagctaggtgattcttaatgagaccagtgggaaacttttactgagtatctagactatgttgctgaaaaatagttgtgtaataatggagcaaagtgatcctgaaactctctcaagggtttttttagaatttttgacatatttctgaaataggacgtctgaagatacaattcctgactactgattaaaataaaattagaaataataatgtatttgaggttgtatgatatgatgaaagacactgggtagagtttcaatactgttaaagacaaaacatactttacatatgttttaatcctctgtattatacaaggaccagaagaagtattggagaaaaataaaataccttcaaactaaaaaaatcccattattaacctctgcttaaaaagttaaatgtgtaattataggctcactgggaaaacataaccaatgtagttataaaaaaattgtatggttattttgtgggtgccagcaatgaggttttaaggattatttcacagggggtttagaagtagcaattgtgaagtattttaggttgcataaaacaggcttgtctcatgttaactacccagcaattgcaatgggcctaatttacacaataatttcttagaagttactcttttgaaatgcactgtgtgattaactgacttggcttcaaaaatggaatgttgtttctacatttttgttcacttcaacctaatgccccctagagcacagatccaattaagaattaaggcagggaggcaggcagatattaagcacagtgtttctgtattacacagtgcttttgtataggattgaacaccaccacctactgtctggaggcactagatttattcagtgtatccctgtgacactgtgaatatggctgatggaaacccatgaatatgagttaaagcaaatatcttagcaaagaactacaaccagataaatttaccttacagcaaaatttttggtgctttttaaaataaaagcctatctacacctaaaaacttaattttcacatagaaatacaaaggataataacctgttctattaattatttatatctgcagtaagaatagaattttcctctgaaattaatgttttcaaccaaattgccatcacggaaacaattcttatgtttcaacagcatttacatttcccatcttgttcagaagtcatgcactttgttagtagaggcgagatctgtaatcagtagagtcatataccaaaattcatgttattgatgaaaaagagtcaaactctgtaaaatatttgaaggaatatattttgagccaagtatgagtgaccaaggtctaaggcacagtctcaagaggtcgtgaaaacatgtgcccaaggtggctgggttacagcttgagtgtatacagaagttacaggcagacatcaatcaatatatgtaaggtacacatacattggttcagtctgaaaaggcaagataactggaagtgggggtttccaggtcttggtggattcaaatattttctgattggcaattggttgaaggagttaaattattatctaacgacatggaatcagtagaaaagagtatctgagttaagataaggggtcctggggaccaaggttcttattatgtagatgaagcctccaagtagcaggtttcagagaaaatagatgctaaatgtctcttaccagacctaaaaaggtgccagactcttagttaatctctcctggatcagaaggaaacctggaaagggaaagggattctctacagaatgcagattttcttcataaaagacagccttgtaagggcatttcaaaatacgtcaaagaaatatattttggggtaaaattctgaccaagccctgctatctgtcatgtcaaactgactctacactagagtcagtttggaatttggtatcttattgcaacaaagagtcagttttttcagtcttaagatctcttttttagtgttaatgctggtcagttgtgcctgaattccaaaaggaggagagtataatgaggcacatccgactcctccttcccataacagcctgaattagattttcagatttactttggaatctccttggcggaaaggaaggatcgattcagttggttggggagcctggaattttatttttcattttacaatgtgaacacagcatttatattttgagaagttagggttccttaccattaagactgcttcttctaagataagagccagtaggccgggcacggtggctcaagcctgtaatcccagcactttgggaggccaaggagagcggatcacgaggtcaggaaatcgagaccatcctggctaacacggtgaaaccccgtctctactaaaaatacaaaaaaaagtagccggccgtggtggcaggcgtctgtagtcccagctactcgggaggctgaggcaggagaatggcgtgaacccgggaggcggagcttgcagtgagccgagatcgtgccactgcattccagcctgggcgacagagtgagactctgtctcaaaaaataaataaataaaaaataagagccagtaacaggatctccttacaaccacatgttcaaatattattcaagctttgcttcacacataaatgtccaagtcattcctccagccccactccacctgctctcatccagcttccctcccgcttctactctctccgagtaaatttctagactgctgactcagctgaacatcacctaagcccattactctgggctgcaagttcatcaagaaggaaagagttaagcctaactctcaactcttcatagagcatagataaggcctccaatattgttacgagggcagaagcctagtagttgagaaaacatggaaccaagaagtgcacagactcaactataatcctacctctatcctgacactatgacctttggaaagttactcagtgtctctgagccagttatatatttacatacgaggatacatgaaaaataagaaggattattacagaggatttattaaatcccctctggtaaaaaaaaaaaaatgctaatgctgtaatgtggaaagagcagcagttgaaccaaggacaggctcagatctcctgggtttaaatctcagctagatcacttcctagcaatatgactgtgggtctctgatttcttctctctagcatggtgatacacctcatagcattgttataaaaattaaatgagtcaatattatcaataagtgcttagaataacagctgacacatatcaagtgctcaatatatgtttgttattgtcattgttattctaaaaatttccagtgacatacaggtgtaagcagccacctgacatgctgcctctatttcccagtagacaacattttacaaagtagcaggctcttctgttttttcaacttttcttttttccagtcctggaaataatcctttataactgcaaagtgtggtagaacatgaaccccaatgacagtccagagtgatcatctacaaatcccatttttaaagcatcaaaataataataatagtaataatcaaaaaattataacattattgttttgtttccagtcccttttgtagaatttatttcctcatctttgaacagactgaactttgctgtgatcatatgtttggccaaaagagatataaaaagattgtagaactaaagtgaaaatagttgaattcttccaataactggaggtaagtggagcctttcagtaggagttggataataaaatttgtaatttaaagaaatgtacttttcaatcagctatttacatttgtttaagaaagcaatgttgtgtagcagtattgctgaaatgttatagaattaatgcattattttgctgttgtccatgactgaagaggggaagatataagaaaactgaaaaattataacccccaaataatcaatatttaagaaggtgtaaaatagtaaaaatatttaatgtgaaaaatatctacctaatacaaggaaaataaagcaagaaacaatccatctccatggcttctccctcaccctcacctcagaacacacacacacacacacacacacacacacacagagagagagatagacagatatattaagacagcagcttcttttatcatgcacagaggaataaaatattttccattccttccttagctccatgtaaactcacaaaacactgctctctagggttttccaacttgtgaaacaaagcatccatcccagagtttgtttgttttaagacaaggtcttgctttgtcacccaggctggagtgcagtagtgtgatctcagttcagtgcaacctccgccacccaggctcaagccattctcgcatctcagcctcctgattagctgggacacaggtgcatcccaccatattttttgtggctaattttttttttttttttggtagagacagggttttaccatgttgctcaggttagccttgaacttctggccttaaacaatccacctgccttggcctcccaaagtgctgagattacaggcatgagccaccatgcctggcagtctcagagtttatgaaaccattaaactatagatggcttaaagcatactggaaatgtaaatgttctcataaagtatgattaaacatgaccaaaaaaacatatggcataacagcaacaaaacagagcagacagctgtatacagggacctgggcctggaatccttactatgtctccacagcttggagactggtgctcagcatcatcaatatgaaggatctgactgacacctaagctaggagggaaaacaaaagaaactttgaaaatgtaaaatagtttccgactgattttcataagaaagctggaaagctcagtgtgtttaatcgtttttacttagcaaagaatttatctttcatattcttataaagtggctttcttctgtgttatcagtaaaaactaacactgaccttcctcttggaaggttaaacttctagcttgtgtttgaaacgctagagtgccttttctcagaagaaatgctacatatacgtgccgcaagcaatgaaaaagaatacaccatctctccgacccttcattagtcagaggatcttggcaacagcaatgctgcttgtgtacggtctctgcatgaaaaactgttttcaaaggtaaccttgccaagggctatgttctgtcttggcaaaaggaagcaaactttacttatctaccaatcggtttgctctgcatgagaaacaggtgttaaggtatgaaacggggctaggagcagtagcaaaataaaactcacccaaaataagtttcatctggaaaaaacacacaactcagagataataagcctgcagggccaacatgtttttgcaaaatgcaaatcatgaaaactggttaagggattaaatgctcttttgcaaaaatgaccatggagattataatcattaattaaattcatgtaaataattttctgaaagaactctccttttttatctcataggtttcaaacagtctaatggtaaaaaggtttagtctcagaagagattctctaattaaaactagaaatctggtataattaataagtgtcagcctgcaatctcaaccacttagtaaaggcagagaaatcaaatgctgatgttttgtaaaaaacctaataaaatctccaagaaaatgaaatttttatagggtctacttcccatcaatacaataggtgtcccagatgggactagaaacttcttaaagtagataaatattttaacacttacaattcctatatgccagttttatttgtttttcttttctctttggagttgtaactcaacccaaaagaaagctttcaatgatttaacttgggtttacatttttgaattatctaagctccctgattctttcactttttttcctcattatcttcacccagaggtgaaccagagcaaaaaagacaagatgaaagtcaaacatatcaatttcaaattttgattacatagtcttgcatagttcctccttcctttcactggatgtccaactgtacgacagctttagtgtttataagtttaattttaaccacaagtaacagttcaaagaacaaagataactggtttttagtaactaagtttttggtttgcagcttggtctagagttctgcccatacaggtaaggtaaactgattattatctgacaacaacacagccagaggcattttccaaaaatccatttcacattgtttgttggtggcctcccctccctatgcaacagcccctgacttctactgggaaaccaagggattccaggaaaagttgactccactggtggctccaagaatagatggctgagcgtaggctaagctaattattcttctttacctctgccactatttgaaccccatgtggtccaggctgagcttatctccggactgtgcctgaacactgtgtgccgttggggctcagaacatgacacctcagtgtatggtaccttggcatactgaatactttgaacaacagaacactggggctaggtgtggtggctcatgcctgtaatccaagcacactgggaggcagagacaagtggatggcttgagtccaggagtttgagaccagcctgggcaacatggcaaaacccggtctcaacaaaaaatacaaaaaaattagctggatgtagtggcatgcgcctgtagtcccagctacttgggaggatcacttgagactgggaggcaatggctgcagtgatccgagattatggcactgcactccagcctgggtgacacagttagatgctgtctcagtaataataataacaatagtaaagaacattggaagagccttagaagcaaggtctttctgactttcttcccttctcatatcccctgccccttttttctgcccctaccaaaatcattcatagaaatcagaatttctttccaccatggaagatcatagaaactggaattcctcaatcccagaccgtaaaaacctagagaggtcacagtctcccttctcccttgaagatcctcattccagagaagtcctgccccataattcctcaatcccagacagtaaaaacctagaaaggtcacagtctcccttctcccttgaagatcctcattccagagaagtcctgccccataatcgggaggaaaaaatggtacacaaagaggccgggaaaaatctaaacagacaggccttggtgggtccacctaccctctcatctattaccattagatcatagccttttgtccaatcacatttctacatagctgtctattcttcatcaaacctaagcataaaaatagacagttttccctgggtttgtgggtcttgatttctgaaggctccatgtcacataaagcattaattaaataaatttgttttttctcgtgttaacctgacttttttaataggaatgttggctgtgactgtctttgtttttgttttttgagatagagtttcactctgttgcccaggctggagtgcagtggcatgatctccgatcactgcgacctccgcctcctgggttcaagtgattctcctgcctcagccttccaagaagctgtgattacaggcgcatatgccaccacacccagctaatttttgtatttttagtagagtaggggtttcaccatgtttgccaggctggtctcgagcccctgacctcaagtgatccacccgcctcggcctcccaaagtgctgggattacaggtgtaagctaccgcaccccgccagctgtgactcttacaatgtgtgaggaaaggaatcacaccctttcaccactaccgtggcataccaccagatggtctttcctttcctggactggctggtatgcagatgtggggcctcagtcaccttgctaccaacagagaggccggcctgcagcaagagcaaactgaataggacatacgctttccatacactgtccatgcactgaataggacaaggtccagaacactctggtgaatggagctggagctgatggattgaggaaattctgaaacctacccaacctctgagcctctgtttatatgagcctatcaaggccttgacttggtaagtgcgagttgttgcttttgttacttgtaacataaaagatccaaaccaatttaaatgtatacaaggtattcaactcaattacttggaagattacaatatactgtggtagagacagatgcactgctcagatccctcttcaaagtaaggacttgcagccaactacagggtggggcagcagccagcctattccgaacagcagcctgcaacagccactgagtgaggcggagcataaacatccatccatgtcaacccaaagcaggacactccaacagggaatatatgcttgagggctcctgttgggttggccaacacatctttgtgaccgcatcaaagtttgaattttacctctgttcaatcctccttctttcatactttcttctatggaggttgacgcctagtaaacatcttataccccaatctcgatctcagtgtctgcttccaaagaatccaacagtaacaaaacatctctgtcctttttcatattataacacactttcacattataaaaacataagcagaaaaaaaaagcaattaaatacatatgagaaaccacatgtaaacaaacaaaatgccccatctctccccttttcaaccctcctttgataacactctagccacatatagaacaaatgttggtgaggcagaaaggcattatttaataaattgaagtaatacaattaagtttgctggaaacctacttaaaattgaaaaggctttgagcaatgtatttctcatgagtcaccagtttcgctttttttaaaaaacaaaaattgtaaatgttggaacaagaacctttttcttattattgcccgtttttattaaaggggatttcatgtataatctgggtaagatttaaatatatagatgatgggaaatagatattttcaatcaaaatttgctgtgaagcaaatttcttttaagtgattccatttttaattaactgccattataaacctggagatcaattgaacaatgaaaagatcacacctgggattgtaggttttctttacaactaatatatttaaaggtataaagaactttgataataatttagggattctagtctcactgcctcatcaaaacatttcttgctgtggtcaccaaagacattcaattcacaaaatccatggacattcatcaatctctttttgttgacttttctaaagcattattgttcccttgacacttctcttcctttgacttctaccacactaaacttttctagttttattcccatttttctgcttctcctctgtatactttccagcactctgggaggccaagtcggggggaacatgaggtcaggagatcgagaccatcctggctaacacagtaaaaccccatctctactaaaaatgcaaaaaattatctgggcatggtggcacgcacctgtagtctcagctactcaggagactgatgcaggagaatcgcttaaacttgggaggtggaggttgcagtgagccgagattgtgccactgcactccagcctggccgacagagcgagactctatctcaaaaaaaaaaaaaaaaaaaaaaaaaaaaaaaaaaaaaaagatacctgtatatcttggtccaaggcctctatcccttctcactctattagcaatctctggtgttctcagccatactcatggctctaaagcagcacttatcaacagattactaatacacagataagcatagttcacttatacacagataactcacataacatttcaaatggatgcctcaaaggcacctcaaattccacctgccaaagagtgaacttttgacaggcctcctcccaaattgcctatctcagagaatggtgctgctattcatcctgtaaagaaaaaccaaaaccaaatagttttacgtaaaatccctctttccttcactgtctccccatattcaaatccatcaagttctgttggcacagcctccaaaaggtattctgaatttatgtacttttccctatccctattggtgctatcataaaacgaaatgctctcatctctcacttggactgcaatggccttctaactggtcttgcgagccagttagaatttgtgccccttgtttaaaacattgcagtgttgctgcttttggggtaaagaccaaaaatcttaatatggctacaaggccagacatcttctggcttttgcctcaatttccatccacactaatctcttcctttttcctatacctggccacaggagctgattttcactcttaactcctaccatggacctttagcacctatatttccttctaacccaaatgctcaccactctcccataccatccccagaataacccctgcttcttccttaaatctcttcttaatctctacctcctcagggaagatcctcatggtcctctgattctggacctgctcacatccttgatgtcaattataggctttcctaggaaaattctgtatttgtttgtgattatttgagaaacctccttcttccccatagacggtaagttcctaaaagggctgagacccacagcttttttccccttgtttagtttttgttttgttcaccattataactgaggttcctgacaaactgcctcatacacaataggcactcaagagatatttgttaaaagaatgaccaaagagttaaataaatataagtaaaatgcttttgttgttgttgttgttttgtattgagacagggtctcactttgtcacccaggctggagtacagtggcacaaacacggctcactgtagactcgacctcctgggctcaagcaatcttcccatctcagcctcccaaggagctgggactgcaggtgtgtgccactatacccagctaatttttgcgttttttgtagagatggggtttagccatgttgatcaaggctggtcttgaactcccaagctcaagcaatctacccgccttggcctcccaaagtgctgcgattacaggtgtgagccaccatgcccagccaaaattgaatgttttaataagcttaatcataacataaagaaataattagtaacatgtatcatcactaaataatctgagtagataaaatctcctgttttgacaaattatagacatcttaaaaatgcttcccatgtatgaatttgattatggcataccacatgggagccattcaccctcagtcttccacattttctcccttgtatttcccttcattgtgtggaccttccttagcctacccaaatagcctgaatcaagaccaccctttcacaatgccttccctggcttcagcatttaatggtcccccctttttttccaccataatatttcttatggaagaggttggcaaattttttctgtaaaaagcttgatagtaaataatttaggctttgcaggctatatggtctctatcacaactactgtgctcagccactgtagcagaaaagcatttgtaaacaatatgtaagtgaatgaacatgggtgtgttccaataaaatttaatttataggtaattaactagaattccatataattttcatatcatgataagttatctttcttttttaaaaatttatttcaacctttgaaaatataaaagtcagttttagcatgtgggccatacaaaaacaggcgttggccagatttggccaatggactaggtggtttgttgaccctctatctcacaagacttaccggggtttctcagagcacataccttggaaagttagttttacttgaggatattttaaggggttttcaaatgcctggttgtattttataggttaaacatgaatacatagtcactatcatctctttttgtatactaaaataaccaattatttaacttgtgccactaagtttttgttgttgttgtttcctctgttgggtgtgcgtgggggtgctgcttaaaagaaactcttcttgccctcttatttaactgaagactatcacaatgtgacgttagcagagcaagctgttaaaacgaaacaaaaccttacaacatacaaccacttatctgtgtgaatcaaaattcttctctacaatatgcagcctgaacaaaatacagaaacaaagtgaaagctgaggctaatgacatgttgccatggctatccaaagcacataatatataagtaataccaacaacagtatttaacatttattgagtccttcccacagaccagtccctttgctacttaaaaacggcctcatttcctgaataatttcttgagtaaatgttataaacatttgaacttgcatgacaaaattacagtaacaaaagatcgcatttctctgttttctatgttggtgttgtgcacgcactttgatttggaaagggagctctgcttttactttttcctttaatacaccacccatttgggtactttattgcatgtttcttattattatttctttattgcatgtttcttttttattatttgcttctctgctgtttgttttatatgaaccttgctttttctctaagtaggttgttacatatgtttcttgagaatgggaatcaggccttatactttccccctacttcttacacacacagcacataccctctacactccactaaaacaaagcttagcacagcaggaccctaggaaatgaactgctgcttacagaagtgaatttttaacttaatttgtgaattccttaaatttgcattttgcttaaatgcatttcactgaaactgaggtacacgtaagaattcttctaaatttttaatatgctgtaatctttacattatgttgtagattagaataacatgtggatagcaaaatgaaatatttagttttagtaacagtaaaataatatataacagcatgttttctttgttaatttaggtgttatacacctttgcctggtaaacacaatatctttcctctgtttattttctggcattagctttggcgctgtcctgtaatctgccaggctgaggaaaatattactttacatactaaaacttaatggactgcaccaccaaaaattaactagtgtcattgttgtaattaaagatcagagaagctcttcaaagcctcctcctagtatgctggaccagtggagatctggactttttcaaacgacccttagcgatccagagaaaggtggatacaatgagagtagataacacttggccttcagaaattagagagtgaggctggagctgaatgagtctctttattagttttttttaggcagggtctcactcctgttgcacaggttggagtgcagtggtgtgatcatggctcacagcctggacttcctgggctcagatgattctcagcctcccgagtaggaactatggttcctactcacatacatcacaggtacttgccaccacacctggctaatttttgtagttttagtagatatggggttttgccatgttgtccaggctgatcttaaactcctgggctcaagcaatctgcccacctcagtctcccaactgctgggattacagacgttgagccactgtgcctggcaagtgggtgtatctttatgtaaatatggaattaacaaaatttggagttgttttctattgccaagaatcatttataggtctcattaaatgctttccccaaaatgagaacacaagcagcctttttcaattacacacctgagggatgaatgtttcccaaagggaacagaatgaaaataagcagtaactactgaatttgtgcatactgttaagatgtatgacatattttcagaatttggttatttttgttttgttttgaggaaagaaaggacaatgaatggagagagtgactatggtatactctcttcgattcctatattatataaacatataatcaatgtgtgaaataattacacagaaaattggcaatagagagggagaataaaacacttctaaaccattcacttagaccaataacaaaatttaacaattaatattttaactttatacctgtgcagacctcttttttcaccactctatccctccccccatacatgcatcatgcatacttccaagcacccttccagagaatatattaaaattcaatgtttataattaattaacataaaagctggtaattagtttactattaaaaaatgccattttctgtattttatgtgccataacctactgttattataatgttcccactaaaaattttaatctacttaaaaaaaaaaaaagagtagtttgttgcagacggttatgttcccctggaactactgcccccttgagttctataagaaaactcagtcctgcaccacccctcactgcattttgtcagtaaattaccaatgaaaaacaaaactttatgaggaaccatagttgacttcactgatgtggagcattaaaacgattactactaaagaagatttcctttgaatttctaataagaaactgctcttgaaaagctgaaaaggtaatttacactactagatattccctaagggtcaccaatgaaaaagtattttatcatacagtgtttactgccttagaagaatttccttttctacctattcaagttcacaattctacactgacagtttttaacatcttctgatttagtcattttattgcatttatatcggcaaagattatacgcagacctcagaattaagtgggtaggtctaagggtaagtacaatagaataagatttaaaatctttaactcagcggggtgtctatgttttattctaatgcttaaatttatttcaagatgtaatgtaaatgtatgataatgtacaaagaaacagtgtgatttttaaaaatcaaagtcattaaatacttagaaaaccacagattcaggatgttggagcttgaacacatctgcatgtactattataagccttaattttagacgtctgtattcacttttgtagtttcttgatcacttgatgttctaaaataatagcataaagtctatggattaaaaatcaaaatctgcacctccacatagtgtgctctctgagtgctgcacagttaaaaagtctcgagctcttaaactttaaatggttactttactggaacacaggcacaaaacgcaatctatagctcatagtagtgtgtgctcttttcagtcattgttttgtacaaattaagctcccttgaccatttagttaatcaaaaagcaaaggtagaacatgagggaaaagctcttctgcacaaattatgaaatcatcattctgataaaaagggacaaaattatgtatctttgtataccttatatccagaaacttgttcaaactctggtatacaaaggaggggtgactattaggtgaacaggtttccttcatacaaatgccagcaggacaagtgttgaacaccatgtaaccattttgcattatttggagaagaaatccagaaaacttttccatattcacatccattccatctctctccaatatatttaaagaatactgaaactatttttaaacttcactctgctcattcacatgaacaacatttacaacttccccattcatgtacaaaaacaggtctgtggacaaataacataaagttgcaaatgtgttcctactattttatgaaagaaaggtctttttgtaattgaaaatagattcctttcaaaatctgcaaagggcccccatagtctgctctaaaaatgttattgtctaaaccatttctgggactaattattacattatttactatgattaggaatctcatggaggctgaagcaaaaataaaaatgactttagaagcctaaattttgagaggttatatcaaaattgacaggaacaaggatgcaaaaaaaaaaaataaatgagtgaccttctatgaaaaaataaactgtttatcttggcaagcctatttcttatgcattttatcagagcacttcaaaattggtagggaagcaatcatcacactgaggaaaaaacttgcttctctggccaaatatgataagtgatatatttagctcttctactttgtatataagtgagtcctcttaaaaagcaaataagccatttacaacattcatttaaaaatcataacgtaatatatttacatttggggaggctcatgaatttttcttcctattaatggtaagcattttccatgtgtccatcagaattctacttttaaaggtcccaaatcaacttttataaataccatcaaatggttaaaaaaaaaaaattttacctacaatatgaaaataaagaactgagaacagatatcggtgggaacctcagatgctttctcacttaatatgtggtatttatttaacctttaccatacaggaagaaagagaggggatgatatttatgtccactgtgtggagaaactcaatctaaataaaatttaaataaagtattttagtaagctattaacaaagaaattattgaagaagtctcttctagtcctaacctcatatactgtatagggtagatcagttgagtagctaattaaataaattaacaaaatattttagagcatctgttttgataatttattgacaatttagataatttttgattcttcaacaaatcttaacaatatttggtgtattaggaacatataatgtgttaggaacccattatgtacaatttagcacttttattattagagacaataaatggcaaatttacttacaatttattcataataagaactaatatgatgataaatggcatcattcacagagttttcaacagaacaaaatgacacaaattcgattgtttgaaaagaactaggaaattttatgaagagaactgtcttctcagaagtaagaaaaactgataaatcaatttcctagacaggtaagatcattgcaagacatggacatactctctatgccaaaacacaacttctaaaaacatagataaaattgttctgtaagtttaaaattctaaggagctaaaactgctctaaatctgtttaaacagcatgattaccatatcaatctagttatcttcctagatatagattcaatgttttaaaactgttatacgcttgtttgcaattccataaagctaaggagtccaaaaaaagtgaatgattactgcaacacaaaatactctgattttgttcataaatgttagttatcctttgcatatgtactgaagtggcaatttatttaggcatgaagagtccacacacggagcattagcaaaatgatttttcagctcagtaagaagccattaattcattatcaataacattgatcctgtgcaaatagaaaatatagtgtttttcagacatgagcataacagctctcaatttaggcagttaaccacataggacgatcttagtgttacaaggcccattttctccagaatgtctttggtggcagttcaaaatcaataccaaacgtatggaagatgccccaaaagaccactggaaaatgtgcttagttaccctggagtaagagaacatgattgacaagcaagggaaagtgtaatgggacacagagaaggagaatatagtcaagctttcttgcactcattggctcaacttgggatgagtcaaattatccagaagtaaactccagaagaacaagaatttggcattaagcagacaaaaacaataagatcagcttttcttatttgtggggtgtgggatacatgcaacaaatgtgcctggatggccagtgagtatggaaggaaaaggatcaagaaacaaggagctgtctgagcaatgggaggacagtatgaagctctgggttaaggagggcaggcctcataagaatggatgaaaggcaagagaagtatgtcaaacataagcatcctgctttgggctttgcactggaagttaaaagtcccctatggtgtgttgaagagtgaaagagtggtacacatgtaaaggcacatgcatggggcatttagctagtttactgatgggcctagtagaactaaggttatacatatattaatatggtttggctctgtgtccccatccaaatctcatctcaaattgtaatcccaaggtgtcaagggaggggcctggtgggaggtgaatggatcatgggggcagtttctcccatgctgttttcatgatagtgagttctcagaagatctgctggttttataaacggcagtttcacctgtgtgttcacactctctctctacctttctagccgccttgtgaagaatgtgcctgcttcaccctccccacgattgtaagtttcctgaggcctccccagctgtgtggaactgtgagtcaattaaacctcctttgtttataaattaaccagtctcaggtagtatctttctggcattgtgaaaatggactaatacatatatattacttggacaaaagcctgccactatgaaagttggacatagctctaacattctagtttttaacaaaagaactaagcaattcatttttgcatgactgactctttgttgatattctgatctcaacttaaagattataccttcaggctgggagtggtggctcacgcctgtaatcccagcactttgggaggtgggggtgggcagatcacgaggtaaggagttcgagaccagcctgaccaacatggtgaaaccccgtctctactaaaaacacaaaaattagccgggcgtggtggtgcacgcctgtaatcccagctactcaggagcctggggcaggagaatcatttgaacccgggaggcggaagctgcagtgagaaaagatcatgccaccgtactccagactggaagacagagcgagactccagaaaaaaaaaaaaaattatatcttcagaggtgtctttcctgactacctagtgtctctctttccataacatcatgctaccataattctctgaataacattttatactgtctaacaggtttcttatttatctatccaaataacattttatattgtctaacaggttttatatttatctgtccacaacccctataatgtaagctccatgacagcagaaagcttgtctattattcactactagatctcctagaagaagctcatagtacacacttcttaaatgaataatgaatgagcaaatggacaagcatatggtcagatggatggaaacatagtgacttcagtaaaacttcaataaatatctgatgatcatcttctaaaaaaaaacagaaatctaatctgggctatcatatactgcaaagatgattttcctgtctatctgcaacagtctatgaatcatagtttttttcctaataaatgttttgatttcttaaagaagggtagcttgaactcagatggtgaaggctgcagtgagccatgatcatgccactgtactccagcctgagccacagagtgagaccccgtctgaaaataaataaataaaaataaaggctttgatttcacctcctttcaactttttgggtcaacttgccacaaaaagcagtattaaaaaaaatacttttcatgccgggtgcagtggctcatgcctataatcccagcactttgggaggccgaggcgggtggatcacgaggtcaggagatcgagaccatcctggctaacacggtcaaaccccgtctctactaaaaatacaaaaaattagccgggcgtggtggtgagcatctgtagtcccagctactcgggaggctgaggcaggaaaatggcgtgaacccgggaggcggcgcttgcaatgagccaagatcgtgctgctgcactccagcctgggcaacagagcgacactctgtctcataaaaaaaaaaaaaaaaaaaaattctcaaatggaatgccatcaaactttccaagctgaaaaaaaatatatactttaaacgttttcatatggcagaagtaaatgactgtaaacatgaatatatcatgtttacatgttgatatcatgtttatcatcactaataacttcttagctaggatgtagcattcttcagagaatataagatcagttacttaggctctgaattgctatattcaagaaaatactaaaagtagcaatagataagagcagagtcattaaagactcatcctgcttactcaatagttaccagcaactactttatattcccattgcctagaatactaacattaatggcctcattagagtaaagcttttccagtgggaatccaccaagatatgcccatcccccaactaagcaataatataactacattttttttaaaaacctgaactttaatatagttgattaatggttgaactaagccaaagaaaaagtataaaatagctgataatgtgatactgggtacatagaacattgtaggggggcagtattttgcctctatcctcttagttttcttaggctaggcctgagaattaaactaaccaaagacagatcaaaaagagaaaagcaaacaaattaatttaatataagttttacatggcacaggagacttcataggaaaacgaagacccaaagatgcagttagagttgaacacttagatattgatttatagacaaaagattagaaaaaatcagacaaaaagcagtaaactgtgaaaatgtgacaaggcaaagaggcttgggctagagtgttttgggtagagaagggactaggaagatgaaggttcatgtttgtacagattttccttggcctcaacttaccatcctagatatgaatgatactttccttctggtatagggagggaggacatatttcacatggaaatttcatccactgcttttacaaaacagaaggaaggtcagagtgatcttcttgcccctgctgtttatcaagtgcctttacctcaaaatagttaatatgccagaatggcatgtttgaggatggcatattcttaactcctgcttcatctttcattctcttaactgacactttattaatcaaaatgtttccaacaccataatggtatgataaatcataaccataagaatccaaccattttcttgatcttttcacagaaattaggttgtctggtgtgggtttactgctatgtattccaatatagtaatgtttttagcattgtttgcctgtgaataacctatattagaaattaaactatcccaattatctcaatgacctaagcatttcaggtatcatactatttatagtatgatttttatatccacattcacagctagcattctaaatgcaatcactggagtaaaaatagattatttacaattgtattatttgcatagcatacaaatttttaaagattctaaagtaccttagatctttggactctgtttctttaacaagaaaacatttcatcctatgaaaccatcagtctgaaccatcagaaaaaagtttttaacttttaattataaaaaatttccaacatctaaaaagtagagggaatagtataagaatgtgcatgtatgcatcacccaggtcaacaatgaattcatggctaatcttatttcctttacatgctgacctatttatccttacatcaaactgtttctaagcaaatcccaaaaattatgttgttattatgtaagtatttcaacatgtatttctaaaagatcttcagattttaaatacttgcataatgtaggttcttgatcattttatttaactctttataccctaccaggaggctggttttataacacagaattaaaatatgctttagaagaactcctaggagactcttcttgataatttacaatatcaacagcatatgtttctattacccaaatattcctggcttcttcaggtactttctggcagactctgactataaaatttttgttctgtttttaagagtaaaaattagaaaaggcaagttataatgtcatagctttaatgatctctagagcttagttttcctccttttctttgctttcaagggggaactgcccataagaagatcaattcattcctggaattgagatgtactgagacaaatttagacatttcactacaaatacagatggagctgtaaacaaaaaagatcagaacatcagaaattctgcagcaaaaaaaaatttgtgattaccacagctttcagagggaagaccttttgaggggagaaacagtgaatgtctacactgctgtccagcttaaagagtttgctcttcaagtctttggacttaaatttcagagagctcccaaataaaagagtagagctatgccatttttacatcagccacttgtttctgggcatactcagaggagaggcattgaagaacctcttcagagctttgctttcaaagtttaattatgaatggaatagcatagcaggaagacagagaaattcaatgtgtgtacatagacctctgtccacaagccaagattttatttccaaaggaacacagggccttctcattgaacaatgccatggttagctcatcatactgacacagggcctgtgccaggacatttaagcctttcgatgttccactattcattactccctgatgcttgccaaagaccagactgagcccattcagtataaacttagtgctgggcccaatcaaaggaggtcaaggaaaacatgaacaagtgttttgtatgcagaatacagtcactggcaatgtctattaatgtaacagttctcagctaattcctctcatttagaaaatggcttttgaactaaattgagttacctctgtgccttatttcaacactaagagatacaaaaagaggagaaaatgtttataattagccattttaaaatatactttgtgatagtaatttcccaagcaatcttctcccacgcttctcaatagtgcatgggcagggaaaagtattggacaaaaagtaccaacttttaattaccacctacactaatctgtggcttttattttaactaacaaaaatgtttcaaagctactaaaaatacagaattgactgtacagggcatgccacttaagtttgggagaaatgctaaggatatactttgcaaaaagttcaaagtagacatcacagaagcaaaaaactccttgagaaagtggcacatttgacagagacctgtgtgaatgggttcacaggttcccagggtggctgcactccaggactagggcaattggtgcggcagggaatttaagtggctggggcccaagtgagatgagctgaattcgtttcggcagcttgtactctgccccaagaaagaaggattaaatacagctctgagagagagatggcaattagtgtttctgtctccaaagagagagattcatggagtctgaatctggagagatacagagggcacaggagagcctggtcccaaaacaaaaactcagaagtgacttagcactatttttaaatgctaaaatcttcagttccgtatctgttttcagtatcaaattaagaatataacttattacaaattttaattttcttttactaaaaatgactttatgtctatcatatttttagaactgaggtagccaaaccatgagtttggaaggtagccaaattcatggttccaatcagacagacctgaattttaattctgatttcaccactaactgagatctcggcaaattgcttaaacctttgtgagataccgattccttatttacacaatgaaaataatgcctacattattgcatttaaagtgtgtgtagcggtggggtggggtatctccattttagcttaggctactctgttggtcagaagggctccagaccacagcaactgtgttacttttggcttctcttttgttttgctttcatttaagttcaccattgcacaatggtgtgtgtagatatacagtacaaaatcaatgcaagacaaaaacctttatgaaaagatacttctgcaaacacacactcagaaataatgcctccatgtgtgtcattaatgtttaaccatctaaagaattcctggcagaataaatatataaataatatatcttataagatagagaaatcttaagacaaagcaattttctcatggcatttttttctgccaataacatttattattctaaacactgtaaagcatagttgacaaactaaaagatataacatcaactaacagcacaaggtaaaatatgttataaacaccacagtgaagctaatcagagtgggggatgatatttgccataagaattactgggtactttgaaaatatgtataacatcttgtgaagctttaggactattccatttttctgtctctaaaggttttattttatgtgagccagttaatctgtctttgctctgcttaaaaccatcagctgtgaattcacttgggtagaatttggaaagcaatcagagcaaaagagacccatttcatcagctttatacaattatgcaaaaggtaacctgtattcagtaatgcaacttctaaaagttcaggaaacttcctgcagcttacggttttaagctgcagccattctgctttccagtggcataaagaactttaacattcaaatagcattcattagaaaattcacaaagtcagaccattgcctctttcaaaaacaatacatttatttgctactgttaaaaataatcttttggtcagtggatcctatcgctgctatcgtcaatgtgaacctttagtataaaatactattaatctaatttaggaaaaaatgaaacagtctttgtgagaatcaaaagtaaacaaatatatgtcaaacaaaaaaaaagattaatttttagcttttatgtcatgtatttttcaggcaatctcatactcctgtagtaaaactttttatttttcaactgtttcaggacaaagaagagatattctctttcatttacacacaaagcttatctttttccttgatggaataggtattttgggaagccagtagggcttttattatagttaaaaggataaaaggtctcttccgtagtttttgtattgactacatgtatttgacttctcaaaaagtctcccttcatttaccgtttctctcagtccccaaccaagtcactgttaaactttttgttgatttaccctttttattcccctctacccgctatccttttccctcattttacaaagtgaattgtgccagacagtatgccttatgctgggtcttctcaaatttctgacatcaattttattctttctgcaaccaattttgttgttgttgttgttgttttttgagatgcagcttcactcttgttgcccaagctagagtgcagtggcgcgatcttggctcactgcaacctccacctcctgggttcaagcaattctcctgcctcagcctcccgagtagcagggattacagtcatgcgcacccacgcctggataattttttgtacttttagtagaaacagggtttcaccatgttggccaggctggtctcgaactcctgacctcaggtgatctgcctgccttggcctcccaaagtgctgggattacaggcatgagccaccgtgcccagccctgcaaacaaatatcaattttacatgcaattgtacttctaaatgttattttcattagaaagattacctatagtgaaaataaagaagtcaatcctctaagacttctcttgaatttatagaacatcacactaagtataggctcaaaatgtccaatttaaccaacaacacttattgagtacctcctacagagcagagctctgagcattcctgatggagaagaacaaaagtttgagagttaagatatagtctctgtcctccaagatgtgtcttattttaattggacgagtaagactaatccacataaaaacattaaataaaaacaaataaaaagtgagtcattcagtgagtgcaatagatgatccacagttttgtgacaaagcaagtgcacaacaacatatatgggatattctcattttgtcaaaaatgtatttggatatgtattttaaaagactggaaggttacacatagagtactttggggagtacacaattatgttttttgttttgttttgttttgtttttttgagatggagtctcgctctgttgcccaggcttggagtgcagtggtgccatctcggctcactgcaacccccacctcccgggttcacgccattctcctgcctcagcctcctgagtagctgggactacaggtgcccgccacgatgcccagctaattttttgtatttttagtagggacagggtttcaccgtgttagctaggatggtctggatctcctgaccttgtgatccgcccgcctcggcctcccgaagtgctgggattacaggcgtgagccaccacacctggccgtgatttttttaatgtatgaattgctttttgtatcaaaaaatagcagtaaataaaaaggattctaatgaatgaagaaagagaagagaaggcttcttggagaaggcgcaactgaagtggaccttgggggctggacaagaataatgggccaggccagtggcacaaagagggaaaaacacaatggaaagaaagttgatggcacttgtgaaagattgtaattgtgtcaatttggcttcaaaaggtgattcaggcaaaactgcggcagaaaagtctggctgctgtaaaccagtgaaggctttggccacatgctgttttgaagatattagatcttgcatatgttctcaaagttgcctttatctgaaaagaaggtaaaggagaaaacacagctttctttggatacatactcaagttataagaataaataagaaaactgtggaaaaacaatttaaatactagaaaagaaaaagagccatatagtcatctcttaattattcatgtatgtcgattatctacttcatttattatcctagacaaattataaaattcctcccaaatggaacagaccagaagacaaactttgcttttgctttcaacttttctgctgatacaactaactttaacattaactacccattacaaagacagaaaggaaatttaaaacgtgtttagggtttatatcttattagggaaaggccattaaggcaaaattatttaatatctctccttatttatttacttaagaaatatgcatcaaagagagagtaaaacggagggagactgaaaaggaacaggaggaagaatctgatcttctaatatattttacatattgctttactggatcatcgccggaaagcaagggttaatcctattttaaatagggggaaactgaagctcacagaagtgaagagaatgatttattcaaggtcattcaagcagtaagtgctaaactgggactcacaccaattcttctaagtttagggctctttctaccataccagaggtaccatctccaccacagtctatagcagggaaaaactgagcatgtagaacaagcaagcaggacaggtttctagttcctctaaatgtgaacattaatgaaaataaaattgaaaagacagataataacaagtgttggcaagaatgtgtagaaattagactcttaaactctgctagcaggattataaaatggtgcaaccactctggaaggaagtctgggagttcctcagaatattaaatgtaaagttgccatacgtcccagccattctactcctaggtatatatccaagagaaatggaaacatatgtccacaccaaaatgtatatacaaatattcacaatagcaaaaaagtagcaacaaccagaatgtctatcaactaatgaacagatgtggtgtatcagtacaatggaatattatttggaaataaaaagaaagtgtgaaagtgaatacgtgctacaacatggaagaacactgaaaacattgtattacatgaaaaaagccaaacataaaagggtacatattatattacagtattccacttatatgaaatgtccagaataggcaaatccatagagacaaaaagtagattggtagttgccaagggctgaggaaaaggaataaatcaggagtgatgctatgggttacagaatttcttttgggactgatgaaaatttactgaaattagatagtagcaatagtgaatacactaaactgtgaatatactaaatatgaatatactaaaccactgtgaatacactaaaaccatggaatagtacaccttaaatgggtgaattttgtggtatgtaaattacatctcaataaagttattttttaaagaggtgaaaaaaattaaaggaaatgctcagaaaacaagaaaaatggaaaatattataaaaatcaattatgtaaaatttcctccttaaaaatctctgagcttaattttatttatttttttgagacagagtctcactctgtcacccaggctggagtgcagtggtgagatctcagctcactgcaacctccaactcctgggttcaagcgattctcctgcctcagcctcccgagtagctgggattacaggcatgtgccaccacgcctggctaagttttgtatttttagtagagacagagtttctccatgttggtcaggctggtctcgaactcccgacctcaggtgatccacccaccttggcttcccaaagtgaaaacctctgaattttaaatacaactacgaaaagtatattattttggtgttttctgttaattagatgaaataacgacacaaatgctttttaactgttaagcaaagtgtctacatgatcagtcattaatttataattcactttcctttgaggcttgacaatttcactttgttagattcctttaagagaaatctcggccaggcacggtggctcaagcctgtaatcccagcactttgggaggccaaggcgggcagatcacgaggtcaggagattgagatcatcctggctaacacggtgaaaccccatctctactaaaaatacaaaaaattagccaggcatggtggcgggcacctgtagtcccagctactcaggaggctgaggcaggagaatggcatgaacccgggaggcagagcttgcagtgagctgagatggcaccactgcactccggcctgggcaacacagcaagactctgtctcaaaaaaaaaaaagaaaagaaaaaagaaaaagaaaagagagacctcattctcattctgttcaaaatcttccaatggctttccattgcacctagaataaaatccagacccctttgcatgacctattaaggcccaatataatctgcctgttggctcgcaccccaaccttatttgctacctttccttccttctctgatttggtctggctatactgccctccgttttgtttctcaaacacactagtgtgtttctgcttcaaggactttgtacgtactgtttactcatttatccatgtggcttactccttgattttacttaagtttctccttcagtgatagctcctccatgagctgtatttcaaactgcaaacatataccccaccttctacatccatttaatctcttatacttttcttaccaactatgtgatgtaaagaatatttctacttgtccattatccatttcctgctggaatataaccccacaaagacagtgtagttttattttattcactgctgtaactccagtgctaacaatagggaaatcaacagtatttgttaaaaaagtagataaacaatcagatgaaccttaatgaaagtgtttagaaaactataaagtatcatgagctctttagatataggagtcaatttggggcacttaggggtgcatatctagcacgtttaaaggtttgatagattcatgaatgaatgaagttgttatgtctaagaataatcatgttaggatagatctatatatttaaataaagacatgggtaacaattactaaagatttcttaatttttcctttagttttctactgtaaaaaaatactttgttatcctctccaattttttcagcactaagtagaacactccttacaaatcctggatctgtgtccttacttaaaacaaggcaagttaggaaaagcacccccattatatgtttccccagtgggccaaaagactcacactttgtttttgttttttttttttttgagacagagtttcgctcttgttgcccaggttggagtgcaatggtgtgatctcggctcactgcaacctccgcctcccgggttcaagcgattctcctgcctcagcctcctgagtagctgggattacaggcatgcaccatcacgcccagctaatttcatattttttagtacagatggggttctccatgttggtcaggctggtctcgaactcctgacctcaggtgatccgcccacctcggcctcccaaagtgctgggattacaggcgtgagccactgcgcccagccaagactcacactttcaaagacctattgggaaagtaaaaaggagaacagtaagggaaatacctgagatttacaaaaggaaggacaaagagtaatggagagaactgatgagggtcaggacacacttccccaaaatatggtaccttggcatttgagaaaatagcagaaggaggaaggtcactctcaccttccccacatcctttttctgaccttcccctgaagcaggtcataagactttcatgtgagaggtgcccactctatatccacaagaaaggaacatcctcatgtctgatgatacagggacacagagaagaatctcaacagacaagacttggtaagttcttcccagtttattaccattagatcataacccttttgtccaatcacacttctctgtattgactgactttttcatcaaacctagcataaaaaatatacaggtttacctgtttctttaggttttaatttccttatgaaagcccctatgtcacataaaacttatatttaaatacatttgtatgttttttttcttgattatctgtcttgttataggggtctgagccatgaacctagtaagggataagaagagaaatttctttcccccacagaatggaataccagttagtgccccactcccagattcccatactgtactatgggaatatttaattacattattgcattagctcaatgtaaacaatgtatatcaatacaagagcaatacatgattaagatgttctgagacatctttgatcacaatactacattttatctgaatcacttttcaaacatcaaattcattcagtccacagaaggtggggtcatggggttgagggagagaacacttccattctattaaaatcagagaaagaattccttttccttataatgaatatttccatttaaaagtctgccatatgactgagtcacataccttcattctcttctaggttacaggtaaataagtgattaagatcatagcctattggtaccacacagcttctaaatgggaagggtgtgcccgtagctcacacctcctccttggccagccaagcaaaactctcactgttctgtcagtactcattctcactcacttgttttaaaatccagtggtttactgggttcaagaacacccaagcagaacctgagcataattttgaattaatctcttataagatcctctcttcaagtttaatttgaaagaaattcatcagtaatatagtctatttatttatattaacaactgaaatagactaaagtacatatttctaaaaatagaatttctgaaatttcttaactagatattaatggaaataattgcggtacatcacagctatgtcatacaaaacaaaaaacctatgaattaatgcatgtattcataaagaaaattgtcacttgaatgtgggaatcagattttaattaatgggctctttttatcaaatttgtaaacagtttaccatttgaaagtagtttcctatttagaaccctagtttccacagaggagaagaaggcacaagattaaatgatttccatttttcgatgctgagtaatgtacaattttttcaaagtattctttattttcttgtttaaaaatttgttattttttatgagaatcataacctgccaatcctactgcagctttctttctttttcagtatattagcatgcaaaaaaaaaaggggcgaatttgtgcctcaaagttttcacagtgccattatttgctgtacctagtttctttttaaggagaaaaagccctgcacatctttattaggatggcatttgattttttgtattaaccttctaaagagtggttaaactaaaatatcataataattattaaactaggtactaagcctccctttcctcctccctaatacattgaatagtccacattcaccagcatcaagtctcttttactaggacaatggcaacaagaaatcttcaacaagtgctggcctgacccctttcctttttctacagttccagctgagcagcaaaaactgcttgaaattcagcaatcacatttctcactgtttcagaatgacctatttcgcactagaatgaaccagtgaattcatacatataaataactatctgcagaccctgcttttcaaaacatgaacagaaataagtaaaaagaagaaaaaaaaaagaaagaaaagaaaagaaaaagaagaaagagggagcagcagttacaaataaaggtttgattggattggtatttttcaattgtttgatatgataattggaaacaaaacaagactatataacttagatatcaatgttacatttaaagttttttggaattgtcaataaataatattcatgatagttcaaactgaagtcagattatttttctctaaaacacatcatcatattcttatttatttaagctatcttgggaactaagagaaaaggctgtaagcatttcttagcagaatatgcttataaattagctacactatcattcattcttaagtatttattgaatgctgtatacaagatctagttacatgctacatcctgcaaacacaaagtttctaagaccttctgatctctcaggataatccccaattataataatcttttaatctcagtcagtgtaaaaaactgtctgtacatgctagctttttcaactaggctacgggaccacacttgattcatctctgtatttccaataattaataaaatcctattacataattaactctcaataaatgtttacaaatggattgattacttagtcactgcccttgagcttacagaagttcaagcagtgttcagagaacccagtatatagatcatgttagcactctgtcataaatctgttgacacacattgaacaaggggtaatgctgcataataatatctgagagaaaggagacaaatgaggacagccatatacataagtaaaacgttcaatgcctggagagagtttctggatgcggcaagggaaaggagatcccaaacaggcccaacagtcttgcttggcttaggagacagagtttagggctctaggacaccaaggtgaccagaatatgctgggaagagtgccagaaaggaggcagatgcacagaaagggcaagtgagcaagctctggagataggcacagtccaattgagtctttggttgaatactggtctggtcacataaaaaagaaaactactgaggccagagaaagaaccatcattaaggaataagtgggaaatatctggagcttaggcctgggagtacttgatacttccatgagcttggatagaaatgacctgctaattcacagggcattgagtcaaggactcagaagggcaatgcctcactagtgtggctgaattagcccttgactaaacactgttcaggatttacccatcaaactgtgcccaagtaactttaattcttcccagaacaaggcccagaaatatttaaagaattttttaaaaatcaataccaaacatcgtcatattcacaacgttggtcatctggtcaaaattactaggcatgaaaagaaacaggaaaacatatcccatgaggagaaaaaacaatcaatataaatagacatataaatgacatagatgatagaattagtgaacaaggcatttaatcaggtattaaaatatattactgctcaagaaggagaaggaatgcatgaacatgatcaagagtgaaatgaaagttgtaaaaagatccaaatcaaacttctacagatgaaatggtatgctaatatgcttcaaggtcaaaatattataaatttaacaaatattgtattttcataaaactttacttcctctggtatcttctgatattttaactgtaaaataggggtaaagtgggagtagacattatgtcacatctcactggtcccaaactttttcttaattcaccattcatattcttaattaatctttctaatattcttcatctattctacctccatttacagacagaaagtcatactcctaaaattgcctagcatacagtgatcaagttgactgcaatctagagtttgctaataactcacccagtctttctcatacttcttacttacacccagaccacttttatccagacttggcagtattgcagggaaggtatgggcagggcatcagagacatgcattcccatctgagctctgcctctgtctgaagaccacatgggcatgtggctaacctgactagatctcagtctctttattttctaagttaaaagacgggatgtaatctgcaactttaaaacacactttaactactgagcctttaaatctaatatgcaagagagatagatgctatgctaagcttgcattatgtgtatatatttaaaaaaacaatttttccaacatatgcacatgtgtatatatgctatacacatatatatatataaataaatttttcttccagtgtatcgagaatggaaggaaatatgaatgggggtaataaatgtgagcaaatccagtaaagtaaatgaaaattatgggcaagtggacagaaaaaaagtaattctgagatgttctccgatggaggacagctactgaaggactctcagaggcaccattaaaaagtagtaaatctctctgagaaatgtccccattgaactaaacactcctcacattaaaaatgtccaattttaggtatacctaaattggtaaaatacctaaatttaggtattttaaaattctcttttcttgttaatctggaaagtctatccccagaatcattctataccatatatccgtctaatctgacataatccctaaacactacacttgaaatagtcatgccaggaatgaagctgtgtgtaactattcttcagaaaattggcttttcaaaagaaaatgtgcatcagaattaaggcataattaattaagaaatatccatttcagtttcttctatttttagaacttttacacatagaacaaatgtataattattaattttgagtcatttaaacagaataatcctttgtatgtctctttcagttatacaaaaagacttgtggcagtcaactatttgcattacacagcagtgctgtatatgaaggtcatgaagctaatcttcattatcattctgtaataaataaacaagaaagtacccctcccgaagagtttatactccattgtacgaacataacatgtacatattttacataatccagttcccagaactttacaattgtttatttattgtgcatagtaaccatttgcttactcttaaagtacttctgatttgtatcttagtgagtttattccattcaattccctataagttgtctcttgtttccaaattattataaattcagtatgacatcaagcataaatcatcatttatattgagtgttattgttaatgaaagacaattaggtatacatcaataaatgtctgattcaaacaaattaggcaagaaaataattttatagccaataatgagaaataaagttgttgtgtgttcagtagccccacattctttgtttgtgatggtgtaggatactaagtgacttttatattcttatttgtggacatttgtttttcaaactatgtatatcagaaagacattcaaatgggcaaaatttaccctgatactgagtggagcacacaaatgcttggcacattgaaaatgcttcaagcttggttggcttttcaatgcctgtaaagagaattagagataggccactgaatgccaatcacactactgcatctattcaccacatttaaattcttagggtgaacatatttatcattggcttgtgatactacatcattttttaatattgctctcaagctgctggatagaatttcatgtcctaagtccagagaaacaaggtaaatgacaaacatgttgcagatttcttatctggaatattaacagagtgtctctaatcctatacagaaatgtagtccaaaaaatgtagtgatttcaaaatggtgtgcactcttttaagtgtatataagatcataatccccaagcaattttttaaatgactgcatcaatgacaattgggcaaattcaagacgtatttaaagaaaacctgaggaatgattattaggaaatataggaaggtgtctattgtccaagtgcaataaactgctagaacagtaagtactcaagtaaggcaaacaaaagtattcacctcttcctagtacccagaggaaaatcagaatgttcaaactaggaggaaaaaaagagaaacaggagaagcatgggctttattcactgtttttttaagcctaagtcagtttttaaaatatgagaattgagtatgtaggtaggttgaagctgatacaaaaaaaaattatagtatttaaaattttttttaaaaaagctcacgctatcatatatataaacttagtccttaaattctagaacggaccttattttttacactaactgtttctatgtaaatctcattggctcaattcattacaaaattggtgaggtaggcactgaggcaaattgaaaaggacaggacactagatagaagtggtcgtcaacactcagttcaagctgctgggggaaaggagaaatgcagacacagtattttcacatctttccatctttaagaaaaaaaaaaagaagagtaaaatctcccagtttttaaatatttacaactaattaaaggttgaaaaagttatttctctgagtagttctacaaaatgacccacatatacacaccatgtcagtaaagagcaactgagcaagatgaaaagcagtaagaattagagctatcagagatcaaagagaaggccccaagatatcttctcatctggccccctgcctgcagacaggtaagatattcatctactttaaaagctgaggcagtcaaggctcaaagagattaaaatgagcttgtccaaaatcacactgaaagtaaataacataacaggctgaccaccttccatgactgtttttgtttgtttttaagctaaataaccattggcttggaaattttactgaataagtcatggcctgagaaaagatgaaaagatctaacaaaaattttgaaataaaggtgacagtgaacaaaatccccatagaaagaatgtagtaaacaaaaaagaaaacagaaacaagaaaaacactaaagttaagaaagcatataataaggagcatagtaagggtttctctgccttatatacgtaaaattactaaagaatagtggtctaggagaaagaacaacaaaatataaagcagatggagaatcaagttaggtagttacgaggttaatatgcaatccatgggagggtagtgaatatcattaattcaaatcgggcaattaaaaataataaaatagggtcatgtgcagtggctcacacctgtaatcccagcactttgggaggccaaggagggtggatcatgaggtcaagagatcgagactgtcctggccaacatggtgaaaccctgtctctactaaaaatacaaaaaaaaaaaaaaattagctgggcgtggtggcatgtgcctgtagtcccagctactcagaagactgaggcaggagaatcgcttgaacccgggaggcagaggttgcagtgagccaagatcacaccactgcactccggcctggcgacagaacaagactccgtctcaaaaataataataataataaaaaaataataataaaacaagttaataagataaagaatgggatgatagatgaataataccgttttcaaaagaaattatgtgcacataatttcttatcactcaaaaaaacagctcagatagatccatcctgggattaacacccaggtatttaattcccaatctggccagcagccttgtatcctcagctttggcaggactgagagggtaattctctgccctataggtaggtgactctacaatcagaaaaggggagagaatacattaaaaaaaaattggtgaaaataattttcataattttgttagggctgtggatatttcatttgttatttcaagtgtatgaaatgtttaagagaatctgacacattgggaaatcgacttaaggcttgtagtttttatttaaaatatttagagcgattcactagtagtaatcttgacattttaattttaaatacttaaggacagtttgattgactaagtttatatacagtgtttaaaaactgattgactaatgcatacatttggctttcatgtgaaagtggtgtttaagtgctcaggaagacttgcattagatttgtaaggctgccttcccagagattgagagtgcttgggaaaattaagcatattgggggttacaatttgaaaagtctaaaggaatgcaattaatcaagtttgaaaatgatgtgaaatgtttaatagaatttagtctctcaaacgtataagctaactgattgctaattaaggaacaaatgaaaaagagtgttttaaatataaccccaaattactagattatgaataaaataagatttataaattgagcttaaaggcttatgaaaacttggctttataatttaaaatttttaaaaatgttaattacaacacagtaactatgagtatgcctttcacgtacaaaagaccctcaaagattaaaatcccaaatgactatgaagatgacattaatttctctaatcaaaagatgagtatttttcaaaaaacgttgaggtattaataggtagtccatgaggaaaaggggtctgtggtttggggggcaaaaaaagcacaagaaggagctactaactacaccccctctcggaaatccctggcctatattataaaggttttgagaaggcctgcaattaagaaatgtttcatatttcagtttttgacacaggagttcacggatgcttattaacatcttgcagaactgccagagatgctctagaaagcacagtttgggaagccctacattagatagctgagaaaaaactccttcaagtattcttctttgtcagcatactagaaaccgtaaggaatgaaaaagcaggagatggagggaggttgaagtttccattatttggcattaccacataatacctggcaggtgggctaacttaatgatatggtatagttctacctcaggattttttcatgtattcccagggtccaaagccactgtttgtgctttcctaagtataacacttgagcctgttctcttcttaaaactccatgcatgtgtaagattttcactataacctatatcctggatgactccaaaatccttatctccagtcctgacttccatcttcagattcaaacccaactgagtaagggacatccctgcctggtggacctacaataacttcaaattcaacatgttcaaaactgagtccattcttttccatccaaaagttgtttgtgctgcaactttccacagttctgttacagtatcccatctacccaggtgctcaagctaaaaacttgagaaaattctagagtccctcatctccctcagcctccacatgggtaagatcttttgcaacacatccttgatcgcacttaagttcatcctttcctttccattttggttttcactactgacatttaggatgtcataatttgtttccctggacctttgcaatcttctctggtagactgtccttcttatgatcttcctctgtagtccattgtatgcaggtgtttttaattttgttttttagtgtaagtcaatgtttccccatcatctatatataatattctaaattcttggcataatatccatagtccttcatgctccaactcctacttacctctctagacccctctctcactatcacctccaggcttatgctatgttctggacacatccaacttctcgcacttccaagtacacacagtgatccttcagatctattttacacatgtgattttccttagaacacccttactatattctcttctcccaaaaaactcctaactcatccatgaagattcaaatgagacgccacctcctctgggaagcctctcctatcctttacatatttccttttttttctggcttagttcaccacattttattcatatatgcaaaaggcactcatttcaaattgctgcaattatttgctttacatagctgccatacccactaagactggaacaacatggaggcaaaagaggatgccagtatcttattaaaaatataaataaattcaagagaatgtgacattccaatagcctcttattactcttgttaagtgctcagggtgaggactgcacagggtcagatgggaagctcctgcctgaccctggcatggataatcatgtcctgaggttgtgcaaggggaatgccactagtcccaaatcaacaagctcattctattcatagcctggaataaattaggcacttcagggaatggaaactgctattctccccaggaggaaccagggctatatgagcaggtcagagtacctgccttgggcatgtcaggtgcccagccagctgtgaagttcttcctagccttgctcagttggaagcagcataatagggcccattgttaacagaaaatcaggaccctcaacttcagaaggaatatatttctctttctctaaaactcaatgaagaaagttctggaatataggccttaagcaccaatgaaattgcagcattcatatttttgtcagaaaattaaataagaacatctgatactctaatgaggaggaattagctgtatagtaacttgttactttacttagacattttgcacaaggttctatgtaaggagaatacacaatctactcattttgaacctatttaatcccactatattataacaatagcaattcctgatcatttccctatgattttaaataattctgtagaacaaaatttagtaaagattaacctgtgactgaatttccatgttacagaacttcaggaaataaagaaggtggcccacaaccagtggtatctgatgggtcacccattggctccaaagcactgcttgatcaggccctggcattagacttgcttcatagtgtgcattcattattactgcaaacacatgctgcacttgtgctctttgtgttggtctacaattaacttttgcctaccttcattcccactccaaaaactaggcactaggtgaaacgaaactggcttgagaacagcatcttaatgtgacttagaggaaaacaaactctcgtggggaaggggaaatgcaaaacattcccctattccagtgttttggaacaaagaggttgattcatagcctaaataaaactagtttaaatcaggtagcaaagcaccacttattatccaaatttaatgaaaaagtggcttataagatggaagttctgtaaataattctattgtgtttaatctcacctttgtaagagatgatgtttcagtttgaccattatataactaagatatttcatagaaaacaataaaaaaccattttaactgcatgacacagataaaaaaaagctctgtttactgaatgtgtacttggatgctatcaacaattaagaccatgaagttcctatatcattgagaaaaatttaattgatacaattatgagtttatagtttgatctaaaagtttcactggggctgggtgcagtggctcacatgaataatctcagcgctttgggaggtggaggcaggaggatcacttgaggccaggagtttgagaccagcctggtcaacacagcaagactcttatctctacaaaaaaacataaaaatcagccaggcctggtggcatgtgcctgtagtcgtagctactcagaaggctgaggcaggaggattctttgagcccaggagttcgaggttgcagacagctaggaggcagagcaagactctgtctctaaataaatacttgtttcactgatgtatccttagtgcctagaatagtgcctggaagcactcaaatactgattgaatgaatgaatgcttatccttaatcacaatatgtattttttttataaaaaaagaaccaaaaacagaacaaagtttaaaagctcagaagaatacaggaatttgagattcagtccttcaccgttaaataatttctaagtaaacaggctataccgttaagaaaatctttttggccgagtgcggtggctcacgcctgcaatcccaacactttgggaggctgaggtgggcagatcataaggtcaagaggtcaagaccatcctggccaacatggtgaaatcctgtctctattgaaaatacaaaaattagctaggcatggtggcgcatgcccatagtcccagctactcgggaggctgaggcaggagaatcacttgaacccagctgacagaggttgcagtgagcagagatcatgccactgccctccagattggcaacagagcaagactccatctcaaaaaaaaaagaaagaaaatcttgttaatgttttttggcaatggaatacataaatgacaacaaataggaagcacacatttatatgctctacacacaaagtcttgacaaaaatgtaaagcaaggaggaaaatctttctaagttatacagaatgagtccatgcatattttaatataaatgtttattatatggaaggaaaatgctacataaatctaattgatacaaaaatatatttacaatttttttttttttgagacagagtctcgctctcacccaggctggagtgcagtggcacggtctcggctcactgcaagctccgtctccagggatcacgccattctcctgcctcagcctcctgagtagctgggactacaggcacccgccaccacgcctggctaatttttttgtatttttagtagagagggggtttcactgtgttagccaggatggtcttgatctcctgacctcgtgatccgcctgccttggccttccaaagcgctgggattacaggcgtgagccaccgcgctcggcccaaaaatatatttacaatttaaaagttttctttatcttatttttaaagaggatgacaagagatactttgttactctgtatttttaacatctactccaaccccaaaattttgcttttatttgaaagactaatactctaattctaggcactagaaaacagatggaatcaaattaataaatattaaaaacatctttgaaaggcaatgaaataatattctctaagttataaaccacattttgaaaagggcttattatgtaccaggtactatactaggtactatatatatcataatattaaaatacatagtttttatataatttatgaagtactaagtacaatgcacatatatttgattctcacaaaaatcctacaaagtagatgggatagtctccattttaaacatgaaaacgctcaggcatacagatattaaataacatgctgttaggtcacacagctaatacataacaaagccaggattcaaattcagggtctggctcttgatttcatgttcttaaccacagtactatacttcataaagaaatacattttaattttttgtgaaaatatcacaaattaagtatattgttacaaaatgtaaagataatttacaatcttttaataaatccatttatgaatttcccttaaaatatggacttatgttttatggtaacttattttaccatgaatgggaggtgaatgcatacagcaggaaagaaacagaaataatctctagagagaaatgagtataattagaaaaccaacattacagaaatgtaaaacgaatgccaattgtgtattcacacaaaagcaagacattgagtaacatatactcaaagtcagggaggcaaatgcaaatgactcttaatattgtctactgaattatttatctgcaaaaagctttacagaaaatgcccacgaggaactgcccagacagcactgcctctgcctcttcctatagtatggtctcattcctagagcattttggaaaagcatgtgcaagaaaacaacatgttcctcgcagtcacctctgattactggcagtgctatcgcactcattagcctaacatttagtttataagagcatctgcttctaataccgccaacacatgaccttaatctgtggccaaaggctagggctgagtgatacaggcattatttctcaggttctagtgtgatttttactttttattctttggctgcatataaaatctcctacttctccatactagatcttttaggaaaagtttttctttttcttgttgtgtgatggtggttgtgcatgtgcttgggtaagttttttgtcttttgctttttttaattgccactacacagttttggcaaaaccatttacaggaaagttaagtttccccaagaattgctcaaatatctctattttcaatacagttttatcctgaaagaagtgcattagactgtcaattttcctcttcccaccttttctttgcccccaacacaggcaaagctcttgaaagcaagatcgagcaactcttaaaataattgagagaaactacccaaagatcagcaaccatgtgtgcaagccaattcctaaaaacaaatcttaaaataaatgtcactgtgggcactgaaatatattcagctactatgttgatatttccatttgaaagctttaatataaacaaattattttctagtgttttcatgttactaaatctttagtaaagatatcactgagtcttttccttagagcttacgttctaggatgaaagaaaaaaaacagcaatctgaatgaaagcaaactttagtttcatctcatttcagcatacctcaaactgtcatctcattgtcacctttcattagctgatactccctatttctgtgttcttgtctataaaccaatggagcacacacaaaaaaaatcactgcaaaatatgagatctcctagattctcctattgagtaatgggaaagtaaaacaaaaacttaacattcctaaatgatccgtcaaaatcagtactttcatatggaaaacataagacaccactaacaaaatgaagaattttaattcccacggaacctacggctgagagttcttctcttgatcccaactaaagatcacctaccaaccagcattctttttgagaatatattaaagatacaataagtttgagtcagtgactggcagtttatttagggtaaaggatcacttcacactcctgttgttgacattagtaaactgtcttaacaaaataagagaagcatatttactaatgcctaatttagtctatgcttttaaagttttggccaacttcaccaaatgagtcctacaaattcatcttaaacattgcaaatttcaggtcatctggaggttaaatgtaaactggaagaagaaaaggcatttatattcctgaaatgaatatatattaagcatggcaatttcataagatatgaaatatgttaaaaaaaaagaaccagagtgatgcaggaaaacttattttaattccattcatgcaaatttctaggtctttgaccttggcatattttttaacacttctgggcctcagtttcttcatatgtaaaataaggaggccaggctgttataaacactatagggtttataattacttaaaattctaaaactccaaacttaagcaaattcaagaattttaaagaacaaacataattacaggcatttaagcccaggaatgactaaaccagactactacaatatgcaatagtactgaaaacatttcattttggctcaaaatgttattccactttaataagagtgctacccagatagtaagcaaatacctgtacattgaaaatatttttacagcaagcataaacagtttgacagtaatttgtatcattctcacgggaaaataacttctccaatctcatctttctagtctatgtagcaatgccaatttataggcatataaaatttgaaatctcttctgtgcatcaattataacttacgcagctccctgagcagcatttaaaaagcaaagaagtgcaaacaatattctgcttgctgacatagtaaaaaatttagctaacatagctttacaacttcacaatttaaccgcaatcaaatatccccttttcaagaaaggaaaacgactagggcaatatcctaaatataaaaatccatgttcaactaaaccatccctgaaattatctaactagttgttcaaggaaaagggctacagtttgaaaacctggctaacactacttctccttgttatctaggtaccagaaactacaaaattctgtattttattaaaaaaaaagaatgcttgaaaccaaagacatacaaatttaagcaacatactataaaaataaaatgtaatgcaacataaatgagcaatcttaccccatttatcttgatgtgattattaaacattatacgcctatatcaaaatatttcatgtaccccataaatatatacacctactatgtacctgtaaaaattaaataaataagtaagggatagtaaacattagggctttctctgcttgtactatacagaaagatgagataaagctacataaaaataaacttggaaggattgaaagtttttaagagttccagaagaatcaataaaagtaggtcacgatcaaaactgaacaaaatggttaacacttgtatcagctagaatttaagttatcctgaaataagaacttcctaaatgagatatttagaatttatattttatgtattagtaacgataggagtattctatggagggtggcaaggaaggagtagataatgaaatgttttagatctttgaaaaatggcagatagttttgatggaacgtggtagcttgggtgggatatgttaatagtaatttgggttgatatttacatatactcttcattagtgttaccagaactatgttatagttttgtgttggaggagatgatcctttttaagctggatgtgtttatatccagttattgtgtttatattcatttgtgtttatattcaattatcattcaaaatatatctaaaccccaaaaagaaccagaaaatctatttttagtcgtatatgcccttctattttcctgataaagtaaccaagtgaaacataacacctgtatattctttacggtccaaagggcccaaagagtcaacaaaaattctaaaagcccacaagtggaaaaatcctatttctcaactccttaattttagattgctctgatggaatggggcttttgagaatttcctctagagcaatcatgtgcagttataagaggtgcagaggcaagtagtttctggccagctgtagactagagatagtcctaaggtgccctgctaatagcacatggcttaactaaaatacagagcataatttagcctctaatttgatcagtttaaaaatcaggcaaaaaaaaaattgggcactaggctagaacctggcatatgagacatcggtccaaaggcacattttcttagaaactattttggaggtcttgtaggtgaaactagatcaggttcactcacttccctctattttcatttaagattcagtttcttttgttaaaccactatgcatttttttaaaaatcacctgtgaaagtaataagcctaaaaatttcatccaattcaaatcagactatatttacttcagattaaacatgattttattaacattctagacagctaagaccctaaaagaagaaattgacagtttatatttttaccatcaggcataggttattttatatatgtgtgtatatatcattaattcttggagcaactcatgctatataagattatctctctgtctctctgtctctctctctctctctctctatatatatatacatatatatatatatatatatacacacatacataacatgagtcagctaaaggcctattttctaaaagaagggtcagatgacaaagctcactgactttaaaaagctttcacagcacaatatttttgataaaaaggtttagtctattctttaattcacctaaagatacatttagcaaaaaagaaaaagaagaaaaaaatgccattgagagtcaaaagaaaatatcgtgtcaactaaaagtaaaagcaaaaataaaagaaaaaatctcagtactcactgaatactactataaacatcaaaaaatttccatttaaagtcaccagaaacccttgggttcctaatacaatttcatccaattcaaatcagactatatttacttcagattaaacatgattttattaacattcttgttgtttatgtgtatgttttgttttttagtttgcttgtgcaaacaagaataaggagaaagatatgcacatgaaattttctaaagccagttttgtctaagaaagtaattataaatttggaagacaccaacacttatgtctttgtagaagtgctttcaaattgcctatcatcctcactatagtagaaattaaggctatgatgaggcccacagtgataaattctgatactcaagaactacaatgatgattaacatcaaaccactgtcattgtcctgttcaaaacatagtaagaaagaaaacagtgtagaaaagctgtgctggcacaaggggcttatgcattttttattccctttatgaaattaccattagtgctcttctcttactcatataaataaaatgcacagtcaaattggcataagtgacaggactttgggtttcaaagattatcgacacataatggttgttctcttggggaaaaggagatgcttatattaaaaagatgatgagaaaagagagtgcttaggacatggaaggagctaggaagggggaaattctgaagcatggtattgtttccaattaaaaaaatctttaatagattttttaaaattctgcttcaaaaaatctataggtaatgtgatgtaaacttgaaagcataattttaaacattaaaagaaaacttcccaaatgctgatagctttcaatgaaattaatctaataaaaaacaagcatgaattaagaattaattttttaatatgctatgtataaatccatccaaacagtgacaaaatctttgaataataaccccctggtaggattttcaaatcagagttgtacattttcataaaacaatactttttttgttttctctacatatcagttaactattaagaatctctcactgggtgcagtgcctcatgtctataatcctagcactttgggaggctgtggcgggtggataacttgagttcaggagtttgagaccaggctggccaacaaggtgaaaccatgtctctactaaaaatatagaaattagctgggcgtggtggtgcatgcctataatcctagctactggggaggatgaagcacaagaatagcttgaacatgcgaggcagagcttgcagtgagccgagatcatgccactgcattccagcctgggcaacagagcaagactccatctttaaaaaaaaaaaaaagaatttgtctttaatcctgaatttatcagaaaatgtaaccatctttcagtaattattttttgttttcactggatttccatctgtgatggaggccaatgttcctcatttgaggtatcattttctctaatatgaccagtcagttgtgctactagggattttttagtcaactagcctacctcagtttcagtaccaaaaatgctattacattacaaaagaaggttataaaacagatgaaaagtgaaagggttaatataccaacaataatttgtcaccttattataacttgtcctggggcacatagaaactctatgataaaaacagcaaccaagagagcttctcctaaacacatttctgatgatttgtcatgatagctgattaaaataccaaattcaacaagagtctacaaaacacagttaaaaattatgtgaagatctacagcacaattttatttcaagcagtttaaaattttaatgagatatagatcactcaacactagctaaagaaagcaactgggaaacaccagggagtagagctacccatgtatatttctataggaaatatactgtaaggaaaacaaacttttcaaaagtatatataacttcaacaggaacaactagatatttaaatatgtgcaacaaaataacgagcccaaccaagctcaattactacatttatgttcatggtatgtaggaattcacttccctaactatttaaatgggattttttggttgacatgatttttaggtagattttataccaatcatgactgagaattacatactcagagaattgtatcaaataggttgacttaaaaactcattcaacagtcttgactatcattagtggaaaatctgaatttaagtattttcttttgatggtaagcaatcaatctactgttattgcatcctgatggagcacgtgaattaaaaatgagaaaaccaaaagaaaggttctttcagcactgtctttgcaagaactgggattttaccaatttgttctatagttgtataggctgtcaagtattatgaaatcaatgcaatgtattcactagttgtcactcacaggatgacagtattgtaaattaagggaatgcatcttcaagcagggttgcatacacatatttctaaggaattcatctgtagtctgatttacactcttaaaatagacaacctaccactatctgttgaaaagtctcacaggtatgaaattgtctaattgaatatcattttcctttagaatcaaataggctcccatttagcttcaatcactttgcagatttaaccttaatattttctatacagtgaaaacgagtcaaaagacttcaagaatcattttgaataacattacttatttaaatatgtctctactgagatgaaaattactgagtaaaaatatgtcatggtagttacataactcctgagaatatatcaaattgcattccttatagcagtaattcattaccacaatagattgctaaaatcaattctaaaacctgaatagaacaaagattttcaaaataaataaaaaaaattattggcaggtaaactaagatcttttacatctaaaataatggttaaattaccatttttaaataaggtttttcaagaggctgctgcagttctttttttaatctaaataacccattttttaaccacatttacttaataatctaataaaaagtgaccaatgtgataatcaatacaagttccgataagtctctataaacaattacattttttatgacttttattaaaagagcattttaaaagaaaaaattgtttcaaaggaagaataatcatacataaactgcttttatttttaatgtttcctttaagactttgtcatacacgtttatataaccatgaacatagtaaatataatttacttttaaaatataatttttatcgtgggagagaaagaaaacattaaacaggtttggcgaagtcaaaactgagacttggattaggaaagaaatgacaggaaaaaaaaaatatccctttcatatgcacatgcaaactctaaattctaacccaagaagcataaaacttaaaattaacagaaaatctcaaatcttagtaatcaagaagctctgagtgggagtggaaaataataatgatattcaaaagtatctggatatagtaatataattttaggacatgcctctaaatagaatgattactacgcctttgaataagatgtcaggggctgttattatatacaattcagtttaaatgaataaagaaaacgaaaagtatcttttcaagattttaactcgggtagtaaaaatgtaaaaacccagaacaagctcatttgtaaagacagcttttctgtatgctgaaaatatctcaaaccaattcttttccaatgctgccttaaaggaacatttattaacttctaggttgatagatgttaaagaatgtctgctttaatatcctactttatttttttaacttttatagactgtcaattgtgttctaactgcataagatttatgggctcaaagatggcacaaccacattagccaggtgtgctgagattaggatagctcttgtaagttcaattaataacactatattattgtgtcctaatctaaaagactgactttgaagttctggtcctcattttaatatatttctcatttagattttgtttctgaaaaaggaagatagaataagtaatttttttcattgctctgaatttttcaagtctttctaaaccttcaaattttagaaaaatagcaaaactcaagaaacatagttttcatatacatctctaagcaattctcaactctgctactgaaataaataacatatttcaaacaggaataggaacaatttgcaggtttaaatctatgcttgttttatatctattctgacacaaacttctttgttcaagttatttctaaccccagtaaattattacttcctggttacattaaaaggctccttgagcatctaatgaatcttaataaacgtgtttccttgactattcaccagtggaagttctgaattctcttataaataaatctgtgactgtttggtaataatattttgctataagagtgatttgtgaaaaatttgcaaccagcccaagaattcagttaccaaaatcacaaatgaagagacctccagagtcctcattaataggatgactataaacgatttaaaattgcagtgaggtggatgcttctatgaaaagataacttacatgggcattattagttttaataatgagaacctacaccttagaaggaaaattctaataaaacattccattggggcttaaaaaacagggtgggatttacttcttaccaactaatcaccactgtgtattcccttatattctcagagcagcaagagaccactttttcatcaaaacacaaatttttgctacagaggaaatttcaaacactgattgatcagtaagaaaaaaataattattatagtatttgttataattatgaatgctaattattatatggctacagtaattatggtttcattataacttatagctttctcttataatttctaaaaattatctcaataaatgtaaaggctaaatttcagggttttatttgtataaaatcattttaattatttaagagtaattgacacataaatttgcatgtacaatcatattcaatttagtattctactaggaggataaccatgagtccttccaaaatgaattatattaaccttgactgaagaaagtcctttttttttttttttaggcggagtttcactcttgttgcccaggctggagtgcaatggcatgatctcggttcatcgcaacctccgcctcccaggttcaagcgattctcctgcctcagcctccctagtatctgggattacaggcatgtgccaccacgcccagctaattttgtatttttagtagagacggggtttctccatgttggtcaggctggtctcaaactcccgacctcaggtaatccgcccgcatcagcctcccaaagtgttgggattacaggcatgagccaccgtgcccagcctgaaagtcctttttaagaaatgcaaaagtgtgaagaattcacacagctctgttaaatcaaaattatctcttacagatagtaatgaccacaatagaccaaaatctgtgtttgttattagtgttatatataaaagaacagaaacccctaattacttaatacactaatgctctcttcttaatagacattaaccaaaatgaacactatttaggaaaatgtgttctttttaagggaataaataatattttgctctatataatatgttgtatgtataacaaacattgaaaaagtatgtaaatagtattttctccttaaaacttattttagagaaattttattttctaatggatttgattagcaagtacaaaaatgtctgcatttcagtgggctttcagtaaacaatgatttacaaaacacctttgccttcattattacttcctcttgacagacattttatttaactatgtaataatgatggtcttaccatacaaagaagtatctgatttcccaggtcaggctgtgaaaacatcactatgaccattgaagtttacattgccagctctcacccacactccatatttctaaatatgcataagaacatctccatttggatgttctgcatcagtttacctctaacctggcatagaaacatggaaccaaaagaaaggaatgtcatattagcaatgggaaaaataagaattttaagggccttcaaagagagaaatggaaatggttaagtaaagtgtgataaatacccactccaacgcatattgggaaacaataatcgtcattaatatgatcactgaagattctagaggaacacgaaggcaaatagtaaaactatacaagcactatgatgacaattttaaaagcattattcgtaaaagatgtaggaaaagcatcaaaaaaagtgaaatttttgaagtaaattttaaacttctcccataaaccacctcctctttatctttttctatttgtgtatctaaaattttttatatcaagtttggctcttttttttctttcaggggtctccaactagtactatgcatgggagaagtggccatgaatgagatattagtacactgtatttaaatattcatagtttatgcatttgaattctatgtgccatgttagccttacttataagcagcaataataaactatttgaaattatgagagaaatcttaagtatttattttatttactccattcagtcattcaatcagagcacaaataaacagtgcattttggagactgaattttaaattccctgagaacagcactgaattctcagtgcctaccatgatgacaggaatcaagacagcatgcagagatctgctggaagagagaaagaaagaaatggagggctgagaagaaaggaaggaaaaaacgttggtctataggaaagcaaagaaaaggaagagaaaaacataaaaaaagaagaaaagacaaaaaaatgtaggctttggagtcaaatatctcagctagaattccgtatctattcttactgactgtaaaatttcaaatgtattttaatttttatgctcccatttccttgtctgtaaaaatgagtcaaatgagttggcacacgtaaaacattcagcagaagtccaatacacagtaggtattcagtaaataccagctgctctattaatgcctcagtacacttggaagaatatatatttttaaataatttgtaatgttctaatactacaaatttaagtactggcagtaaggtaaggttaaacattggctgtccttattagctgttttgaagatatattaccattacttaggaaagcccaaaaatctagcttcattttttccaaaaatggcaaaaaacaataaatagtgattctcaagataatgccaatggcaaacaactctagtatttgctaaaagaccacaatattccactaaagggaaattatgtgaacaaaaaacccccaaactcttgtatttcatctcaaaattgaagcaaacatatgaacatatatggagttgtaaatagagagaatccatcaggagagccagagtgagtcctctgttttgttttaagaaattatttcataatgcaaataattccctattcactttgtctggtttttacttctataatttaatacatgaggttttcttaaaccggggacatagttgtatttctaaccataagtttttaaataacagatagatataatttcagaaaaagacacataaaaatccaacaaatttttcccccaaaacctcgtatctgaactgcagcaactctttctgggataataacagagttctctttccaaaatgggcccagctcagtgtaccaaaggaaagaaaaacagttgtatcaggagagataccacagaggactaacagtgtgacaagagtaaatattggaagaaattttccatgaagtagaacatttgaaaaccatatgtatgtgtagtatgtgtactatattgatgtatccgctggtttccaatcctaattccaacatcctccaggctcctgaattccccacaggttggcagcttcttctgcagaaatcctcagatgaagatgctttgtcccccacttacaaattaagtctttcctgcatttgcttttctttctcttccttattgacaaaaacagctgctatggaatttgtagtgtttaataaatttgtattttaatgatgacatcttctaaatatatttttgtcattatatgtttaaataaaaagtattgctgttatcccttatgttccaaagaaatctgatcagaaactcacagcctcaaaaagggtagcaatatatgtagtggtagcgtcagaatttctttgaagaagggatctggggacatcaatcaggtggaaggaagagtaccaatggatatcatcttactgctgtgctgacacagctggcccatagcttttataagtcatctgtttacttagcatagatttggagaaaaaaagctggtggtagttctgagaggggctaagacccacaaaacactccttataacagctccttcatatttaaaggggaaaactttcaatacgaactaggagtgaaggtgggaacaaggggaatatttactcccaagtgctgtttctgttcctggtaatttcacccttacatgtaaaagggtaagaattatgcaagcatctggatcctgatgagaaaccaccttaactaatatccttgggaatgaaaccacgtttataatagattcagtactccactaacatcttaaagtacacttatctgtagtgaagtgaacaaatctagatttttgtgtctatcttgcttcataattccttacactcctaaaaatttcttactgagtaaacaacaaagaacttaggctacacatggaattttggaaaatccagagaaaaggcaggggaaaaaaggtctttgttctaaaaggtgacatgtgcatttggcattccttttcttcttaattttcgatttagggcttatggagttcagaagcagaaggataagatggttatttcctctccaatcaatcactctaaactttataataagttggacatatctgatctcccataaaatgaaattctttaggtgaattattttgggaagcatcagaatggaggcaaagaagtaagttctaaaatattcatctcttcctcacactatccagacgtcaaggcctccaacatagttttttatgggccatggcaagtataaggggtatttcaatcatcaatgaatgagcaacaatggttgctgtttcaaaataggaggaaaaaagttgaattattttgggggagaaacaacataagatgacttttgaagaaaacattttttgtcatctgaaaatatgaatatgtatataagtatgctgtttatatgtaaaagaaaaatatgcagataggtcaaatcttttagatttggagatgggaagaccttaaaccttctttttgtatttatgagcctaactctttaagtaattcaaattactactggttaatgttccttgaatcactcatttatcctgaaaaactttcctttattctcacaaaaaaggaaaatggcaaacatactttagcttggtaaatgtgaaaaaattaggtattcaaataaaagatccaaaaccaacaagtcacaatgatagcaagtttctgtaatacatttctgggtacgctacaacaccaagtttaaacaatgatttttcttgctccaaagtgggttgtggatgtaagaactagtttttcttgctcagtcaagcaatatgaagcaaaggactacagtcaaagaaatagctgaatagcttctgcagccaatccatacaaacacacagtgtggtacttagtgggaccctccttacaccaaaaaagatacatactaatacataaaactgattcttcagaaaaaagttcataattatattaaatttgcactgtggataaagcccaactgcaaaaacttagagagcttggtaatcccagaaatttctgtgagtggctattataaggaatgtggtctaaactcgacaggaaacctcgtatttctgttagtatgaaaaattgctttgatcattccacattttcttaagatagaaaaaaggaagatttgatgaatccagaatattattgatgttattttgaaaccagattttaacttattaattacttcaaaactataacttaaaattgtatatttaaagaaaaggtaacattaatttcaaattccaagaaactcattttgatgattagataacatcatccaatctttcaaagggtaataacatttaaaaattagacttatcagaaatgctatattaacttatagtattatcaaagttgccataacttaattctctatgaactaaatatgtctcttttaagatgataatcataatgttaatcacaaaacatggaaaaatcttgaaatgtctttggcatttttaagaaggataattacattcagtgtaatctcttgtaagtatacattatttcattctgactctatggaaattggttatttgcacataatacatagcaggtgctggcaagccaaggctgtattttttgtaggaggaggtaagaggatcagccactgctttctctcatacgttatttggaagagcctcctccctgatctctgcctctacgtcatggcatgttgctccttatctccccaacacccaccttcacagaatcagatacatcagccaaaaacactgtgtttttgaatgttggcatgatcacctattagtaatcatgcatgagaataaagtggcatgccacttttggaaaagctgccatagatgataactgcacactgatgagattatttcattattctggagcttatcagtgtccagcaattacctgcttcagaaaatgtactgtacttgtgaattatatatttcaagagaaagtcatgaaatcaatttgataagatactcctggacaggtatcttagtagcacccttcttcctcaaaataaatgatctaacaggaccacctacacatttatttcatacaatgtttcttgaacaaaatgaaacctcaaatgttgggataaagagaagcattacatgtaattttaggtccagtacgaactggatgagttgctaagaaatacattatctatgcctagactatcgataatctgggcacaacacttccaagataaatactcaagagctattaaaactatttgtagctgtatactacttggattttaagttaccttgttttagttttctagaattttttgtctatttttgtaacttcctaagaaagttctcaggaccaggactttataaatgcaaagataacttaaagattctaaatcaaaaggacaagattgttggtaggataatgtgttattcagtaatttgtctaaagttatttttaaaacataccctagctaattggagatatcttacaaacaaaagtaaaacaaggtcaaccaagaaaatacatttcagactacaaatgtcaagattactaatatttatagaaactctttacttctccccattttctccttctctcacacatctggccaatttttcattggcttcactctaaatttgcattatccatagaatttaagcatggagaatttaaaactctctctctttttgcttatcaataacgttggtaaaagattttgtgtgggcttttggattgtgtgtagatatcatacgtttttttctttcctattccaatgcctagtacaattgggcctgatattattcaagagataaacatctcctcttcaattggtcaaaggttaaaaaggtaaaccagaagatattgccggtgggaagaggggacaaagataaattacaggtagtcataaagaaagtttaatttttcccctcacttacacatagcctttattttgaagaagtaatgcatcattcatgaagttaacatttacttactactgatttagtgtgcaattggcactaggcaacagggagacattggaaatacaaagatgagtaagactcagtccccactctcatggaatccaaaattgtataaaaagaaccatgaaattctgtggtaagtgcaatatggacaaaatatgaaaaagaggcataaagaggagatcaagttgcctatctaagagggaaaataaaagcttgtgacaaattttacggagagagccacataagaactaaacttgggtaagaattgcctcagatttagtaactcattgagaatgagcattcatctccctgcaagataatcatttatcaggagtaatcttgtattcatatgtggccaactgagaaatctttaatactcagatgaaatgatctaactgaaataagaatatttatgcacaaagtaggcactggaagaattaagatcatgccatatttagtatgtgtgtgtttgcacgctcaccataggggaaagggggaccactggggaaagggcaaggcatggaggtagtgattacagtgtttaagtaacggaggatattcctggataggaaacattacatagaaaacaagttgtgtccatttagcacctgagatacagcattcgctaattttagaaatcacaaaataattcagtctattgtcatatacaaatctgaatttatgaaatttgataggtgtcttataccatcttggattcacagcacctccagtttcagtttcaatcagcattttttgagttctcataagtggactgctgacttctgctggaggaaatacaacaatcatgtggaccgatgccactacaaatttatagtttccaagctctcaaaaccactcagcaattctacattctgctcgtcagctccctctgccacttctaatagcagctcttccaaattttagctcctgtcccaagggccctacccaattgcttctctggctcaggtttttatctcacaatttgattggcttcaaagaataatgagaggatctcaagcctgcattctctcagcttctaacactccacaaactcttggaaatgtttaatcaccatccatcttctttcttagagctagaaggcatctactccccgcctccttcaggttaattccttctgatattaccttattcttaactacttacttactagtgattcagtgtgcaatttgcatgccttctgaattcttcctgaacttcttccatgaatttctccttcctctcacttacatctctctcttatctcctttggctcagcccctaaacacgtttaagtttctcccactttgaaagactaaacaaagtgaaactcctcagtgtattataatctgggtttagtcccccaccctatcattttttgtttgtttgtttgagacagggtactctgtcacccaggctgcagtgcagtagagtcatctcagctcactgcaacctctgcctcctgggctcaagcaatcctcctgcctcatcctgccaagtagttgggactataggcacatgtcaccacatcaagctaatttttctgttttctgtacagatggggtctcactatgttgcccaggctggcctccaactcctggggtcaagtgacccacctgcctcggcctctcaaaatgtgggattacaggtgtgagccactgcgcctggcaacccaccatgtcttttgctaagaaaagagtcttcttttgcaagatcctcctaatgctaaatgcaaactgcttcccatagtccttaaccttcacaactctctgaaggacctggcaagctcttgcttgaaattttctcttcctttggcctcaggtgacaactttgcctatttttcaaatgattcatcctcttcattttctctagggtttctgcttcctctgcctaccgcttacaaatgacatttattggggttacatgtgggccctcatgccatagcaatcctgagaatatatccacacccaaggctgtaacagtcacctatagattgacatatcctgaatgcctggctcagatttctctcccaggttctactccgtacattcaatagcaaggtagatataaactcaaggatatcccccaaaattcgagatgattgcttattcattgaatggtaccacccaattacacaaacaagaaacttcagccattcttttttttttttactccccacatcaaatcattaattctatctccttctaattttgaattattttcccttaatactttctccctatccctgccttcaaactaggtattgtcatcccttggctggaacacctgaattgtctccctccattaactttcttacatcttgatattaaacttctcctatttgtcctaacatggaaatgtgatgatatcattcccctattcagagtttccttcacggtggcccctgtctaccttgcctgcttcttgcatgcattatactccagtaacaatgagatatttctattgctccacacatggtgttccttctacagcctggttttgtctgcccaggatggattatctacctggaagaacagatcatctgcctggcaaaattctacttgcattcaagtctcaggtccggtgtttttcccttcttagtgaaaccatctttggatcccctcccttgacccaccaaccccaacacacacacagacccagaagtttcacacattccttttcctattgtcaaaatgactgctattgactacagacctttccacactatatacttatttgctaacatgctatccctgctgttctctgagcagggcagaggccaggttttctttgctttgtaaccccagagtctcaaaccatacctaagccattgtaggacctaaacaatatctttttcaatgaaaagaaggacatcagtcctttctctttcccatcactcttctacacatctacaggagttctatttctaaaaacagatctgggcaggttacttgcctaattaatctgaaggcaatgcggagcctctggagaaattttcaaacacctcaagatggcatcctaatctctgtaagacccacctgaacctgtttgcttcagtcactttctaacactcatcctcctgtcagattctagcaatcagactatacgttgttctgtgccccaggcctgcactgctctcctccagtgtccacatgggaaagtcccccttatccttcaagcttcagtgtaaacctcacacctctgtgaatcatttctgacctcactactcccaccccaagttgagttgattgacttgctctctgatatacttccagcagagctcaatacgtttgactcactctctgtgttttaattattggtttaaaaatgtgtttctcctactagaatgtcagctccttcagaatggaggttgttacatttatctttaaatccctggcacttaaaagcatatgttttcacatactagcagaataagaagataagcatatataaacaaaaaacacaaacacattctaactcactttgattggcattaatttgtctacacttaaaatattctctctctattcctatcattttgcactggtacttcagaaactataagaggctccactcaaattataattattttgaattcagtgttttgcttcttctgtaatcttttttgcaaatagtaatttttttcaaagactgttttggtacttttttctccatctacttttagcaaaaagagattcttaaaaggtgtttaatgagctaaatctgtacagacccaaaataatagagtaaatggtaaatcagttggacttgaatttctagatgctccttactatttattttcttaaatcaactcaaagcagcagtgctctggcattcacaagagcacctctgcccaaaaatgttgtttataaacaaatatcaatttgctaactgattttttcgcctagagcctacataaataatattaattagtaatacttatcattgcatttgaaaaccaattgggaataaggaaaaccgtaggggaagaaatgttgatgagaagttagacagatttcttttaaactgtaaaaaagtccttacacaaggagtccccaacatattaggaaccaggctactcagcaggaggtaagcagtgggcaaccaagtattatgacctgagctaagcctcccgtcagatcagcagcagcagcaggggcataagattcttacagtggacggatagcattaggatgaatacctaatgtagatgacgggttgatgggtgcagcaaaccaccatggcatgtttatacctatgtaacaaacctgcacgttctgcacatgtaccccagaacataaagtataataataataataataataataaaagattctcacaggagcatgaaccctgttatgaactgctcaagtgagggatctaggttgcatgccccttataagaacttaacacctgatgatctaaggtgaaacggttccattctgaaaccaaccgctccccgaccccgagtccacggaagaactgtcttccacaaaaccagtccctggtgccaaaaaggttggggaccactgccttacatgatgaatttcaatgcttaaaggagaaaatataacattacagatcccaccatgcaaaattattcagatactaaacacattcttcaataaatgaacatagacaattaacaagttttaccagaagaacagcattctcacacacacacacacacacacacacacatatacaaataacatgctattaatgtatttattcatctgctgtagtattttataaagaacatgaagtgtaacccaaggtatctcttcatgaccagattttctacaacagatgtttggtcacaatggaacactcagtcttctgattctaccttgctctcttctctcttctgctttaccaacatctgcagctaaaattcccccaccttcttttatgcatatgaatatttaagtatattttgaagcccagatagctccaagaaagtcacatccaataaaccttccttgagccccttagctgaggtaaaggtgcttctatattcttcatacttgtgaacttgcttgttttcatgggaaaaaaaaaaaaaaaaaaaaaaaaggacccaagactgcattcttagactgatactcatcctgtctgtggatgtgtctgcaatttggctccatgtaaatttgagaaaagactccattttggcaaggaaaacacaactcacattctttaatttcttagtctatgtcccagtaagctggtagagattttgatttaaaaaacaaaacaaaactcaaaaaacttaacctaatggaaaaaacttataactgaaaaattatagagagctatcatagcatctccttatctgcagcttttaaaaaatacaatagcaactcacatttatatgatgatggcagaacaaaggaagggtgatatccctggaaactttggttccataattctttggtatttctaacacacttagaccaacttaaaaagaatcttaacttaaaaagaggttttctatttgaaccatttctcaaaccaaggagaagactgtttccttccaggtcacattctaatgctctcaaggagttaatactcatgctattagggaaagtgattcttaaaagttgctgaaaaaaccaattctatatgaacccaaaatgatatgataaacggtaaattatttgggccgaatttaggtattctcatggaccaaaataaatacactggaattatttctaacatgaaaaagccctcatttaatcatgtgtcaactggagaaagcaatttcccacagctaaaaatatttaaaaatctgatataaaaacaaaattatattaaaatgccataatacatggatttggctacttgccaagggtagaaaccgacttctgcagatttttctttcaaagatataccacgtgttccaacatttgtaatcatttgatagtcaactgctgtaggcaaaaaactgtacctagtaattctctactgtcgatattttaaactatttcataaacattcctcatacagtatgtctaatagattttgcatactttttcttatcagaaacttctttaacacatataatctactgaaattctccaactaaattaaatcataataggaatgaaactgacaaaatcttttagttggcctattttacctggaggaaccagtaaaatagagctcatgactctgaatctccatataaattgaaaataaacacgtttaatattcaagtaatttagttagacttacagactgataattttgctaacttttctatatttaaaaatgcaaatgtgatagagaagcataataacattttaaacacattgttttaggattatgcattttcaatcaaaacctgctagaaccaagaaaaaatggcattaagtagagaaagcagttgcttcactatcagtttcacaaaaatttttaagataatagtaaattaggatcaaattttccatatactttgatatactctagtttataacacttgccaatgatggattgaggaatataatttagattaaaaaagcatacatgaagtttactggtcagataattttctacttctgtcattacaagtaaggaagtacttgtaggaaaaatacatcagaaataaaacaatgaacttaataaaagtaaatgagtagagatcacatggtaacaagcagaactgtattccctgaacacaagagcatcacagatttcttctctctcagaactgctagaatcagacagaactctaaagttcataaaatccaacaccagataggtaaagacatcttccattttatctccccactaaaccagcttacttaataatttccctcattaagcaatactaactagccaatttccttccttctcccacttactttcatttactaacgcagaaatgttaagaagtgtcttacaatgtttactatggggaagtcagggatatgaaacaggttacatttttagtcccagttctacaaataaagaaaatgacttatcagatagtgagaattattctaaacaacagtgaggtcagttttgaagagttatttgaaatcagaactttaagtggctaggtcagttcccaaaggacatttttaaagggcagcaaaggaaccatttttcttacaaaatatagcactaaattttcggttgcctaaacaataataataataataataataataataattcattacaatgtagagataatcagtaccgacactgagagagaaatgcacaagacggcagtgatcataagatattaagactcatcaggccgggtgcagtggctcacgcctttaatcccagcactttgggaggccgaggcgggcggatcacgaggtcaggagatcgaaaccatcctggctaacacagtgaaatcctgtctctactaaaaatctctactaaaaatacaaaaaaattagctgggcgtgatagcgggcacctgcagtcccagctactcgggaggctgatgcaggagaatggcgtgaatccgagaggcagagcttgcagtgagccgagatggcaccactgcactccagcctgggcgacatagcaagacttcgtctcaaaaaaaaaaaaagactcatcaccaaaactgaaccaggatcttagaatgtatattaattttcaccactttggtacaaaaaaaaaaaatgaagcacaaatccccatattcgaacgaggattaatttgattcatgggctccatggtaattctagtggtactttctctttcactatcactatagcaggatatactaacaggggtttcacactcccagctcagttcttggaatgccatatcctcttcccccagtcaaaatggccacgaaagtctacctcacaacctcagagaagtgatcctgagaaaataagaatcaaatctttctttgagttttataaaccctacccagtcttttgagttataacaaacaggcttttaagcattaaggactaaagctatataacttatgccatcacccaaagatctagaagactcctggagagtcagtcatttctcacatgtcaaaaactatctaaactatctccacacagaggaggagagaaacattcagagaagctgtatcctgggggtggggacactcaaatcacaggctagggaccccccagacaggtttcagcaaaaagggatcgtgaaaccttatctagcacagccagaagagcagtgtcttagtctgttcctgctgttatagcaaaataccttagactgggtaattcaaaagaaatagaaacttatttctcacagttctggaggctgagaagtccaagatcaaggaactagcagattcaacatctgatgaaggttctctctctgcttcatagaaggtgccttgctgttgcatcctcacatggtggaaggggacaggggcattcacttcaacttcttttaaaagggcactctgccctcatcactttaatcacttcccaaaagtctctacctcttaatactattacagtggttattcaacttcaacttgtgacttttggcaggacaacaacattcagaacatagcaagcagcaagaactcagagttttcccaacatccagcataaactcgaagcagaaaaaataaaagttgaggcaacaacgtctttctctgtctctcctttgctatctcctctctccccactcttacagtcaatggaaactactgtgtttagatgaaattggcataatacaatttggatgacctttcatcaaaagtgtaaaacatgggccaggcacggtggctcatgcctgtagtcccagcactttgggaggcagagatggtgagaggattgcttgaggtcaggagttctagaccagcctgggcaacacaatgagatcctgtctgaaataaaaaaataaaatgacggataggttacaagatattaagtagaatatatgtagagggaaataacacatatgtaattggaattccagaagaacacatcagcatatgagaaagtaaaaatttacagagatactggctaagaatgttgacaaatgatgaacaccaatcctcaaatttaaggagctcaattaaaagcataataaataaaaattaaacatctcaatgtctcattacaaatctgcatgataccaaagatagagaagagatattaaaacctgccagaaaataaaggctgatcacctatgaaagaatgttaattagatttataacaacctcttaatagcaagaaagagtaccaggaaacagtaaaatcgtatcctcaatgagctgaaaaaaaaaactcataatgtagaatttaatattcagccaaactatcttcccaaacaataaaaaacaataatataggcaaaggaaaaaaactgaaaaaagcctctcattaaagaaaattctaaagaacacaatggagaaggaaggaaaattatctcagatggaaggacagagatgcaagcaaaaacacttgtatatatacgggtagctgtaaacatcgattgtataaaacaattatttctgatagggaagggagaaaagaagtaagtctgacaaaagagtacatattgattacctatatattttgttaaatgtgtatattaaaatagtgagtgtaatcattaaaatatcagataataagagtacataactgctaaacaaagaaaaaaataagtgccagggaatcctgatattccactgacactttccactgagatgatccaaataaggctagtgctccactttaaccaatcaaatatttcttttgccttgcttctgcatttgccttgtaaaaatcttcccctcgtgtccctttagcggagccccaaaccatctatggtctggagctgcctggttcatgaatcactgtctgtccaaataaaccctctaagtttttaatgtgcctcagtttatcttttatcaaacaaaagaagcaagtcatagaggaatacacacagtatgattacatctatataaagaaacaaaaataggcaaaacgtaattatatagaattacacaggtgacaaaatctatgctaaaatgtgccaacctaagagtatagtgaggaagactctgaaaaattgaatatccacatccaaagattacagattaatatctcagggtggtctcacaggacacatcaggccaagtgatttcatcctctacagtagcatatgtaattctgatggctgccactaagtggcagttcatgctacaggttctggaaaaaacaaagaatgctgaactatataaaagtatgtcacaacaatatcactaatactatcatgtttataatctcttaaatgttaactacatgtcagtcctgtgttatgtaaaacattatgagtcctcatgactcaagcaaaacagaggccccttgctttgctaacaataaatgcaagacaagttattttgtcaaggttacaaagcacatggcaaatgacaggttctaattatatgactccaaagcctgttctctttccaccactgttttgtgaaatgtacacagtgtctcttgtaggatgacaatgatttatagacatatatgttataattcaacaatataaattccttgagggtgggctctatatcagatttatctttcttgtatccttcaaagtaaacattcaatttttaaaaagccttaattatgtaaggagaaaaatcttttaattttttatttaattttcaaaactacaatttatcattacatacatttagagaaattatctgtcatttgaagaatatcttagctacaaattctttccttcaaagatagtttctgactgctcagtttctcattactctcatttctcattatcccctaagtagatctcacatttaagcttcctcagtctcactttgaagtgtgttacacatgtgttaagcatgagagagctaggctctagtcttggcttcttttattttaactacccttgacacatgagtctctttggacagtctgtacagtggcttcagttgggcattatgaagcctcttctgctatcttaaccaccttacattacataccaatcttggtactcttagtaagtcatattcagttcttctcattattaagttaattatccattaatttactgtgaacggaaaaaaatagccctaactttaagatagtccatgttctctctctgtgttttcttacatcccatatggcttatgtttttaaaatattcctttttaccttgattatttttctgctcctaaatccaatgcataagagagcaaaagctgacagcagagaattcttgagagacttctgtttctaggccccttaactttccaccttatatgtggttaaaaacctaatgtttgttagaaaattttcaaacatactaaaaaaagaaagagtagaatgtacacccatgaatgtttcactcagatttatcaattgctaacatttcaccacatttgcttcattgctctctctcatcatacatttttctttgcaaaaccatttgaaagtaaatttcaaacatcataacatgttacccctaagtattcagcatgcatctcctaagtactaggacagtctcctattaaatcacattatcattatcatacccaagaaatttaactttgatacaatctttttttttctcagatacagtctatctctacttgtcccaatcatactgcagcttcaatctctcaggtccaagtgatcctcccacctcagccaccccagtagctaggaccacaggcacatgccaccacacttggctaacttttttactttttgcagagatagggtctccctacggtgcccaggctgatctcaaactcctgagctcaagtaatcctctggcttccacctcccaaagtgctgggattataggcatgagccaccatgcctggcccccaatcatgttcttaacagatttctttcaatccaagatgcaacaagggatcatgcaatgcatttaattgtcattctcctttaatttttgctcttgtgtttcatcacaatgacaattttgaagaatctgtatcagttgtcttgtgggacatccataatcttgatttgtctgattgcttccttgtgattaaattcagattaaacattttttggcaagaatactgtaagaggtgctgtacttcccacaggatcacaggatcacatatgaaggcacataataacgattttccgcattattggtggtgatatctgatcaactgattaagctgctatctgctggatttctctattgtaaaggtacctttgccctacataattaataattagtgagctaatattttgagactacaaaattatcttttccacagctttccacacggtcattttatcaagatgaatctgacaaccttagttttgtgtgggtctcttattccttttggttgttacattaaccagtctgtccttctcagaatgcttacttaagtaatggaaccataggttctttcgtgaggcctatagttttagcataacagtctgctgaagtactcagtataaagagtctctttttttccctaaatctttagaactttatctgaattagagcttcaaatacagtattttccaaaatacttgcttcacggctcctatataggacaaactctgatatatctgcttgccttacattccataaaaagaaagaaagaaaaaagtcatccaaatacaagcagaactaaactaaacccatcacatttgagcctatcagactcattggttaataagaaaattctctttgcttcacaaaattacaggacaatctgtcaatcaaactcctaacttgtcccaaaaaagagttttacaaggttgtctgtcacatctccagtgttctgtatttgctgtggatcttactttatcagctctaatgaagcaaactacacagaaaggtgagataaggtttctatcaaaatcttaattcccaaatcggaagtcaagagggcaattcaaggcagagcacagccatctgtagacacccaaaagaaactttactaaagcagatacttacaatagtggaactttttgagaaagtactgacctaggctcaaatgttacccataaaaatcaaaactaatctttctattacgcaaaatggaaaggcaatttacataaggacacctatgtttccatttacatttttacctctgcgaaaaacctggcagacattcaaaggaagtgatctagggatgatcgacacgcattaatggttctaataatgaacacaatatgctccaatgacattctttattcttaagaactttgatatcaaaggcaacaagaatgcttgagttaaatgattccttcttccacaggaaagcctaaatggtcagcagaaatcacagcaagtaagaaattgtggtctcaaccttcccattgtggtcagtttcttcatttataaaagaaagaactcaatgggtcctcaagattttgaatcgctggtgaacctgaatacataggtgacttagacataaaaacattaagtagatactaaaatgaaacaactccatgcactctctcaaaagatttaaccagaagcacaaaatttaagggggtaccaaaacactgaaaagtcaagataataatttagtacaatattttttaagataaacattaatgcaatatgatggacaaaatatcaacattttaaattaacgctgctgttgtttgataatcctccactattatgcaatgagaatggtcatttctacttaactggtggagtcccccacttggaaggacacaatggtgtccaacaggtcgggcattgtggatctttctatatagtcaattttttttattgtagagcttttattaacttttttcatttggtacaaaatatgaggggatatactgataagtgcatatacaggcatactttcttctatatttttgcctcgggctctagtatgattcagcaggatactggatttaaggattcagtctgtcagctgatacagcatgaagatacttaaaactaaatgcctctactacaggatctttcagtctcataaaaatgaagagtcagttttacaaaaagtaaagtgaaatacaaagtaccatagagagaaaaaaatatcctggaattcagggagcatcatgtatccttctgttgagaggcatgaaaattagaaaaggacccctggaagtgatacaggattaccatatttagtaaataaaaatgcaaacattgcatgagatatactaaaaagtatttcttgtttatgtaaaattcagatttaactgggcatcttatatggtttggctgtgtcaccacccaaatctagaattgtagctcccataattcccatgtgtcgtgggaggaacctggtgggaggtaactgaatcatgagggcaagtctttcccatgctgttctcatgacagtgagtaagtctcatgagatgtgatggttttataagggggagttaccctgcacatgctctctctctctttcctgctgccatgtaaggtgtgactttgctcctcctttgcctttcaccatgattgtgaggcctccccagccatgtggaactgtgagtcagttaagcctctttcttcataaattacccagtcttgggtatgtctttattagcagtgtgagaacacactaatacagcagcctatattttatctggcaatcctgatacggtagcatataaattgaatcttgaaatatggatctaaactaaaaatttctattttattatttggaaactactattcaactaggaagcattatgatacatggcactgaagtgaattaaccaactagcaggataacactggataagctacttctttgaatttagtttttccacttaatataatgatacaatttgttctgcatactttgcagggttggtaggctcaataaacctgatattaaatatttgtgaaaaagaattacaaggtataagtaatgagaaaataagaatttaagataaagttttattgtagagaccagccttcacgttgctgatctactaggtggtaaccccacagttccatgatcagcacttggtccatggacaataacatctgtgactaagagttaggaaatttcattaaaaaaaatatcaaggttgggccagcttgccttcttgaacatggagcttcatttaaagtcagaaccatcctctgacacagggttcaatccatgagaacactctctacactgttgtcaggactggttacagatgattaattattgtgcaaaactgtgtttaaaaactgtttttaaaacatccaaaatgctcaaacaccgtttatacctgtatctatgaaccaactaggtgtccagggcccaattaacctgtacaattttccttcttgcaggaagtgtttctttcttgtggctatataggaactgtcacatagcccaaatgagctcactctgccaacaaatctgcctcaaatctgccaacaaatagcccaaatgagcccactcctcaaatctgctaactgggacatcaggtaaatggtgggttactttactcaactgtgttccaccttccatcaaacagcaaacattgaatttggatagtgaagaacaagattatcttcaaaatgggagaatgagagagagagagaggagagaaagggatattacagaaaacagagacacgtaaattcagaggaggaaaaaaagaaaacagtgtggaaaggatcacagctgaaaaaaaaaaaaaaaaaaaagatatgccaggcatggtggctcacgcctgtaatcccagcactttgagaggccgaggcaggcggatcacctgaggtcaggagttcgagaccagcctcaacatggagaaaccccgtctctactaaaaacacaaaattagctgggcgtggtggtgtatgcctgtaatcccagctactcgggagtctgaggcaggagaattgctggaacctgggaggcggaggttgcggtgagccaagatcgcgccattgcactccagcctgggcaacaagaatgaaactcagtttcaaaaaaaaaaaaaaaaatatatatatacacacacacacacacacacacacacacacacatatatgtatatacatatatatgtgtatatatatacacatatatatgtatatacatatatatgtgtatatatatgaaaaaagaggacaaaaaatatttttaaaaagatgaatgaaaagggtgaaaagaggaaccatgaaggagacccagccaaccattacccctgaacagaccaatgaacaccaaagaaattaggaaggacctaatccttacagactgctctgaaagcaggaagcaaaaaatgaagtcaagaaacgggatttccataaattgaatgaacagattagagattaacaagaaatcaggccacccttcagacttaataagaaaaaataacctaatttgccactttcctctaactaccagtaaaattaatctaataaaactaatattcatgataagctgatcaaatcttttgtaaccaagtagggaacaaattaaacacatataaactcaaatacaatatatatacacattttaaacctctggtgaagtttcttggacagaaaaaactgagatattataatacatacagcaggttcttacagctgtttgtggtttccgatgagagattaatacaaattttaggctgggcgcggtgcctcacgtctgtaatcccagtactttgggaggttgaggtgggcagatcacgaggtctggagtttaagaccagcctgagcaacatggtgaaactccatctctactaaaaatacaaaaattagccgggcgtggtggcacgtgcctgtaatcccagctactcaggaggctgaggcaggagaatcactggaacccaggaggtggaggttgtagtgagacgagatcgcaccactgcactccagcctgggtgacagagcaagactccgtctcaaaaaaaaagaaaaattttagttgtgggctctacaattaacccccaagtagctaggaggggtaaaactctctgaactttgaacaatgagcaacattttgactagcagatccctggaatgcttagtaagaatttattttgatttctgatgaacttacaagtgtgccttcctaatttctctagctcctagtccataaactgattttctgtaaacgcctaaaatgccatcagagttcagatataaattagtcctagaataaattatgatttagaacaaaaaataaaaataagaattccttaaggaatccatcttgcaataaacactttatgccctcaggttattttcaattttaattattatccttctctgcattttgcttttaaaatttaatttatagcatatcaaaattacataattcttatatgctgcctggaaaattagagtactataaataaaaaggctaccttttgctggaaaaaaagacactaaaatgtagctttaattttaatttcaaagaagcaacctagaaacagttcagattagctgaggacagtcttatccaccataaactattaaaacttgggaagaatatttgctataaccctaatagggaattattcttatttttaattttccttctcatgatttctattacaataggcatcagatcatactttagttattggttcatacatatgataagagatcacgttatttatttacttttttgtgtccagcacctagcacagtgtcagaatatattaggtgttcagtatacatatatatatatacttgagttcataaaattaattgagaagacaaaatcctctatgaaatgtaaattgtatatactcaacataggaaaaaaatcaatatatttgatatcactaaataatttctggaaacatgtacagtaatatgggttgtaactacataatcctatttatatatcttagacatattaaaccgaagtattttttttaagtcatcatttttacaacgttgagagttaaaatttcctggagtaaagaaagtatcaaagtttgtggaaattttagcatcctattaggaatcaatccctaattgtttttgctttttccttacttaaagaaattataaatgtgttgttataaaaatatttggtataaataagttttcatcttatttcataaaagcaagtttcaggaatcactttgtgactctatctaaaattgcttttccttgaaatatatttttagttttatatatcaaataaaaacaaaagaaaaaattaaaaggagcaattaaactcgtgctctaatctgaagttccaagaataataatttgtttctaatgcaaatatgttagcacatttgcatggcaaacagacaccagaaaaattaaaacaattaaattagtgagggccaagacaattagttatatgaaggactaaactaacagtctttcaaaattaagttatataactttatttctaatcattctttaaataatctatattttccatatttaaaaataagaatttcaataaatctattttatacaatgaaacaaaacacaagagttagatctagctcttagatatgcaaatacctaccatctgataatatgcatcatctagtattcgattttccagttcatgcactcctatctatggcactgaacaaactggaaaaaaaaaaaaactaggctagggaaaacatacaaatgtgatataattagagaaaaaaattaaataaataaatgaaaggggaaaggtttctgtccaaaagacttttccattgcaaataattcatttcctttgacaacacagtagtattaatacacattccgtgaacaaatgtcctaaaattctaaatcactactaaattacattatttcatatagatctagtcatgaaaacatgtcaaggtatctcttacaggaaggttcgtttttttaaagggaaaatataggaaaactcacaaataaaacttttttatttcaaaagatcatgtttgctgtattctacgaacagttttagaaacagtctgtgaaggctcaataaccagtgaaatgaactttgatttttctttaaaaaaaaaaaactaaaactaaaatctgtaggtaaattattatttagcatattatatgcaaaataaattcatataatggtactgtttgagctgagccatattttaagaaatataaatacttgagaaaaagaaaatattaaaaaaaactgagaaccactaatttttacttgatagaaattaaaaacaaaaatgtaacccagtttagctttttaaaagttcaatgttaagcagaatgaatgcatcaattctatctatataccacctttcaaccctaacttcccagacaatggtaactttccattaatactcattgccattttatttcatttaatgtgtctgcttaaaaaatagagaagaaaaagaaaagagggaaagttcacagaaaaagcaagaagtagatgtaaataatcaaactttacttacaaaacttgcctcttgaatatctagaacatacaatcaggtatataaaggaaataaaaggtaaaaatcctagagaagactgggcaaatttatccttattttcagatgatgtaactgtctactttcaaattcaagagactcatctataaaactattaaaactcatctataaaactattaaaattattaagttcagaaagatgatcaattataaaattagtatccataagtatattaaagtgtacaaaaagtatattctcatttaccaacaacgaattagaaaacactgaaccaatataattcacaatagccaaaaacttattggatacataaaagtaaatttaacattaagtatacagaaattttaataagaaaattaaaacctcaaaaaaggggcttaagcaactaggaagtagtgtgtcttaaaatactttaaagatatcaaatttccacaaataaaactataactgtaaagcagtgacagtggggcgtgtgtgtgtgtgtctgtgtgtgtgtgtgtgtgtgtgtgcatccacatttgcacatgtgcatccatgtgcccagggtgaggggaggtagaggctgacattatttaaacattaaaaaaatagagagactggagcagaaggaacagggccaggcactattctggtgacatacagaccaaggattaaagatcctaaaatcaattcatccaaaatttgatttctagagaatcaggataatagtcactgattatgcagataagtggaatgtcttaactccggttttaattacagcaaactaggctcagtaggaagtttaaggtaatcaaccatgaaatattcagattagggaatttaagacaatagcatctggaagctaaaacaataaaagaaagcttgatgagtctttttggttttacattttctctgtggtgtagaagataccagaagagataaatatagctatggagagcttcaaaaagtggaagatacacctggaatctcactggaacaaggaaaagggaaccagcataatataaatgtttctgacaagtgagtggtggtatttcaattagtaatgcaatcttttagatttagatgggtatcagagaataaagatcagaatgtccttgaccttattactacagacagttactctaaacagagaaatctacaactcaatatcaagatgtaggtattttctcatatccctcaaaaatctaagccaaacgactttcctttcgctttttcttacttcaaaacacgatgaaatttgatccataaaaatcctacagcaaaggacaatttaggaagacaacctttcagatctgtaataatccgttgatagtgtgatacaacctgcatagcatatactacggtgtgaatgtctgtgtcccctgaaaactcatattttgaaacactaaccaccaaggtgatggtattgggagatggggcctttgggaagtgattggtcagaggcagcgtccttctgaatggaattcactaccgtatcaaagagaccccaaagaggtagttccttcctctactatgtgaggactcagtgagaaggtgccatccatgaacgaggaagtgggccctcaccagaccccaacaatgctggcactctgttcttaacttccaagcctccagaaatgtaagacataaatttttgtcatttataagacagtttatggcattctgttatagcaacctgaatagactaaaacatcgtgtaaagatacactcaaaagtgttcggatagactttaaataatgggtgaaattaatgaaaatatctcatttctatcatattttcttaacttgtactaaatccacgatgtcttttacgagccaaaatcccctaaatactacatgaagatataaaagcagaaatagtaatgataaatcaacttaggtcccaggattattttctcattaggagagtaaaaatttatacactttctctatatgtaaaaagaaatatgattgcaatagtatacaatgcatgattacatagatatccctgtcaaaaaaaattagaaaaaccttaatctcaacagattattttgctttgtcaaatacctaaaaataaaagggctaaccagtgatttggaggacctatttgtactcacgttggccaggttttacaaaacccagatcttaaaatttatgatgagccacaatgaaaagacatacagttaatataggttgcttgcaataatctcttctctgcagcaccaaaggcttttaatagggtaagtgtactataataccacgattagatttatatgtcttagaaaacgggttacacactgatgaacagcattaaattgatataatggctcttagtggttataaatgtagctttttcctactttaattggcaatgactagactgaccttttctctataattgtaactacagtatagtaattagacaaaccactactttcttgtgaaacaaagagaagaagaagaaagttctcagttagtagctttgagaatatagagtgaactgggttggcattctactggggcaaaatgagcaaccaataagaagaatagtttttcataaattatgtcctatgtttagttgaatatctgaactacagacaaaaattccatagggaagcccttttcatatactagaggcagccaccctgaagactaaaactagacctaaaaacagggtttaaagtcaaaaagtgaattcagctattatttaagacagttagagaaaggactagagaagagagaagtttactctcaaagatctaaaaataataatgatttaaaacaccaaactgtggtccatgcacatgcaccttttttgggcccacataattctgtggggaggtaagagtcttgacaagggccttattggaaagttagctgccgtcaacccagaggatttatggctgaggctgtgaagggagccatttcccttgctgagaacaagaacgcttttcttcaccctgcttttgggcctctgagaaggtcaactagttcccaagcctttaagcctccacattgggaaacactaggttcctggaggagaggtaggggaagagaatttatttttcaacatccaagattatgcataaatggtagcctgttaagagagtcccgggagaaaaaactgtggcatgttgggaataattaatcaacaaatagatacatacatacatacatacatacatacatacataccccagcccagcgcagtggctcacacctgtaatcccagcactttgggaggcccaggtgggcggactgcctgagctcaggagttcgacaccagcctcggcaacacagtgaaaccccgtctctactaaaatacaaaaaaaaattagccaagcgtagcagtgtgtgcctgtagtcccagctactcgggaggctgaggcaggagaattgcttgaacccgggaggcggaggttgcagcgagctgagatcgtgccactgcactccagcctgggcgacagcggaagactctgtctcaaacaaacaaacaaaaaaacccacacaaactcaaccagtaagttgattcttttcacaaattgctacccatttgcatcccaagatctacacagaggttagaccttcctcatcagctgtaataaccagcaggcattcacaccactgggcaataatgaatcaactcggggtccaggattactttctcattaggataataaaagcatattcattttctccacatatgtaaagaaatttggttgcaataggaatttttagttaaatactatatccctgttagtagttcctaaaagtaagttagaaaacctaagtgagaaccagggaccatctttcatcagcaagagcaatgatcttagacatataaaaggcaggttaaggaatttattgtacaatgtgtgaaaatctaggttaaagaaaagtacaatatacagtaattaaaaactgtccacgtatgcaaattggagaccattaattataggaacagcaaataaggtttcagagcatgctcagcagcgttaaaagggataaatagaaattatgaaaacgtaaagtggcaaaagcattatacaattattgctaaattataaactctatgaggcaaatattgctaaattattaattctgtggcaaattcatgttaaattttaaactatgtgaaggtaggaaatccaaatgttctactcactgctttattccaaatgctggatcaaggtaggagctcaataaacacctggggctgggtgcagtggctcatgcctgtaatcctagcactttgggagcagaggcaggaggattgcttgaggccaggtatttgagaccagcctgagtaagactccatctccataaaaaatgtaaaaattagctaagcgtggtggtggtggtgtgcccctgtagtcccagctactcgggagactgaagcaggaggattgcttgagcccacaagttcaaggttacagtgacgtatgtcactgcactccaacctgggtgacagagcaagactctgtctctaaaaaacaaacaaacaaacatacaaaaatctggtaaatgaattaatgaaattatattcagtaatttccacatattcattcttgaactgcactagcaactacttctcataatgtttataaggcacaaaacagtgatatgtgaataatgtttctcaaaatagctcacttgggatagaaaattgttttctacctatacaacactgggcaagttatttaatctctagtgccttggttctctcatttgaaaactgggcacaataacagtatcacctcacagggttatcggaaatttaatatatatataacatttggaatagtaactgtcagaatcagtgctatagaagtgttagtggttattggtattattctgtattgatgtgcagagaggtttctgaaatcctaagtagccatccctaggtcttattaacccctcagagtagagcccatttctgattcaactatgtatcaccagtacaaagcacagtgcctaacatattaaaaatgattttaaaaaatacaaattgtactggatcaaactcttatattacaatattcttaactacatcagaaaaaagtcatctagtaccattatgattcagagcataaatttcctacataataaattcaaatgtgacaagcattttcctctaacatttgataatatctaattagaagacagttacaacgaaagaggttaaaaagtttcatttttgccagggcccatcagagagtcaacctctattcctttatattctccttaccatttattcataattcaaagactaaactctcaatcctttaaatgtattattgtgacaccaaaggcaaggaaataagaaggttcaactgacaaatacacgaaaatgggctaagatgtcaacaatgcaggacatgaaaacttttttttttctttttttttttttttttttgagacagagtcttggtctgtcgcccaggctggagtgcagtggcgcgatctcggctcactgcaagctccgcctcccgggttcacaccattctcctgcctcagcctcccgagtagcggggactacaggcgtccgccactacgtctggctaatttttttgtgtttttagtagagacggggtttcaccgtggtaggcaggatggtctcgatctcccgacctcatgatccgcccatctaggcctcccaaagtgctgggattacaggcataagccactgcttctggccttaaaacattttttaaaatctgtactgaagatatggagaactacatattcgtcaaaatatgtttagcattacatgcaaacttctgtgcaaaattatatgttagaggtctaagaaacactggatttgttttacttatagttttgaaactttccacctaattgcctgaaatactgctctctttaatttcagaaaaataaagtctttattggttatcttaacgcaacatgctaggtcatctaaaacctggcaataaactatttttccagattttatctcctgatatttataagcagtacaagataggcaagtatgagcttttccctgagcacctgaaaataagattgtcctctaaatcaaactataaaattactccgaaacagaacaaatgagcaaagatgccttagtaatcaaaatagttcttaagccaaagcaagaattgacatcacaaggacactgaaagaaagaaaatatcaacaggaaataggataagcacataattaatttattatccaaccatgacattaagccatacacgaaccaggactgtggtgcaccaagtgaaaaacatgatcactctaaatcagaaggtttgttcctgttagaataaaaaacaagtagaacaaacttcattattgcccttccaagtattacaagaggaccctatttcatgaatatatcactcatttggtaattaacgatgtcttagtccaagcctcttcttaggctgtagttctgctttatttaacctaattatgcaactttcatttacttaacgtcttatttcctccagtatatggcaggtatttttttgaacactgtggtggtaatgtctcaaatttcctttcaaattccacattccaacatcattgtaggtagaaatcaaatactcactgactgataataataataattatcattattataactgatatgtattaagtagttaactatgtgccaggaactattctaagtacttcacatgtacaatgacatttaaatcacacaataagtttatgaagtaagtactactgctgtctccattttacagatgagaaacagggaagttaagtaacttgcgcaatgacaagcaggtagaaggtggcagagccaggattcaaatccagatggtttggctccagagctgatgctcgtatctactacagtattctgccccttagtgaaaaatacacttgtgcctaaataacttattccaagttttgtcagttattaaaccttaaagccatttttaaatgctccaaaatagctgatgatagcatccacaattggcataggtatggagaaagagacacagacatcgaaattcgatttcatgaaattattcctaaggagacaacaaaaagtatacaaagatatagaaataagaatatttatcatacagttatttataggagtaaaaattggaaatagtcagaatgtctattaataagagatttgttaaatacactgtgctaaaatcttaccactaacctgttagaaatggtggtatagttctatagttattaaaacaaaaagaagttgagtgacaggcaccaattgcaaaatattacagacagtgtaattacagaaggaagtgggtaagttacacatggatatgcacataactgaaaagatgtaaatgtaaacagtggaaatctctgaatagtgggattttaagtagtcttttcttttaaaaaatatttactaaaaatctactgtgtgtatgctattttccattcaaaggaccataaaagaaatacaagggcctacaatctagagactacagtcaattctagaccatgaaagaaaacaaacgttggtgacaaataaattactaataaagaaaggcaagggagtagctgagaatagtgggatataaaagcctcacaattaatggaaagcagcatataggcttcaccttcatcactaactagctgcatgaatctggacaggtcacagattatccttgagccttagtttcaaaatagcaaaatataggtgttagatgggttgtcctgctcgggagttctttacaattctgagtgtctgtggttaaaattttcaaaaagagcatgtaggaacatgaaaactcctccatccactaccagtcacaagtggcagtgtttattaatctgctgcttattaatgtacactttagtcagtttgtacaagatatgaaataccaaagcacagaaaatgggaacaacaaagaaaatccacaaacacacttaagtgcttgttattgaaaatatgattattcttcagggagtgaaataatatagtaacctaaggaagaaacccacgtgagacacctcactatcccaccaaaaactcattttcaagcagttcacagttcccttataacatttcactttcatacagattaaaaagtacatatgatctatctgacattgaggtatatatataattctactgacaaatatctcaggaaagagtcaagtgagactttgatgttgcattccactgtaattcagatatatcaataatcaaatttggagagctgccaataaaaatggaataaacagcattagcattttacctgcatgcatgggcctggaaaaacagagcaagacccaagcaaagaaaaataagcacctgccggtgtcttacctctagcagtttgcccttaggcagtccacagtgccctccttgttctactcctgcaaaacacatgctccagggagacacctctgtattttaacatatctcatagacgtttctaagctccaaagttaagatgatgtgttatagtctttttaaaaaactgataataaataacctgatttaaaaaatactctaagacagtgctgatctgttagttgtaagaagcattttgaacatcagatagagtgtgatttgatatgttaacaaagtggacccagatgatatatgaaaaaaacatggtaaaaagatgaaaagcaaaaaacaacaagctatacgcaatagataaagagtcaagagcttgctggcagaaggctaaattagctgacctttgacactacttccaatcagatcctttgattcttggaatacatcaagttcaaaattaaatataaacactcaaagtaaatagttaattttcagtcactagatcattttctcaactgagctagaaattagaaattaaaaggtatgcttcctggaataatttgaatttcactgaatctcctattaatccattagatgtgtaggtgcagataatgttaaaatatatatttttaaatgtaactattaaaatatgtttggatgaaaaatccaagtgaaaagcatttcacaaaaatataaaatagctatatactaagagatcttattttatggcagcataaaatataagtagagatcattgtgttttttttaaatctctattatgaatttgaatgcactttgtccatttaatctgaaaacagatagtataatgagtacactataattgtcctattttcttcagataattgtgcacacttcagtgctaccataccataagcaataagtaaccttcaagaatctgctagcgtctttacaaagtttgatttaagaccttcactgtcaatttgcagaaaaccatgaggctaagatggtgataaagcatcgatgattgatggcaccacccaagccaccattctaataatgaactaatgattcatgctcaaggtgcttttgaaacatgattaagcctccaaacatttcactaaggtgggttcccattaccacaagcataaaagagaacttaataagtttagcaaggttagtgaatgacccagtgataaaattttggaacaaaaacaaaaacataaaggacttcagtctcctagctcccactgcaagctctattcacaggtatttgaagaagtctttcagggtaatttatgtaattgctctgagtctaactgaccttctctggtggccactggcaagtgtttgccaaaatgtcagtgaccaaaaaactccttacaaagccatgttttataaaatgaatatgtcaagaatcagatgaaaatgtcatcagtgacactgacaacaataaaagaaaatattctacagatttaagaaagtgaagaagatccatattaaaggggaaataaataacctgagaaaatgtcatcagaaaaaaagtagacagatcacagctttaagaaagggaagaagacacaacttaaagggggaaaaaattatccaagaaacaaatgttctttaaagggtcagaaacggaaagactcattttacaaaagctggtggaaaaactacatctcttttagagatcatatcgttgctcctggggaaaggaggaatgaggagatgggaggcacctgtgaggagcttgtcacatctgaatcccaaagttattcactttcctatttgtgtgtcaaaatgaatgacataatttgtgaatgtcaaaagtagtcacagcaaattaaataaaaattgaacaaaatttactccaattgcccttaaaatagaaagtcaaaagttgttgattttcccactttgcagtctttgaaagtaagtttcacttatataaatacttaaagtcaaacaacccagttgaatacacctactctcttgaaatttaaaaaagagaggggaaggggaagggtgatctcatggagaaaattacttttacactaagactagagatctttctttcaaatgggtctagcttacaaatgtgattatccaaagaatgactgcagctcattactgatgaacggaatatattttttgtatactctgaaattttcatacatatatgattggcccattccaaatgactgctttaatagaacgtttgaaataacccatatgtagactttccattaatggcctaaggattaactgttttgaagattaatctacctaggtggaatcccaggcagtttgctctatctaaatgcttgcaggacatcattctcccaacacctagctgaagtgaaatcaatgctaatataagcattaataaaacacagagagttgcgatttaggatttcctaccactttgcattactattccatgttctctcccatgcatacccccaagaaaaccagtgtggatcatcacaaattctaaatgctttaccaactgcaacatgtacatagagaacccatttagaggattgaaatatagtgtacaactaagagtggcaagttagtaaagaaaaataaaaccattcaaattaaacataaggaaaatactgtcactggggaaagaatcaggagtaaaatatatgtgcatcccataaacaacaggagtgtagcattgtaaagttattgtgaccttgtccctttttaaacagctacatttgtcacaatggaagacggccatcaagcagcagcaatgtctgcgtggatgtctaaatgcctgtcagggcctgcttggtaatactttacacttctccccctctaacaagcttcactattatgtcctacttacagatggatggctgccaagagctatcacacaaaaaagctcctctataacataatgatgtctctgtactgggaataaacttgtgagaaaaatcttggaaataaaaagaagatagaaatctatttaaggatgtaaattactgaaagcttctaattccaacaagatcataacatccaaaatattaactctatgtaagtaatatctatttcctcaaagatagtcattccataaatgtctatacatctgtagaaagaaatgttatagaaaacaactgttgttttggtttccttcaaattcatttactaactttaatgaagaaagccagggcattgtcttgacatattttgtcatctcttttccaaataaattgtcgccataagaatgttatgtttctccagcatttttatccccctgtatttagtttttttaaatctagtaaggttaacacgttgtcagttaggctaaaactgaatccacatacctcacagataagccaccattctatgttagagaattcagtgagtgctgctttaactcttccattacatttacagagtatttttaagggccgtgtctacccccaataaatgaacttgaagatttttacagacttattttgacttattctatcttgttcaacttgagtaggtcaattttcttttatcttaccttgaacataggcttatattcactaggtttgattgctatccaatcaatccatcaacatgcatttagtgagcttctgtttagaagcccaagattgtggaaaagtcacaattcctggctatagttttaactctcatgctgttaacaatgtaacattctaaaaaatttataatccatctgagtataaattaaaactaaaagaaaaaaatgtaacttactctctcccttctttccccaaacataagattctccaaatatatattcacacatagcaaaatatttatgtgcatgtgtgcacaatacaatattaaaatcattggtaatttattaatgaaaaaaaattatatcaacaccaaaaataggaattcagtttaaattcaagttaaaaggaaaacaaatggaaatcatatttcccaaatgaaaatagctctcaaaataccataataaatcatggaggaaatgctcccagacattaatatttaacaagcaagaaaatctgaggcaggtctgattagtgtgtcactatggtaaatgggtatgataagatattatatacatgtcagaatcaccaactaatattaactagtttatggatgtactgtcactaaggtattagttagaagaatttcaaaaataaagattcccatttctatatgtggagtttttggtagatattagtaccattattacatatataccatagaagttatgttattataagactatttttttcctttttttgagacaagagtctcactctgtcgtccaggctggagtgcaatggtgccatctcagatcactgcaacttccgcttcccaggttcaagcaattctcctgcctcagcttcccaagtagctgggactataagtgtctgccaccaggcccggctaatttttgtattttcagtagagacagggtttcaccatgttggccaggctggtttcaaactcccgaccccaagtgatctgcccgcctcggcctcccaaagtgttgggattacaggtatgagccaccgtgcccagcactgtaagactttttatcaaaagacgtagatgttgaaggcataaatatagtggtgattatgtcacagtaacaactattctaaggaagggtcttctttcccctctcaatttctccataattcaacaacagagaagaaaagaacacagatatttaataccacgaaataccaaaactatctttaatgtatataaagtcaagggcttatatttatatattttaaaatttgttttcacattctccctttcagactcagtcccttatgagacctgaagaggtgcctttttctccatgcattctctaaatgaatactcaagattaaatagcagtactggaaactgcaaatggatgttattttattgtaatatttattttatttaatacttactttattgtaatgttattagctagcacttgtatttcagggactccaaggtaagtttaactgcttgttgcaaccaactatatttttaaattcagaataaggtgttggaggcagtttaacagctaggatattgtgggggctttgaggtcagacagatctacattcaatcctggctctgcacttgctatctgtgatcttcagcaagacattctacctatctgtgctccattttactttatctataaaacagggcataatgatacctatgtcatggagttaatgtgataattaaataacttaatgaatgaaaaactctcagcctgacttaatataaaattccccacatagggcagctacaaagtcagtatcttagtcatttattgctgtaaaacaaaccacaccaaaatttagtagctttaaaaaaacaactcttacttgctcacaactctgtggactggctatttgaactgggctttgccaagcaattctgctagttttactacaaaggactgcaggaatctgaaggcttgactaagattggatagtgatatggtttggctgtgtcctcacccaaatctcatcttgaattcccaagtgttgtgggaggacttggtgggaggtaattgaatcatgggggcaggtctttcccatgctgttcttgcaatggtgagtaagtctcacaagatctgatggttttaaaaagaggagttccccgcagaagctctctctctctttttgcctgctgccatccgtgtaagacgtgacttgctcctccttgccttccgccatgattttgagggccccagccacatggaactgagagtccaattaagcctctttcttttgtaaattacccagtctcgggtatgtccccaacagcagcgtgaaaacagactaatatagatggtctaagatggccttactcacatgtttgacagttggttctggctgttgtttagacttccatcttcatgtgatttcttattctcagagagaccagtctgagcttattcacatgttggtggcagtattccaaaaacgcaagaacagaagttgcaaggcttcttgaagccaaagctcagaaggcccacaacgaaatttccaccatattctatcagtcacagccaagtcacaaagccagcacagatataagaggatagaaggataaagcaaaagactccaccttttgatgggaggacaggcaacgtcatattgcacaaaagagtgcgtatataaaaatacagccagaaattgtgtctatactttgacatcttctatcttctacaaaatagagaaatttttatagtacctatattttcaactacaaataatcacagaagttctgaaggacaaaagtaggtactagcttgcattttccccaacatgaagtaatattactctgctgcttcagtcacagatttcaacagaagaccaagatccagactcaacgtctgataccatcatttaagttgcttggttgggtgatttttctgtgttttaagagccttcaacacttttctattttttctaatcaataaatttccatctaatttgatatttttacctacaagagcagctttattttatttgtttattgttttttgagatggagtttagctcttgttgcccaggctggagtgcaatggtgcaatctcggctcactgcaacctccacctcctgggttcaagcgattctcctgctcagcctcccaagaagctgggattacaggtgtgagccaccacacctggctaattttgtatttttttagtaaagacggggtttcaccatgttggtcaggctgctctcgaactcctgacctcaagtgatctacctgcctcggcctcccaaagtgctgggattacaggtgtgagccactgtgcccggccaacagcagttttctaattgaacattccacaacaaatagcatcaccaagaaatctagattgagtatgtagcactactagaaaacatgaagtttataaaagaagaaaaatatatccttataaaaagcacatatacttttttcctatgaaaataatcccgggatgggggagggatagctttaggagatatacctaatgctaaatgacgagttaatgggtgcagcacaccagcatggcacatgtatacatatgtaactaacctgcacattgtgcacatgtaccctagaacttaaagtataataataataaaataaaaaaaagaaaataatccctagagaaaattttaattttgtgatgtagttaattagctatgtccaaagatctattcatactgaattatgaagagatcaaatttattacagtaaagaaatgataattgctaccaggacttcctttaacacgtgtttctctaaaagattcatttgcagagccacagtctttaatacaatacaacctattttctttgaacaatttaatggggcaggatatgtcactaaacataccgcgtaagaattgcttctatggaaagacagaggtaaaggaaagagctacttgcttgtttgacaatatggtgaacagagaaacagtttggggaatgaaagggtattcctccaataatggtatttctacatttcctaacaagaaattgatccctaaaattgtcattcttttcagctgaggatgtgctacaacactgcttcatagagaaacagctggaaacttaagtagcttacaatttttgacaaattggtgctgccaaaattataatagttaataacaaggaaaacctcaataatgtgaattgtgtcaaatctggttgttaatttattttaaaatcctgattatgttatgagaagccatatgagaagccaaacatacattcaactggagaaaatgccagtagccaatatcacctttggaggctagctatttctcaccacattcagcaagctatcatagcatgaattgctgaaattagataattctaactgaaaattaggattaaagataaccctatgctatagttcaggcataggtaatctactcctcaatttatttcttatggaaatcttataaatatattaaataaccttattttgtttaattatttcaaagtactatatggatgagagatatattgtacaggtttatatggaatagttaacacttttaaaaaatagtgactattctaacattttttaattatattgctcactaatcttaattgccaccatttcaaaagacagttccaaagtgcatcttgaacaaacagaaaagcaattagcctaaattaattgctttgctgatgtgatttgcagtaggtatgcttggtggttttgaaactcctgccagtgctttcacaacttgatgttctgatgatttttagcctctttttgcaccagagcaattaaccagataattgttctaatgtgaacctggccttaatcagtgtgtttaggttcatagtagcaattaaccaaacactaaatatacatttgaaaagaagcacttaaaagtactacaagaagagctaaagaaaaactcatacaattttttttctcatatagctatactttttacacaaagaagcaaaaaaaaaaaaaaaaaaaaagctgcaactgtctcctcagcctcttttcaattaacacaggtataaatggaaggcaggcaaagtttctggttcctcacttcttcactcaaagtattccaaagtccctattaaaagggcaaaatgcactgattgaacattggaattctattccttgttcaaaaatgaggctatggctttcagacaaatggcatgtaatacataacgcaagctctatctgaatccgaacaatgacattaaattttcactttatgaagcaccaactttattcagaaataaataaatctgttagaaagggagaatctgaaccaattgcctggatttcagccagagtttcagccaaatttaaaagaaaatttattcatcatacaaaagcatgatctataattctcccaacacgaatgtattaaattaatcctctgagcagggccgtgtgtgaggtgctgattggaagcaggggtggaggggggctgtgaagtgagggcacagggcgcaagatgaagatccaggtcctcctcacaaggagaaagactcataaacaaaacgtcacacatccgcacaataatatatgccaccagcagagccatgcgctatagattcagctagacagtaacatgatacagcacttcattacaatcaacattattatttcatcttttctttaaatggaattcatattcattttaagggaaattattagtagcagtgcaactataattgttaagtaacaactttgatatttttcatacttcagtaagtgaggagtaattgtatactgtcttaaattaaatgttttatcagttgaagaatgatatacataaaacctttccattttcatgaagcgtaaaggttcaagctgaaagtattctgtcattcttcatgtcttcaggaaacacttccctttcctaatctctgaaaggactgtcatacagaaaatagcccagacacttgcatgtcatgtctgccatttttaattattaccaatcaagttccagcaatttctcctatggttaagcatgtgtgtacctatcttctaaaatatttctatatgccactgttcataaaatattttaggctgaagcaaaatcccttgcactaaattaataactaatcacaggagatatttatcatctcaagtcttttacaagaaaattgtcagatttaatcacctttctcatattttcactatttactgggcttcatttatcacacatttttaaattttgacaacaatgagttattttaattgccacttttggtttggtgaattaagaataagacaactcctgggagaagtgggagatggtataaatttgtccaagcagtcaataaggtatcatcattttcatcaataaatgaagattttcttcattgttggcaattttaaaacagatctgagactaggatgtccctaaatccatgggcttataacgccatattcatcatcatataaaatgtatctcattctttcctataatttaaaaacaaattatgatttcataacaaggaaatatgtttaaatactgcaagctaaatgcgtacctctgtttactcatctttttatggcctgaaaaacacaaaagcagttgcagcatttagagtagcacatccagaaatatccgtaatatgattctatgggagctcttaattactactatttgtatttgtagaaatgttcacttatgcactattgctcactaggaaccaaagacaacacagaaattaaaaattaccattacatgttaggaccataataaatattcacattattctattagacaaaataatgtcaacatggagaatcaataagccaaaatcacccacatcaaattcagtcccatctcatctcttgaagttaaaagtcaaagcaggctgaaatatatacatatcatatagatttttcctttaaagtgattttactaggttaaatactctggtgttacatagtaagtagtatttccttaaaaatgatattaaataactataagtactaaaagaatcaatatcagaactaatatttaatactactacctaccaaacaactgaaaaagtttatttaaatttgaatgcactaagaacttcatctgaggataaatgcacaaataattttaccagaaaaactttgcctgttgtagcaaaatatcatcaattatttgaaaaaacccacatacttaaaaaagtagagattaattttgccaattatttcttgccaaaggtactgaaccatttgatgaagataactttcttctttttaattgaaagacaacttattcaaagtattagaaccagtagtctcctttaatctgcaatggttaagtattcgctacaacctacaaggaagcatttacagatagtgacacatttgtaaaaataattgtgcatcattataagttaaataaatacctattcaaaattcattagtgaaattctttttcagaccaactatgagtcatgtgtagtacaaaacacaaaaatgggcaaaattttctacttttcctcaagaaacatcataagaaatgaagagtatttacaaatggggttaattggaaaaattactttttaccaaaaataagctgttttttaaaatatccacaacttgatatatgcagtaaaatattcaaacatgtcaccttttagatatcccatatggaaaagcaaaggtaccattctaaccatgttcagaatgatcaaccatgtctgatgtctgaggtcggatgaccatttaatttatcatttaaattaaatattctggaacttaggaacagcagcagcacaaatactaaacccgacagaatgccaaaacaacaggcatgggttggaactatcctggtcaaatcaggatatatggtcactctaggtctgaagcagaataaggacatggaagacagtgagcccttcatggtaggagcttgaactctgaagaccacaaaaatgggttccagtcttggttcctctagttgtgaactattcaacgtgtctgggccttaattcctttgtttgaaaatagggataattccttcctcagggttgttgtagagattaaataaaacaatgtgtataaacagaacagtgtctggaacacagtataattaagtggtaactattattagctattgctattatccttgctccagaaaaaaaaatgtatatatatatatatatatatacacacacacactattacctcactagcactacatggccaatcatggttttagaaagaaggtctaatggatagaagaacagaaaaggcatggtttcgtatcttattttttttgagacagggtcttcctctgtcacccagactggagagcagtggcacgatcacagctcactgcaatctctgcctcccagtctcaagcaatcttcccagtctcgagctatcctcccagctcagcctcctcagtagctgggtcaacaggcacgtgccatcatgcccggctattttttaaaaatttttttataaagacggggtttcaccatgttgcccaggctggtcttgaactcctgagctcaagtagtccaccctccttggcctcccaaagtgctgagataagaggtgagccaccatgcctggcctcatgattttttaaagatagtttggaagcccggaataatagttactccaatatcaaactatctttctagggatggtcttacacataattgtgaatatgtgaatacaaaaaaatagtgtcaaaaatatgcttacctcaaactaacgtcactagtttagaaagactccattctgtttctataatcctctcagaactcagtaaaatatatttcattattctttttgcaaaaatacaaataatgtcatagacaatacacaaaactattcagtggattgcagaaataagctaaaattcagttttactaaagcttcacctaaccaggcacattattaggcaccaataagtatgcagacagattgctctgcattctatagaggcaaggcggtgctgctataaataccacccccaagcagcttcaacagtcagcattatttttgccacctctttatttccaagttttcaggcttttatgatagaaaattgctcaaacttcacactcaatactccaaggtgaaaagtatttctctcctccacaccacttaactttaaaagaaaacaaaatattctcaaactcaaattcaactctgcctgctggatttaatggataggtttgttccccttgggcaatctttaaacctcagtctctaggagaattaagtaatattaggggattgaaatgaaataaaattctaagtccactgtgacatgacattcacaggaagatggtagattatctatccagaccttgaacacttataaatacaatatatagcatatgttcacaaaacaattcttggaaataaaacacaatgggcactcagcaaatattttatatcaccaacacctgctcaaatcctctctgaactttatttctaaatatcaccgttttttattgaatcaacggaaatttgaaagaagaaacagaataaacatccagagaagatcaggggagttagaaaaatctttatataaagccacgttgagttttacatgagccaaggtgctgtcagtctcactgaaaggggtggtggagtaatctgtcactctacaactttcacctcaatatacctaaaaaaacaaaagagggctttttctatacaaaaataaaaaaagagacagagagaatagtattaagattttttcttaatattgaaaacaaaggaatcatgaaccaaacactaaacattgccaatgaattcattttaaaataagcaacttcaaattataggtgtggagtttgagggactttaataaactagtccaaccctccttataattcaggaaactcctttacagcactctgtttgaacactaacaaagagtgcattctctattttggaaggcagacaatgaaaatcaaggttttaacttattttaagctgcattctgtctccgtctataacttccacctgttgactaacatgccagtgcctgaaatagtaaataactaatttaggtagactaatgaactattattttttaatatattttaccagactcaatttaaaaagaaccatatgatttaaatatgaaatatctaaaattctctgcatctcaattttaaggaaggataattcagtttggtgggaagagtggataaatggaaagggggccaaagagaacagtccattcatcatcctggaaagaatgttgacgtaagaaaatgcgggcctagtattcttgggtccacaacttttccaaaagcctgaattcagaatatttatgtgaactataccaatttttaaagtgctggcaactaattcaaaatttttaaatactgtatatgccaaacaaaacagctttgtggactagactcagctgtggcccagaagtttgcaacttcaaatggtcttatttaaaagttacttttaaagagaaatatctggttgggggcagtggttcacacctgtaaccccagcactttggggtgccaaggtaggcagataacttgaggtcaggagttctagaccagcctggccaacatggtgaaaccccgtctctactaaaaacacaaaaattagccccacatggtggggctgtaaacccagctacttgggaggctgaggcaggagaatcacttgagcccgggaagcagaggttgcagtggtctgagattgtgccactgcactccagcctgggcaacagagcatgactccgtctttaaaaaaaaaaagaaaagagaaatatctataggtactattttaacctctagtacataaaaaataaaatagcaatattttgtagatcttattttttacttgaaagaaactggataacagtctaagatttaaaattctccaaattttagagtgtgcactgatgcaatagcttcccttacataaatacaagattcacacagcaaatcatggcaatataattgatattgacaacaaccctggcctttgttatgctttgtgactttagctaccggatgttagataatcttatttatcttgtattatttttctatattgttctcctaattcatgagcatgcatggtcaactgtcaaagaaaggctcatatatttgataatccccattatcaaatatatgatttgatacatcataggattaaataaactaagttcattttcaggaccaatattaaaaattgaaatggagagattacctttgatagtttaaaaactgaaaacagcttttgtaaagatctattaaaatcaattagattttatttaattcttattaacaaaaaaagaataaaagaaccattataagtatattgctataacaatgctcagaccagttttttacacatcagctgttacacccaaaacatgctgcttctggactccgcgtcaaacatataaaaatgttgtagaccaaattggatgtgaaataataaagactgatataaatacaaaaaaatttcaataaacttagaatcagggagtggatgagacgtaataaccagatgtttaatttaaatcactgatagaaatagtcagtgtcctcttttcataaaacacttggatgttatttgtattcaaaagcaatggtaaatgtcaaatgactactagatcatccttctgaatacaagaaaatatcatgctgtttaactctctaaacacaaaaagtgcttttggaaaaacaaagataaagagcagcatgtcttagtcacagagatcaattcaaggaccagaaaatgctaacagacaccataaagtataacagtaaagtctttcaattactacatattttacaattttgaacttaaaaagttcacagataagaattattaaaacctacgataaatgttatatataaaggactgtgacaagtactgaaatttatcttaatgtgagaaatcctttattaaaactagcaacattcaggataaatctttgtaataggtattgtatataaattaatatctaaaagttccattatactttcaatatgagagaaaataatgagcttagttaaaaaattaagaattttatatataaatgtcaatcgtatgtgaatcccagctatgacgcggaaaattgactgattagccattcactttttcttgtttagagtttttactgcaatgatgatggaaaaatacatccactgaaaagccaaagaaagtcaaagaaatggtctaaatttaatagaaatagtatgaccttcccctgaacaaaagacgttgaagagattaaatgagaacacgtgtaaagtgcctatcaattacctgagtaataaaggttactttcgtcccctcgatccttacaaggctcactattatcattaagtcttatgtcacctaaagagagtgacctttgagaacagcaggaactcagtgccccacagtctgagacacggtagcaagtatttagtagggggctaataaatgctttctgatttactggaggataataataatgaacgaatgtaaaacagaattaattgataggctaaacgcattagtgcattccagtgccctctatatggaaggttactaacccatctcagctaagtgctgaaattataattaagtctgatgggaagttctagatttataccaatataactacaaatattacttagcttagtaatatggcatggcaagaacaatgagatgagtaatttagatgatactgcaaagtgggttttaatgtttgaaacttctattacagtatacaggataagtgcaagtagtgtaattaaaacctaaaagagcttgatctttaaaactctattgctcaacctcattaaaatgcatgttttcttaattaatccaaacttttccattaaaaacataaaaatacactttcatttcttgcaaataaatctctacaatacatatatttaggatcaaacaccaaataaccattagttaagtaggaaaaaaatgactgaaatagcacaaggtttgagtacatgaagcctaacaaagggaaggaaaggcaaagtgagagctctcgacattttcatttgtaaattacccagctacaacaaaataagcatttaaagaactagaagattagaaatccactctcccatctgtatttaaatgatacaaacctaagcaaaatatttacttagataactcatacaacgaagtatagaccgtatcttatttatcaattatagtatctcccattaaatgactcttctacacatgtcctgtatacagaaaattgttgtggaatataatcaccttattgcagaaacagttttctatttttttttttttttttttttttgagacagagtttcgctcttgtcgcccaggctggagtacaatggtgtgatcttggctcactgcaacctctgcctcccaggttcaagtgattctccttcctcagcctccagagtagccgggattacaggcatgtgccaccatgcccagctaatttttgtatttttagtaaagacggggtttcaccatgttagccaggatggtctcaatctcttgaccttgtgatctgcccgcctcagcctcccaaagtgctaggcttacaggcgtgagccaccacgcctggcccagttttctacttttaattcaatgcattaccaagaaatttactgtaatatattaaactaatgttagatatttaaaaccacaagatagtatttatgtacttcattatttgttatgaatagctttttaaagattactttaaattttctatataggatgttgattatagagaagaattttactttgtaaactttgttttcaggaaagttaatttatttgaattttctttttcttaaatgtttcaatttcagtaactttaggggcacaagtagttttggttacatggatgaattctacagtggtgaggtataggattttggtgcgcccatcccctgaatagtgcacattgtaccccataggcagtttttatccctcgccccctccgagcctcctcacttggagttcccatgtccattataccactctatatgccattgcgcaccagtagttcaacgcccactcgtaagtgagacatatggtatttggtttttgattcctgagttacttcacttagaataatgacctccagttccattttctttagatattgatatatttcatatggtgaatattattcaaaaacaagagagaatttttataaatggtgatcacatacccattctagaggagtacatttttcaagaaaaattttactaagaaagagtgaagtcaaggctatcacataaagagtaattcagggtaatttaagaaaatgtcactagaatttaccaaaattggggaaaatggagtctacatggttttattttaaggtataaaaggaaatttaaaaaggggaggccaggcacggtggcttatggctcatgcctataatcccagcactttgggagatcgaggcggcggggcgggggatcacttaaggccagtagtttgacaccagcctggccaacagaaacgccatctctactaaaaatacaaaacttagtcggatgtggtggtacacacttgttttttcgtttttttgtttttttgagacgaggtcttgctctatcacccaggctggagtgtagtggtgtgatctcggctcactgcaaactctgcctcccgggttcacgccattctcctgcctcagcctcccaagtagctgggactacaggcacctgccacaaggcctggctaatttttttgtatttttagtagagatggggtttcaccatgttagccaggatggtctggatctcctgacctcgtgatccgcccgccttggcctcccaaagtgctgggattacaagtgtgagccaccgtgcccagccagtggtgcacacttgtaatcccagttactagggtggctaaggcaagagaatcccttgaacccaggaggtggaggctgaagtgagcagagatcatgccactgactgcactccagcccgggtgccaaagcaagactcggtctcaaaaaaaaaaaaaaaaaaaaagagggaaaatatcttaaatttaaagcattatctgacacaaattatttctcctatttttaaaagaatatttaaatctaaacaggttctaattttagctgaaatagtgctttctattttgaaaggaaaatatttttggaaacttatcttttaaaacaaaattcttggaaacttactgggcaagaatcctctcatgctcatatttacaaatctacctaatcagtagtgctagcgctactctgttgttttcattataatagtctacttttaagggttttcctgtatttttttcttccttcctgcaatatttcaaagaaaaatgggttaatcattattcgtaagaaaaaacttctgattctatactgtatattaagctattcatcacgtgacttccatttctgaaacaaattacatatatatatactgagaaaaaaatgtcatccttaggtgctgatatggtttggatttgtgttcccagccaaatctcatgtcaaattgtaatcccaatgttggaggaagggcctgtttggaggtgattggatcatgggggcagatttaccccttgctgttctcctgataatgagttcgcacaagaactggatgtctaaaaatgtgtagtacctcccacttcactcttttccttccttctctagccatgtaagaggtatctgctttttgccatgcttgtcagtttcctgaggcttctccagccatacttcctgtacagcctgcagaactgtgaattaaacctcttgtctttataaattacccagtctaaggtagttctttatggtaatgctagaatgggctaatataggcgcagtggtgtatgcctgtagtcccagctgcttgggaggctgaggcagaagtattgcttgagcccaggaattgtacctaggaaacactgtgagactccatctctgaaaaaaaaatgtcacctttaagaaagggtttaaatgttaatgtttcagatggtttctccaaatcattaaaatcaaccacaaatgttgcaaaaatgttaaagtgacaaataatatatcattacaaacttacaagcatggcaaaaagcaggtatgtcttagatggataacaaagaaaaaattcaacagcctactattgttacaattgttgaggcaaatatttgtattaaagcacctaaaaactttgctgcacttataagcaacagatgcattaaaagtatagatctagatggttttcaaaacttaaacataacaatttgaaaaggcacagctgtattcaattttagttatagacatgccttgttataataattaatatttcctaaatgttttcctctagaaaagtatttttaacatgttacaatggttacctgtcatttatgatccagttcagacagagattgagagagctaagatttttgcacctcttgacaatttccatcacggtttcattatccagttcagtgatatgacgtaggtccaagctggaaaggtttcttagctaatgagataaataaaatgaaagatgaaaaaggtaaatgctacattcactctcaaaacttacaaatgtagtttattacaaggtagagtatcactgtaaaatatttaaaacagataggctagaatcttttaattaaagatattgtatatgtaatattttatacactaaattaagcatgagtgtagtatagaaatctatggtgaatatctgaatggcaacaaacattaaaagaaagtagatttggccaggcgcggtggctcacatctgtaatcccagcactttgggaagctgaggcgggtggatcacgaggtaaggagatcaagaccatcttggccaacatggtgaaaccccatctctactaaaatacaaaaaattagctgggcgtagtggtgcatccctgtaatcccagctacttgggaggctgaggcaggggaattcttgaacccgggaggcagaggttgcagtgagcccagatcgcatcactgcactccagcctggcaacagagtgagactgcgtatcaaaaaaagaaaaaaaaaaaaaagaaagtagattttacttaagtatcctaaaaatcaagttagcaatctattgtctaataggtaggcaaggtattgaatatattacattaagtacctacaatttgagaagattattctaacattgttcaatttcagatattaccttcataattatgccatttctgtatagatttttttatttttttaaagatgaaatatgactaaatggttaattcagagatagcttggtgatatattatcaatgtactccaaactgtactattatgggtatgtgtttcatcataaaatgatataaaatgtggcttaagaagcaaaaatttctccaggttccaccttctccatgttttcattttctatttctttaagtttcttgtcttccgctgatgtttagcctctaaagcaaattaatgataatatttacataaaggtggtaggatcttaattatcctcttcaaataagctaccttttcaaatattaagctatttttgcttaataatatgcaaaacttaatctggaggcatatgatagaccaaataacacaaatacccctcccaccaaagatacctatgctctaatatgttaccttataaggcaaaggggattttgcagatgtgattaaaggtatggatctcaagatggggagattatcccaggttatctgagtagtcccagtgtaatcactggagacccttataagcacaggcttactcagagaaagccagagagatgaaatggaagataacaggagatgtttcaatcatgaaagggattcaagctacctttactagcttcaaatattgaggaaggggccaggagtcaaggaacatgggcagctttagagttggaaacagccctcagctgccagccgggaagagataaggacctcagacttacaaccttaaggaatttaattctgccaaaaaacctgtaggagtgagcaagaaaacagatgctcccttcagaaacacaatccagctgacaccttgaatttagcctggtgagacctgtgtcagacaggcttctaacttacagaatagtgaaataataaactggtactgttttaagttgctaagcatgtgagaatttaagtcagttcagcttaaactccaagagaagactagacacttgaatctccaatgaaaatgttctatatttctgctgtctgatatagtaatcactaatcacttgtacctactgagcacctaaaatgtgaccagtgtgacaggggacctgaacttttaattttatttaattttaattaatttgtatttaatttttatatctgcatgtggctaacagctacagtgttggtggacaggacagctcaaaagaatggtcattgggagggtaggaggtaaattgccaggcagtactcacactctttccacctcagctcccaatgggagaagctatacagagagagttcatagagtcactactcaatgctctctgaagcatgctgcccaactatggagataaatagagatagctgcgacagataaaacacaaaaaggtccacaacagcaggtaaattctttctaactgagacagaaagtgtatgtaccagcttcttctaagggctaggttgtaggcattagtaaaggcagagcttcaggaaaagctctctgcaattggcttatcaggtaagatgttcaaggaagtcacgtccagtctagtatgggactcagcaaaatgatgctccagaacagaggcaggtcaagcaaagaaatgggttcttacaaagttcctattcaataaccacaggttaagggttttagcaacatcagaacataactggtacttggcaaccaaagcacacaggaacggactcattcttgttaaaacagacctttctggctgtctcagcagcttcaggcaactgaccagtcagaaccttggtcaactccctcagtttccccttcctcaaggttcaccttactgaaataattataatcaatactaagcccagggctcaaaggtgagctgtttgggctctaaagttctgctgcaaacatagcgcctgtttcctatatcttacctctcattgtagctttttttttaagtatctaaaggtacataaaaaagacagacaaataaaatacaaaataaatagcaaataagtttctataacttttctgacctcactagaattcacctaagggaacaaagggctgatatgaacgctctttgctgtgctttcttcctttccaatatgtgatctgcatgtggtgggcacagaaattgaaatcacccacagtcatggctgggcttggagcaaaatggaaggccaacatcttttatgaacaggagacaccagaaggatagatggctatgtacatttatcaactcactagttctgtgggtcaggagaccagacatggcttagctgtgtcctctgcctagggtttcgcaaggcaatcaagatctcaactggggctgtatttctttctagagctgaagttctcttacaagctcatgtagttgctggaagaattcataggatgggatgggatgggatgggatgggatgggatgggatgggatgggatgggatgggatggcaataaaatgaaagagacaatggtaagaaaaaaagcacaagtctcagactcagtgtttttttgttgttatttttcatgagaggacggaaaataatagtctgaaagcagctatgcagagcaaagaggatctttgcccccacctcctgaccctgagagaaacacagtgagaaaataaacaggtatggtaggcaaaattctaagatgatcccaatggcctatgctctatcataatccctgcccccttgagtgtggacaggacccacgattaggatggaaattctccttacacagcaaagagatttagcagctataattatggttcctgattagttgacactgaatgaatcaaaagggaaagtatcctaggtgggcctgacataatcagttaagcccttacaaaggatctagaggtctgagaaattatcctgcttggtcctgaagaactaagcaactgtgctgtgaaaaagactatgagagccttctggggattggccactggctgagggccagcaagaaaataagggtgttagttctacaaccacgaggaactgaattcttcaagccactacatgagcttgtaagaagacttgagctttagaaagaaatacagccccagttgagatcttgattgccttgtgaaaccccaggcagaggacacagctaagctatgtctgtctggtcttctgacccacagaactagtgagatgataaatgtacattgttttaagctgctaaacttgtagtaatttgttgtgtatcagtagaaaacaaatgcaggagggctgcggtgacgttgtattgctgaagaaaagccaggcttcactcaagacaaggggaatatccttgcccactttaaatgctgaagctctctgtccctcttcagatacttatgctcacaaaagcacagagtgagaggcttagtccattcagtcttctcctctaggcttgtcttcagcttccaagaaaatacttcctagaaaacagtcagttttgatgtggccactcttgtcagaagaaagagaaatagagagagacagagagtctgagacagagacagacagagatatctagaaagtggggaggtcttcctaaatttcttaaaccaacccttactcatgggaagatgggtttaatggaaacactttatgaaaatacttgcacagcttctggcttttactcaattcatacttgtcaatagtcacatgcttccatatatatcttaacacaggttaactgtctttttatgttccctaaagttttatttttcacaagattttgcattagggctagataggtggataaaatggtttcactggtcaagttctcttgtttttgattgagcaaagatgaatttgtatgtgtcaaggatctgagtcactcttaaatttgataatcctcatattactgtcccccacacttctattttctacctaaaaatcaccatttttttaaaccacattgtctttacagctagctttctttatagggcgtttttgatctccacacccaaaaagtttttatcactgttggaaatatactgttctgtaacatgtaaaaagaaccagacagcccttgagaactgcagatgctgggcagctttctgggctcatgtgctgacagcagccccatgttggtatcacaggaaaataagaaataaactacattaaatggacccatagggctgcctgtaaatactttgacatatgactcttaaacctataaacattaaggattaattttgctacttgtagctatatgcatatgtgaactactgaatagaaccatgcaaaatacacatatagcatgactttattttcccaatttatcctttaccatagtttctaggaagattcgaagtcacaaaaattttatccagctacataaatatctcctacacatgcatatttggggttctagcacagcttctgacacagagtttctatgtgaattcttacccatctcttgccttccttcattgtaatgttatctctccatcacaacagtttaaatgtacttaatgccactaaactgtacattttacatggttaaaatagcacattctatgttatgtacattttaccacaataaaaatatcacatatcaacaagaagatggtgagagcatataataaaaattgtgtagagaagaaaatataaagctgcttgtgccagttcagtccttcatcataggaaagataactgagtgtcaacaaggctgggataacttatcaaattgcagatacttgatagagagatgttggcaaatctgagctattttatagacttgtgaaaatccaaaaatatctaaaatttgagttctatttgactcttgaacttttagaaagcttgcatccaggcctactcctcacaataaggtagactagatgacggatgacactgggatacttgtgactcttactgcctgtatgtactgtccataaataaaacatttctcactcttccagtggagcacaaatgtatacatgaagaaacaggtttacttgagctcttatgctccaggcttctacagcaaccttaaagagtattttacttttcttttttcatgagctgacagtcactgcattcacatggccttccctataaccactttggccaactcaacttgaaatatgacagtatccaaaggcagttccaagagacgaatccccagtaaccagcatcattacaagacacaaaactagcacttctaagagatgtggcatttttattcaaaactgcacaaacagttctgtcaaattcatcacattccttccttcactatgggaatttcataatggtgcccccagtgtttcataaaaagctacataaaataatccttcatagtctcaaacagataattacatttaggaaactgacattttaattaaacttactttccttataattcactggtagttgtgagttttaaaaatcacagaggatttgaataagcaaagccttacaatcaagatctaaatgtttcactccaatttttaaatatttagtaaggtattttaacagaaacccaagtcagaatgtagaatgtaggtaatcatctttcagtttaatactgcttttattagaaaaaaagtgacatctaattaattcatgttaaagactaaaattagtcaatgattggtatggccatgtatgtacttaaatataaaatgagacactaaaatgttacctaggaaacataagcttggtggattatcgaaagacctcaaatgggtcaggagttcgagaccagcctgaccaacgtggtgaaaccctgtctctactaaaaatacaaaaattagccaggcatggtcaggcgtacctgtaatcccagctactcaggaggcagaggcaggtgaatcgcttgaacccaggaggcagaggttgcagtgagccgagatcgcaccactgcactccagcctgggtgacagagcgagatgaaagcaagaaaagaaagaaagaaaagaaaagatcagaccagacctcaaatggcttccaaattttcttaagaccctacaaaagttaaaaatgaaacaaaaccctcaattgtaaagactgactgaagtggatgaattaacgaaagaggactcacattaccttagcaaaggcagcatggatgttctatcacttcaggactctgaggataatttaagtgacacaagttggaagtgttaatttttaaaaataatgaaaacttctatatagttaaatatgttcaaatgtcaattagtacctaaattagttcttgccagtactgcacatattgactttattggaccaggtttctaagtaattgtaatgtttagggagcaaagtcaagggttaagacaggctgccttgctgatgaaggggttgctgggcatagattagcacgacacactaatccgccaaacagctgtcaggctgtcaagatggagaccaagggagatcctaaaggcagaggaagagagaagggtcagagaaaggcagttataagaaaactgggaagagcttcctattaaagacagggagagtgactcaaggagaaagggaaaggggtggtagcaatagatcttgaagtataaaagtagaaaaaaagtaaagaaactaagactgctgggaatgaaaagaaaaggggcagggagaatttctgttcccaagcctagaaagacttccatccttgagaaggtctgttatctacacttagagaaggacttggttggacaagggagggaacaaggggtatgactaactaggctggaatctcagctagggtattaaaatgtaataaaaatctaaataagccacattcattttggacatcaggcaaatccttcccagcatctgagggtagaactgaaaggctctaaatagccttaaagcttcacagagacaacagcaattgctagtactatgaaaataggacttacagggtcttggaattaatagtagctatgatcttaattctcaggcaccttctctatgtattctctttcacccactgccttcttaatcacactgggcttttgtctctttgcattattttcaaatccaaggtgtggttttgccattctcctactagatctgacattattctccattttattcattctgttttgctttctaggacattttacggcccgcttctcctcaaagctgtcccttctaactcctttttgccacatcactagccagattaatcttcttgaaacaactttgatcaaatctcccaccttctccaaagcctttagggaacaaaaatatttctgctgcaaaaaggaatcccagagcttccctatcaaggccctccattgtccatccctaccattccctgaaatctgttaagccaactgggatctctttccccagattttgagaagttgttctcactacgctcggtgaactgtgcttattattttaaaactgctctcacttcacttatgttattctgataacttagaagtatctgttctcctctcccttcctcttattccactacctggttcaaatctcatcttctccacaaagtctttttgattaatatagagaggaaaaaaaaaagtcttcgaaatatacttgccttaatgcaaattattaactaggcagttcccaacatatctatgctctttaaatggggaatcattaattggcaacagccgccaaggaaccaggtaacaatctttccttcctgctacaactacttaggaatgccctctttgacttctccatctcttcaccctcccttccctgatcgcttccttctccccttctagcctttcctagactgtgctgctcaggatcaatctctcatcacaaacatctgaaatctaatcttaatgcttggcctaatctgagtctctgaggtagcagttgtggtgactcttgattcattcattcacattcatttaaatgtttcctgagcacctggctctaaccttggctccaagttaggataaccagcgaacataaaaaagaagattgacggccaggccccatacttagagattttgatttaattgtcttggaacagggcgagccttcagtatttctgaaaaagatacccagttgatctcaacctggactggtaaccactgctctggtgcagcataattgatttttaaaaatccagttactgaaagtacaaaaataatttgtaaagcttagtctctttaatcacttaaaaaatgcaaaaagtattattcatgtagtcaataactattgattaagcagctattgtgtaccaggaacttctccagctgataaaaatacagcagagaacaaaaaagcaaaaatctcagtccatagaatggttatattcctagctagggggttggagggggcaataaataaaataaataaacaaatatgttaaaaggtgttaagtactatagagaaaaataaagcaagacaagctggatggaaaagagagggagggaagatgggtgtaattttaaacaggcagtcaaggatgatcttactgaaaagatgatatttgcgcaaagatttaaaggaaatgaaggagcaaacaaagccaggctgatatctggggcaagagttaggacagtgcaaaggccctgagatggaaactgtcccagcactttggaagatgagtaaggtgctgcagcagagtgaatggaatgaagactagcaggagacatggtcaaagaggagatctaagaaggacagatcacatagggtcttgtgggtcctgtaaggattttagcttttgctctgagaaatttggggaacctctggaggattttgaacaggagtgtactatgttctaatttagttttgaaatgatcacccaagcttctgtgttgaattcagaacatagatccaagggtggaagcagacagaagctatattgaattaatccagtcaagagttatcagtgacttggaccactgtgacagcagttggaggtggtatgaagtgattttggctatacagtatttgaaagtagaatcaacagaattttttgacaaatatcttatggggcacgagagaaaaagaggagtcaaggaccattccaagagttttggtttgagcaatcagaaaatattgttgcaactaacaaagacaatttgggggcaggcagaaaagatagttttgttttgaatatgctatgcttgagatgcctagataaccaagtagagatgtcaaataaatttaggagccagcagcacataaatgacatttacgcctctacatttaatatataattgtattaattatatataaatgtgttaaattcattaagttagctaggtagaaagagtagtcttacaatttatagtgaataaattctgaattaattgattgaattaatgtgcaggcatacatctcacagtaataaaatagaacacaaacagcctagcccaattctttaaaaaacaaaacaaaacaaacaaaaaaaaaacgcttatagcaatagtgtcccccaggccatgtgaggcagttacaaggcagaattcatttccttagtctgtaacagcataattcagccttctcagccccagtgtatgtcctctgtaaagctacctgggatgccagcattcagagcaggagactctgccctctgtacacccactgatgttgctcactctttcaccatgttgttaaccaagctgctttataatctggtctaatttaagcatatgttccttccactagagtcaaaaggaagctactgcaggtcaggaccatgtcttactcacttttgtgtcaccagtgcttaacacagtactaggtgcattaaaaacatttattaaatgcttagaactgaatgagtaaatttgaaatcaggatcaaaactttagatatgactttatttatttaagtttccagaaatcagttctccattctcttaactccatcaaatgcaggatctgcagctctgcggctacatgcttttaaagttcttctatttgaacataaagtaatatgtaaacattaaataataaaaaactactttctcatagcatacaattagaggtcatttcagaacaagaagcataatgagttctctatttacatatttgttcttaaaattcaaaacttttttttaagagcctctgtaagttatcagtttgaagtatgtggcaggaattttgagtagttcaccaaaattttaatcactgtctgctgctgcagaaatgtgaatttgttaattggatttctgcttctcaatataccaattcagaatggatgctctgctcctcctctttcactctggcagtcacacagtctctaattgagtttttttcctaggacttttctttccaccaaatctctttctttcctccacataagatttctagagctcataacaaactacaaacagcacttaaagttagcagcgctaagcagccttgtcacttttttacccagcaggagctaagaatgaaaatttcccttcaattaaaaaataaaatattcacactgtttcacttaaagaagaaaacaaatcaaagcttaagtaaattaagggtaaattaagtcaaatgtgaatgcaagcaagaaaagactgcttcaactaattggactggttgtatacttcatttcctcatatcaagttcagagatctacaaaaaaaagagacagttcacaaaatttcgaaccaatttcagtcacttgcactcatggatcacacttcaaagggtgaaaagttttggaaatatattccaaatgaaagttttataatcttattttttaaagtagtgaaataactaaaatgccattagcccaagacgaaagcttaccatatccaagccaagtgacctgtacactggcctcttgatcttgtactgtctattaaagcaatacagtcaaatcatttcactcattatttctaaatgtgttaagctgaaaaacaaaggaatgatagtaatgatttttaacttaatgaatgttatgtcatatatttttattttctggcattccaaaaatgttacagaaatgttgtatctacactctcaaataaaatatcttttttttcctggtttacagtatgcaactgggactcaccttcacatggaaaatctcatggccttacattctcatttattggtctcaaccccaagttaataaaaaatgcctaaaccttaatttcagaaatcagtttttctatcccgtgatcagatactgtttcaaagagtggatgagaaactttcgtcttttgagccaaaaagctgtagtgcacaggatgataaccatcagctgagccacctgcaatctttgggtcttccacactgtcacaaaaggattctctaatatgtggagaaacaccatgaggcccccgtcaacaggtccctatggcttctctctgtagaagaggtttactgcatagacctagaacactctaagtcacctaggaagaaactaaataacctaggcattcagcagcagctttctctccttctaattttaagtcgtttttatgataaaaaattccaaaatgtatacataattctcccccaacccatgctccaaagtctgcaaagaaagccacaagtctaatattaataatctaaaaataaatcagttgggtcatccatactagtgaaacaggagtcacagactctggtcctaaaataaataactatgcagatttgaaaaaaatagtatttcttccacaatcttcagcattgtacttgatttcatttttcatggttattaccaaagtgctcccagtcacctgtcatggatagtgaaggaatgaacactttccaggtgagaaaaatcttagaagagtcaaacattttaaagggcaagtaaggattcatatttgaaatccaggtcaagaactccccaaacactgaatcagatcacatttgttttacttagttttacattgttctataaacagttccaagaggcaacagcatttggtccaccaagtatttcaatttgaaattagtaagttttacttcctgacttctgtaattatactcaatgttataagctggaagtgaatgagctaaaattctaggttaatgactatgctacagggagtatatcagttatcagtaagaaatggtaatcagaaagatctctctaaagttttccttgatattaaataatatggaatatgaaattattaaagatgataaaagtatttttgaaatgaggtgcaaaaatttataactttgatttatataataaagcactactttctgaaacaaagaaatgtccaactgtaaaactgctctctcaaccaattttaaccacctatgaattcaaaagcttcagccaattgaaataaaattaaaaataacaatatctagtatacatctaaggtaggactttaaatatcaacttatcatttaccttaatattgcatactttgggtcacttataacttctcacaccaatacaaaaacatgacgaagatttttttaaaacaaataaacaagtacagacaggataacatgaattgtcttttaattgtcaatcaaaactatccaagatacagcttcaaataactagtaaccaataactcaaataactagttcacaacagttaacttctttagtcaaatatttttctttacatttgcttctatagattgacattatagattacagcactgagaaaacatttcaactctgttgttgctagaagcatgtgtgaaaatgatctttctataattaagcagctagcactccaacctattcttggaattcatcatgaacttgtagctttattagtcttaattgtcatgtaactgcctgagcttacgtttctagctacagcttttctggattcaggatggcagtatagagttagtggtagtctaagaaagagtcaggtctaatttaaatcttatattatgttcaattctctgcttgtgctttgatgccaattgttccaatattctcttaaagaaaataaatatcatttctattgtcttaaatgtgatttcatgaaagaaacgcagaatgacacagaaaggaagatgtgttggtcaaggtataattaggaaaatagaaactactataaatatgaaattacacaaaggaaatttcattaagggaattggttattttggtgaaggagcagctaagaagacaaactggatatggtagcgtaagccagaaacttagcaacagcaggaaaccaccagcatcccaaagctgaagacactgaagctgatcccttcagcatcccaaagctgaagacactgaagctgatcccttcagcatcccaaagctgaagacacaaaaggaagagtcagtgttactgggacccacaagccacagtcagccaacacaagttggagctgcagatcagtccagggctggaaccacggaggagacagaggtgttgccagaaatgctacctgagttagagaaggagagagagaaaaacatttattgtagcttctgcctccctgtggcattcctgtctcccactaaatgcagcctgcaaagttaagccccccatagaatatatatagagaagagcatgcttagagagaagaaaggttctgaggggaaggaggcctggttctgagggcaagcagcatgaagcaaaagaaaagaaggaggaaggggggcacaggtttccagcaattaaaagaaacaaagtcactctaacgggagttctttataacaatccagaaacaggaatgattgccagagtattcctgtactttgcctgagaaacccacagtgctgaccaagtttgttttcttctttgagccagatgaaagctgctttcttagacacaggaatattgtttcactgttaaagattcaagattgatagtcaattgcatgttcaaaagggcctctgataaaacacaataaccaagcatttcctctggtgaatgtaacagagaaagttccagtgggaagctttttcttgaaaaaaaaaaaaaaattgatggccaatcatcccactgggatacaatcaattgaacagaagtctacagtgggggaagcagctatgctcctgaaggttttgtaaatacactgtgatcaacagcttttgtgtaaatgcctgtaatacgtctgggctagagagcaaacatgtgaagagctcaattgcctttagtcaatgtactctattggactctattactgggcaagtgtgtctagagaagcgggatctcaaaaccaaactctaatcccaaaattattagagaaaataatgagtaataacatgtaagcccaaattctgctaaaatgttgaggttccaagctaaaattttacaacactctactgtctcataaataactaacttctaacgattaataacagggaattactatgaaaatgaattccctatatttaaagaatgcaactacaataaagacacaacataatttatcttgctttcaatatccaggagcccctttagaatcatggagaacactttcgttcatcagtatagacttcacacaacattaaacaaaattgcaaagaaaaagataatacatagattctttggattagctatgattaacaactggcgcagtgtgaatgtatgtactgtgttgaagtatgcatgtaaatgaataaacaatatgtatagacacaggtacttccctgtggctgattgtggtagacaagatctgcccaggtgcagtaaaaatggttctgaaataagatagtttaattaattaaaaataaaatacagttaagtattttatacatgtacaaagcaattgcctataactattaatgtttttaataaatgttttaaattaatgtttttaaaataaattggattatatttaactctgtaattctcaatacatgcttacttcaagttaataaatgagatatgcttatttttttctcagtagtatattttctcattaaattaaatcattaatttattctcattaagctccaaacctggtttctctaattcgggcagtctgttctgctgatttagaaatgggaccccttccatgttcaatatcactctttatgtataaaccacaagactaggggaagtagagtgacactgatccttaaataaaatttctgccacaaaacactgtgaatgaatttgaaagtaaaaaaaaaaaaaaaaaaatgaaagcaacagctcataatctctttcttggataaagactgacctcatgtgttagagaccagataaaatagagttgatatcctttttacaagagtattttcaacaaaaaccacaatttacaaacaagtgtgtgataaacattcagagtggactgaggataatataagcaaagcaaaataatatttaaaatataaagccatgatccaagaaaggctctttcaaaaacaattgccaattctcttcattttatatttatatgtttatgttaaagcctgaagcaaccattttatcaaaagacagatgccacaaagaaacttatcgactcactttatttgttaggacttttataaactgagtcatttgaaagatgaattcatttattttactagtgtgatactgatacctattaccattgaagttgctgaaatgaaaatgtagcacaaacaaatacacattacaactagagtgtaagtaatagagttataaaagagtaccctcactgatcaggtattactgactaaacagcatgaaaaaataaaagtggtaagtttctattgcttatgtagatgttgtctatactaatttatgaaaacatcaaagtcactaatttgggcagtaataataaggtagaagagtatatcccagtttccccttagccaagggagatgcaatccaagactcccaggggatgcctgaaactgagaataatacagaactctatctatactatattttttcctatatagtaacaggtaggtagcatatataggatggatatgctggacaaagacgattcatagccctggcaggagggagtgggacagtgcaagatttcaacactacttagaacagctgcaatttaacacttactaagtgtttatgtctgaaatttatcatctaacagtttcggcctgtggttgactgcaggtaactgacacctgggaaaatgaaacagcagatggtgggatctactggatccccttattcagtgtattgctatagtacgagttttttaaatgctttttaaaaaatactattttagttacacagtgcgtttaacttaaataattaagcaacctttaatgggtcagcaggaaaagaaaaaaattatacaacaaagagtaaacaaacatagttattaatcttaacattcagcactgacactcaggtagaaaaaaggtcataaagtttttaagtaagttttattttcataaaattattgtatcttatgttaatgaaagaacataagtatgtcaggactaacaagttatgaggaactttcgtacatcatgatgaatattttttaattagcttttttttttcattgttcaaccacttctttagttatgtgccaagaactcttcctcatgcatccctagaggcaggtagatggtattactatccttcttttacagatgaggaaactgaggcagagagattaggtgatttgtcctaggtcatacaatcagtaatcatacaattagctttgttgactgcaataaatgcgttgctggccttggcaaacttctaagaaaaaaatatcaattaatggatcacatcaggcctagataatcaaagcttatattctcaacacttgatttttggctcaactcttaactgctaaaaagctaaaaagtagcaaaagcatggtcatccaaaaaaaccctttcataatacagtactcactaggtcatattcattagggaatatttcagagctgaatgaatttaagaacatattttttacatctcagaatatcactcaagcacctataattaatcagaaacaaatgaaatgataacctatgacaaagcagcaatattaccatttaagtagtaaaacagtgtgttctttctgtagagtaaggcaatctaaaccaatcgattgtttgaaaatttaaaaggcaagaaagttaatttttcatttctagtctctgaataaacaaaaaaaggaggatgaaaattgagttagctgcatgaatgaacattctttcagttacttatgttaaatcaactgaaaaaatcaattttgttttcctttaaaaacatttaacatttccaaccataagcacttttaaaatatgtgcttttcttgaagttctttaaatgtgattatgatacaagaaaatatcaaaagttttatctagctgtctgttaccttcctaaggaactctgtttttaaaaaacaatataaaacaaaactcaaccaaacccatacgcaacacatcccaaatactcggttaatgtttgtaagctgttgataaataaatattataaatataaataaaaattctctaccatcttaatagttatttaatataaggtcttttcttttttcttttttcctttcagagataggatctcgctgattgcagtggcatgatcatggctcacagtagcctcaaattcctgggctcaagcaatccacccacctcaagcctccagagtagctgggaatacaggcatacaccaccaaacccagctaattttttgtagagatgggtcttactatattaatagcccaggctggtcttgaactcctggcctcaaggaatcctctcacctcagcatcccaaagtactaggattacaggcatgagccaacacacccaccctaaaaaaaggtcttcttgactactgattgaaatcatttgtactgatttgatataaataaacacacaagagatttgtgacattatattgatgaagttacagcatttctaaggcttgcctttgaactacatgtaaaaataacttgccatttttggcatttcagactctacaggtagcctattcaacatataaaataatatatgttaatacatattatcctaagcattttccatgtcattacgtattcttgaaaagtataatattgaatagtacaattttatcatgttagactaacatcaacatttttaatttttttaccccttaaaagttttttaatcattatggaaattttcatatataaacaaaagtattgagaaggtataataaaccttcatgtcttaaaacctagctcgattatcaatattttgcatttttttttctttcagaaacagggtcacattctgttgcccaagctggagcacagtggtgtgatcgaaacttactgcagactctaactcttgggctcaaaagatcccctcatttcagccttccaagcagctaggaccatagcatgtgccaccatgcccagctaatttctaattttttttttagaaacagggtttgttaccctgtctctaaaagtcacatcctttattatcatacaagccatcctcccgcttcagcatgccaagcatctgagattacgggcacaaaactacattgctggcccaatattttcacgatttttgtttcctttattggcctatgcacttttatctttttcttgtttttagtccctttgtaatattttaaaccaaatccctaatactgtgtcattttaccagtaaataaagtatgtgtctcttactgataaaaatttaacaagcataccactatcattcttgacaaaactaacaataatactttgttatcattcaatgaccacttcacattcaagttttctcaataatctcaaggatatatattttaatgttgttttgttactgtcaggattcaagcaaaatctccacatcacatttagttgttttgtcttgagtgttttctataaaaatgtctctctttcttttctacaatgttttttccttagagaaactgggtcatttgcgttagacaaatctagatttagctgattgtctttttgtggtattatttaacatgatgctttaatcctactatttcctgtaaataggtaaatacagaggcagattagattcaggctttttgttttgttttgttttttagacagagtctcgctctgtcacccaggctaaagtgcagtgagtggcatgatctcagctcactgcaacttctgcctcccggtcccgggtttcaagcaattcttgtgcctcagccttccgagtagatgggattacagtcactccccaccctgcctggctaatttttgtatatttagtagcaagaatactatataaatgatgctgtgtactctctactgcatcacctcaagagtacttaaggtctgctgtctcacttttcttcatgctaagattgatcagtgagttaaatgctatcaacttcttccctccattatgatattcctacatgggaatatcaatccacatataatcgcttttgctttcattgatgatgatcattgcctcggtccattatttcaagataactgcaaaattataattttctaattctatcattcctcttttcatttgtcactagaatcctattcagaagaactttcccttatgaattatgtgtttacttttttgtaattcctataagaaaaaaaggataaatatgtgattctcattttgtttactcatttttagagtaataaactgctgccttattaagttccaaagatgaccaatgcgcttttctttaaaaacatctttactgaagaaaaactgacataccaaagactgcacatacatatttaaaatgtataatttggtaagttttgacatatgcaccatgaaatatttaccacaaccaacataatatatgtcatcccccaaagtcgtcacatgctccattgtactccttcctttttgttcctctctcctccctcccctcccttactggtgggctctttgtaacttgacaatcatttgcatttcttagaatttcacagatgaaacagaactcttttttttatctggcttgttatactcagcaaaattattttgagattaatccatgtgatagtatgtatcagtaattcattcctttaacaccctgtgtggtattccattgtataaatataccagattgtttatacatacaccaactgacagacatttgggtggttttaagtttgggactgtttctaataaagctgctatatggatccatgtctttgcatgtacctgtgctttcattgatcttgagtaaataccgagtcgtgaaatgactgtatcatatagcaggtacacatttaacagttttagaaattactaaagtgtttaccaaagtaaacactttggaccattttacattctcacaatgtgtaaaattggaccacaagtatgtgtaactggaccacatacctatgatacagtttaattcatcagttaggcatgagattaataacaataactaataataaaatagaacaattataacaatatgctgtaataaaagtgatgtgaatgtggtctccccgaccccctcaaaatatcttcttgttttgtactttgggtaactgataccacccatggaaagtgaaactgcagataagggaaaagggactctctccttaatttgcatgaaatttccattcatctaagctgttgaattaatagatggttctggtttctctaaattctcaccaacaattgatatgcaagtgttttttttttattatactttaagttctggggtacgtatggcagaacgtgcagttttgttacataggtatacacataccatggtggtttcctgcacccatcaacccatcacctacattaggtatttctcctaatgttatcccttccctagcaccccagcccccaacaggccccggagtgtgatgctcccctccctatgtccatgtgttctcattgttcaactcccacttacgagtgagaacatgcagtgattggttttcttgtcatagtttgctgagaatgatggtttgcagtttcctccatgaccctgcaaaggacatgaactcatctttttatggctgcatagttctccatggtgtatatgtgccacattttctttatccagtatattattgatggacatttgggttggttccaagtctttgctattgtgaatagtgctgcaataaacatacgtgtgcatgtgtctttatagtagaatgatttataatcctttgggtatatacccagtaatgggattgctgggtcaaatggtatttctagttctagatccttaaggaatcaccacagtcttccacaatagttgaacaacactcctaccgagtgttgtaagtgtccctatttctccacatcctctctagcatctgttgtttcctgactttttaatgattgccattaatgatctggtgtgaggaggtatctcattgtggttttgatttacatttctctaatgaccagtgatgatgagcatttttttcatatgtctgttgactgcataaatgtctcctttgagaagtgtctgctcatattatttgcccactttttgatggagttgttcttttcttgtaaatttgtttaagttctttgtagattctggatattaaccctttgtcagatggatagattgcaaaaatcttctcccattctgtagggtctgttcactctgatgataatttctttcactgtgcagaagctctttagtttaattaaatcccatttgtctattttggcttttgttgccattgcttttggtgttttagagatgaagtctttgcccatgcctatgccctgaatggtattgcccaggttttcctctaggatttttatggacctaggtcttacgtttaagtctttcacccatcttgagttgatttttgtataaggtgtaagcaaagggtccagtttcagttttctgcatatgttgtgcagttctcacaacaccatttcttaaatagggagtcttttcctcattgcttgtttctgtcaggtttgtcaaagatcagatggttgtagatacgtggtgttatttcttaggtctctgttctgttccactggtctatgtatctgttttggtaccagtaccatgctgttttggttactgtacccttatagtatagtttgcagtcaggtagcatgatgcctccagctttgttcttcttgcacaggactgtcatggctataagggctcttttttggttccatataaattttaaagtagttttttccaattatgtgaagaaagtcagtggcagcttcatggggatagctttgaatctatcaattactttgggcagtatggccattttcatgatattgattcttcctatccatgagcatggaatgcttttccatttgtttgtgtcctctgttattttcttgagcagtggtttgtagttctccttgaagaggtccttcatatcccttgtaagttgtattcctaggtattttattatctttgtagcaattgcgaatgtgagttcactcattatttggctctctgttagtctgttattggtgtataggaatgcttgtgatttttgcacattgattttgtatcctgagactttgctgaacttgcttatcagcttaaggagattttgggctgagatgatggggttttctaaatacataatcatgtcatcttcaaaaagagacaatttgacttcctctcttcctatctgaatactctatttctttctcttgcctgattgtcctggccagaacttccaatactatgttgaagaggagtggtgagagagggcatccttgtctggtgccggttttcaaagggaatgcttccactttttgcccattcagtatgatactcactgtgggtttgtcataaataactcttattattttgagatatgttccatcgatacctagttttttgaaagtttttaacatgaaggggtgttgaattttgtcgaaggccttttctgcatctattgagataatcatgtgttttctgtcattggttctgtttatgtgatgaattacatttattgattttcttatgttgaaccaggcttgcatccaaggagtgaagccgacttgatcatagtggataagctttttgatgtgctgttgaattcggtttgccagtattttattgaggattttcgaatcaatgttaatcagggatactggcctaaaattttctttttttattgtgtcactaccaggttttggtaacaggatgatgctggccacataaaatgagttaaggaggattccctctttttctattgtttggaatagtttcagaggaaatggtaccagctcctctttgtacttctggtagaatgctgctgtgaatccgtctggtcccagacttttttttggttggcagactattaattactgcctcaatttcagaacttgttactggtttattcaggaattcaatttcttcctcatttagacttgggagggtgtatgtgtccaggaatgtatccatttcttccagattttctagtttatttgcatagaggtgtttatagtattctctgatggtagtttgtatttctgtgggatcagtgttgatattccctatatcattttttattgcatctatttgatccttctctcttttttctttattattctggcttgtggtctatctattttgttgatcttttcaaaaaaccagctcctggattcattgattttttgaaggttttttcatgtctctatctcctacagctctgctctgatcttggttatttcttgtcttctactagactttgaatttgtttgctgatgcttctctagttctactaattttgatgttagggtgtcaattttagatctttcctgctttctcttgtgagtatttagtgctataaacttccctctacacactgctttaaatgtgtcctagagattctggtatgttgtgtcttcattctcattggtttcaaagaacatctttatttctcccttcattttattatttacccagtagtcattcagaagcaggttgttcagtttccatgtagttgtgcggttttgagtgagtctcttaatcgtgagttctaatttgattgcactgtggtgtgagagactctttgttatgatttctgctcttttgcatttgctgaggagtgttttacttccaattacgtggtcaattttagaataagtgcagtgaggtgctgagaagaatgtatattctgttgatttggggtggagagttctgtagatgtccattaggtcctcttggtccagagctgagttcaagttctgagtatccttgtaaattttctgtctcattgatctgtctaatattgacagtggggtgttaaagtctcccactattattgtgtgggagtctaagtctccttgtaggtctctaagacttgctttatgaatctaggtgctcctgtattgggtgcatatatatttaggatggttagctcttcttgttccattggtccctttaccattatgcaatgcccttctttgtctcttttgatctttgttggtttaaagtctgttttatcagagattactattgcaactcctgcttttttgtttttgttttggttttccatttgcttggtaaatattcctccatcccttccctttattttgagcctatgtgtgtctttgcacgtgagatgggtctcctgaatacagcacactgatgggtcttgactctttatccaatttgccagtctgtgtcttttaattggggcatttagccagtttaaatttaaggttaatactgttatgtgtgaattcgatcctgtcattatgatgctagctggttcttttgctcgttagttgatggagtttcttcatagtatcgatgttctttacaatttggtatgtttctgcagtggctggtactggtttctcctttccatgtttagtgcttctttcaggagctgttgtaacgcaggcctggtggtgacaaaatctctcagcatttgcttgtctgtaaaggactttatttctcctttgcttatgaagcttagtttggctggatatgaaattctgggttgaaaattcttttctttaagaatgttgaatattggcccccactctcttctggcttgtaggatttctacagaaagatcccctgttaagtctgatgggcttccctttgtgggtaacccaacctttctctctggctgcccttaacattttttccttcatttcaaccttggtgaatctgatgattatgtgtcttggggttgcccttctcgaggagtatctttgtggtgttctctgtatttcctgaatttgcatgttggtctgtcttgctaggttggggaagttctcctggataatatcctgaagagtgttttccaacttggtttcattctccccatcaccttcaggtacatcaatcaaacatagatttggtcttttcacacagtcccatatttcttgttcctttgttcgttcctttttattcttttctctaatattgtcttctctctttctttcattaagttgatcttcaatcaatgatatcctttcttccacttgatcagttcagctattgaaacttgcgtatgcttcatgaagttctcatactgtgtttttcagctccagcaggtcatttacattcttctctacactggttattctattccagttagcgattcgtctaaccttttttcaaggttcttagcttccttgcattaagttagaacctgctcctttagctcggaagagtttgttattaccagccttctgaagcctacttctgtcaattcgtcaaactcattctccatccagttttgttctcttgctggcgaggagttgtgatcctttggaggagaagaggctttctggtttttggaattttcagcctttttgtgctggtttctccccatctttgtgatttacctacctttgctcattgattttcgtgacctctgaatggggtctttgagtcgacatgctcttcctttctgtttcttagttttccttctgacagtcaggcccctctgctgctgtctgctggagtctgctggtggtccacccctgaccctgtttgcctggatatcaccagcagaggctgcagaacagcaaagattgccgcctgatctttcctcaggaagcttcgtcccagaggggcacctgccagatgccagccagagctctcctgtgtgagatgtctgtcagcccctagtgggaggtgtctcccagtcaggatacacaggagtcagggacccacttgaagaggcagtctgatccttagcagaggttgaatgctgtgctgggaggtacgctgctcttttcagagctgtcaggcaggaacatttaagtctgctgaatcttcacccacaattgctcctttctccaggtgctctgtcccaggaagataggggttttatctatatgtccctgacaggaactgttgtcttttttttcagagatgccctgcccagagaagaggaatctagagaggccatgctgagctgcactgggctccacccagttggaacttctcagtggctttgtttacactgtgagcttaaaaccgcctactcaagcctcagcaatggcaggtgaccctccccctaccgagcttgagccacagcaggctgctgctgtgctgacagtgagaatttcaagtcaggggatcttagtttgctgggctccatgggagtgggacccaccaagccagaccacttggctccctggcttcagcacccctttccaggggagtgaatggttctgtcttgctggtgttccaggccccaatgaggcatggaaaaaaagaactcctgcagttagttcggtgtctgcccaaatggccgcccagttttgtgcttgaaacccagagccctggtggcataggcaccgcagggaatctcctggtttgcagattgcaaagaccatgggacaagcgcagtatctgtgctggagttcctcaggctcagactctcatggcttccgctgggtaggggagaaaattccccaatcccttgcgcttcctgggtgaggcaatgccccaccctgcttcagcttgccctccatgggctgcagccactgtccaaccagtcccagtgagatgaaccgggtacctcagttggaaatgcagaaatcacctgccttctctatcattttcgctgggagctgcagaccagagctgttcctattcagccatcttgccagcaatctatggcaagtgtttttaacattagccaatctaatacgtgtgtggtggtattttaatatagttttaatttgcatgtccctaatccctaatgctactgaacatcttttcatgtgcttattttcttacttagttttgacagttcttaatatattctagacatagtttatcagatatacagttttcaattatttttcccaatctggggcttgtctccttaacaatacaggagtccctctcccttatctgcagtttcactttccacgagtggtaccagttacccaaggtacagttccagaagatactttgaaggggtggggagaccacactcacatcacttttataacaacatattgttataattgttctattttattattagttattgttattaatctcatattgtgcctagttgatgaattaaactttatcataggtatgaatggctaagaaaaatcatagcatacaaaaggcttggtactatccatggtttaaggcatccactgggggttgtggaatatatcccacgaggataagggggaattactgtatatgtcaaagagtagaatattttaattttcataaagtgtaatttattaattagtaaatttattaattgactttttttttttttttttgagacagagtctcactctgtcgcccaggccagaatgcagtggctcaatcttggctcactgcaacctccacctcccgggttcaagagattctcctgcctcagcctcccgagtaactgggacaagaggcacatgccactgcacccagctaatttttttaaatatttttagtagagacagcatttcaccatattggccatgctggtctcaaactcctgacctcgtgatctgcccacctcgacctcccaaactgctgggattacaggcacgagccaccgcacctggcccgatttattaattttgatcaggcttttggtatcctattttagaaatctttgtctaacccaagatcacaaaagttttctcctatctgttcttctagaacttttttattgatataaaatttatttcctacaaaagtcatcctcataaattgtacagttcaatggtttttagtacattgagtgacgtgtgcaaccatcaccaatatctaatttcagaacattctcattagactgaaaagaaacccagtataaatgggcatattctggacatttcatataaacaaatcatatagaaaaatagcctttgtagctatcctctttatcataatgcttccaaggccatgttacagccatattatagcatatttcagaacatcattctttttcatggctgaataatattcctctgtatgaatataccacattctgcttatacatacatgagatgataggcatttacattgtttccacattttagctgttgtgtatgttgctgctatgggcattcatgtacaagtttctctttgaatcctgtttttaattattttgattctatacttaggattgaaatttctggatcatatggtaattctgtatttaaacttgtgaggaactgccaatctgttttccatagcaactgcataattttatatccccaccattaatgtacaagggttctaatttctccacttctttgtcaacacttgctgttgtccactttttttattacaaccatcctagtaggtgtgaagctgtacctcactggggtttccgatttgcatttcccagtcatttgcataactaataatgttgagcagcttttcatgtgcttggcagccaagtatatcttctctggagaaatatctattcaagtcttttgcacatttaaaaaaattaggctgtctttttgttgctaagatatgagttatttatatattcaagacacttaccagatatgtgatttgcaaatattttttcttattctgtcgattgcctcttcaatttcttgagagtatcctttgaatttttaattgtgataaagtacaatttaccttttttttcttctgttgctcatgcttttggtgtcatatctaagaatccattactgaattcaaggtcatgaagatttctcccatgttttcttctacatgtttcatagttttaactcctacatttaggtctttgaaccatgttatagttaatttttatatatggtctgaggtagaggtctagtttcactcttttggatacggatatccagatatccttgcaccatgtgcttaagagactcttctcattgaatggttttagcaccctttcaaatattaataggacatagatgtgtgagtttatttctggacgctcgatccttttccattgacttacgtgtctatccttacatcagtactatactgttttggttcttatagctctgtagtaagttttaaaattgggacatatgagtcctccaacactgtttttctttttttgagatagttacggctcttcagttgtcctgcaattcaataataatttcaatatcagattttccattaaaaaaagctgctgagatttttacagagattccattgactctataaagtgctttgagtaatactgccatcttaacaatattaagtattttaagatgaatagtggatgccttttcattatgtaggtcttctttaattcctttcggtaatgttttgtgggtttcagtgatccttggttaaatgtatttataaatgttttattatttttgataataatgtaaatgaaaggttttcctttatttcatttgcagattattcattgccagcatataaaattataactttttaatgcttcttttcaatgtctttttaatttttttaactgacaaaatttgtatatatttatggtgtacagcatgatgttttgatataagtatacattgtggagtggccagatcaagataattaatatatgccttacctcatatactgaaaggagttagttagcttgccttaggtagataacaagggaagggtcccagagaggcccccgcctgtgggtcagtgcctcatccccacataacataaaaagcagcctgagaaaaaattcaagcggcaggtaccaataagggaactagcacggggtgttatacctagagacatgcccacggctgcacagatagaaaaacctccagcccatttggataaaaacttgcacaaacctccagctaactcagataagggaacaaggccaggcacagaaatgcctttgtcctttgtatagtcagtgggatcccagaaaaagtttcttctccttttgtgggcatgggcacagtgggctccggtgggttccagtgggcactctactttcctttatttggactgtaagtctggcctctatgaatcatcacctcagcccgattgttcccaggccaagctgagtcacacattcgccaagacagcccacagactaagcacattccttccccttcccagtccataaaaaccctggaccccagccccacagtggatactcccattccagaccccctctctgctggcagagagctttcttcttttgcttattaaactttcgctctaacctcacctttgaccatgctccttaatagtcttggaggtaggacaagaactcccagcattatctcagacaacaaaagtttgtttcgatattatattgaaacaatatatacccttgtcatccttttaatacctatagtatctgtagttttctcaaccctctgagctgtaacaccggcaactttttttttgatcagtgtgactagagatttatcaatttcatctatcttatcaaatcgctagcttttggtttcattaatttcctctcttctttttgctttccatttcaacattgtttcaatattatattatttgtggtcgaccacttaaaatttattctctcagcaattttcaagtatacaatatagttacttactatagtaaatatgtactatatgtactatgtactatatgtactacagtctatagtctatagtctatgatgtactatagatctcttgaacttactcttgctgcctaactgaaattttgtattcttcaaccagcacctcctcaatcctttccctcccttcagcatctggtaaccaccattctaatctgattctatgagtctgactttgttagattccacatgtaagaagatcatgcagtatttgtctttctgtgcctggcttattttacttaacataatctccctccaggttcatccatgttgttgcaaatgacagaaatttccttctttttaaggctgaatagtattccattgtgtgtatataccatattttctaattttttttctttttttttttttttttttgagacagagtctcactctgtcgcctaggctggagtgcagtggccactgcaagctccacctcccgggttcacgccattctcctgcctcagcctccagagtagctgggactataggcgcctgctaccacgcccatctaatttttttatatttttttagtagagatggggtttcaccatgttagccaggatggtctcaaactcctgacctcgtgatccgcccacctcggcctcccaaagtgctgagattacaggtgtgagccaccgcgcctggccaacattttctttatccatttatcctttaatggacattccatatcaactttggctactgtgaatagtgctgcaatgaaagtaagagtgcagacatctcttcaacatactgattttatatcctttggatacatacccagcagtactattgctggctcatatggcagttttatttttaatttttttgagtcacttccatactgtgttctacaatggctatactaatttacatttctaccaagaattttcaagagctccccttttcctacatcctcaccaaaacttgttatctttcccctttttaataacagccattctaacaagtgtaaggtgatatctcattgtggttttaatttgcatttctctgatgattagtgacactgagcattttttttcatatacttgctggccacatgtatgtctctttttgaaaaatgtctatttgggtactttgcccagttttcaatcaggttatttgttttcttactattgagtcgagttccttatatattttggatagtagctccttatcagatatatggtttggaaatactttcttccattccataggttgtcttttcactctgttgtttcctctgctatacagatacaatggatttttgtgtattgatttcctagctttgatttattttgagtgcctaatcaactttgcttttctgggataaactctaattaggtcatgacataattatccttttaaaatactgttagacatgattttccaaacttttgtttacaatttttgaacctatattcatgaaagatagtgatgttcaattttcttcacttagagtgtctttatcaagtttttaaaatgtgggtaataatagtctcttttctagaagacttgtgttgaattggtattatttctttcttaaatatttggcaaaattcaacagtgaagtcatctgggatgggagtattggaaaatttttaactacagaagcaatttctttaagaaatacaggggtattcaagttattatttcttcttaagtgagctttggtagtcagtgtttttcaaataaattttccatttcatctaaattgttgaattgataggcctaaagatgttcactggctggatgtggttgctcacgcctgtaatctcagcactttgagaggctgacatgggtggatcacctgaggtcaggagttcaaaaccagcctggctaacatggtgaaaccccgtctctattaaaaatacaaaaaattagccgggcgtggtggtgggcgcctgtagtcccagatatttgggaggctgaggcaggagaattgcttgaacccgagaggtggaggttgcagtgagccaagatcccattacactccagcctgggcaacaagattgaaactctatctcaaaaattaaaattaaaaaaaaagatgttcataataataaccttgttatccttttaatgcctgtagtatctgtagttttgtcaaccctctgagctataacattggcaagttttttttgatcagtgtgactagagatttatcaattttatctatcttatcaaatcactagcttttggtttcattaatttcctctcttctttttgctttccatttcattgatttcctctttgatctttactatttcctttttttttttttttttttttttgcttactttggatttagtttgctcctttctcaaatttcataaaatggaagttgaagtcatgatttgaaatctttcttttttctcatattggtatttgtttcattatttttatctaagtagtactttagtagcatcacactaaatctgatacattgtgttttcattttcattcatttcaaaatactttctaatttctcttttgattttgtctttactcatgggttatttaggattgaatgcataaggagggtcatccacaaatccctgggattcttctatgcagttctctccactccagtattcagtcctctgaaatctggctgttttggtctccctggcctttctgttctgttttgtcaactcagacagtctgctgtgtgttacctgagttaccccccaacctgtgctgcagtctggaaactctttcaatgcactaaactgagacaatcccagagctcctcctgcctgtttcccgtatcatagggatcattgtccttggttgcctgatacccagtgtcttaaaaaccattgtttcctatattttgtctgtttttttaaagttgtttcaggaaagagtaaatttggcccctgttacgccacctaagctggaagaagtccagtttcgttttgcttatatcattataaacccatttttatatattttatttcttttaattcattgcagaatcttccttttcaatgctcaaaatatcccagcctaagtcagtaggagccatttcacgttggcttttgggtccttcgacatgttccttctagtctctttagtggcaaatgacatgcaggtcccacagtctaaacactgaaggtaactatatatttgcatttgctgaacttgtttttaaaagtgggagagagagcaagatatacagattttatatttatataacaggtacactacaatgaaaagaacacacttgtgttagagtagacccaattctcccacatacaagtcactaatactcttaactgtaaatgtagacctcaaaaattcttatctttgcttcctaaatatagacctctaagtttccaaacagtcccataaatatgactttatcttatcaacctgtgtgcattcagtctggttattctggactctcattaacacagtcatagcagcttagaaaggcttcttatcccaatattgcttgagattagcagaatctaagtaataatggcatgtcatcagtaaatattacaaagtaaacgggaatccagtcaagcctgagaaaatcaaaataaaattaaatcaaagggaccacaagaggatatcaatgtccttccatctattcccaatcctctgttttcttgcccttgatttaaaaatcaagatgtcacaaatccccaattttcccttctaacctactaaattagacttgatatttcttagtttccatgagagcccctaacagtcccttctaggccaataattcctaaattcatagattcttcagggtgcaagaaattgcagatctgaagacagatcatctaatacaggcacataatttcaaagacaggaaactaaggtacagaaattttatgctctttgcctctctcttagcaaacttagaaagccagggatttagtgacatcatgtattaaagagattttctaaagcatgtaaaaacatatttaggctgataactcttaacactctatatctcacatcctcttgattatttattatgtactatgatgataaggaaaacacaactttttaaggggtgtttatatgattacaaacatttttgtgaatgtcttagtaaccagtatgaaaacattgccagaatgcaaatatcataaaataaaaagcattaattttattaaaaactgagtctacccttggttttcaagagataaaccaattaaaatagctaaaatagctttgcagaaccgatgcatgtataaaatgtcctcttttgcctttacttgaatccagaaaactaagcaacattcattgcttagttgtacacaccagttttctcatcaaagaaaaggctctgttgaagaacaaagatgttcctcagaactttgaggactaactgtaatacaagtccaatagattctgattgttgatagaccaaaccagcaatccttgcctaaaatcttcagaagaaccatttcagcaaattgagctttccaatgcagacatttgctgtagctgtgttttatcacagagaataattgtgatcttttaagtaccagtgtaccataatttttggccatctcaaaatgctgagggaagcacttactgatctaataagtcttgttttgtctttaatgagtacaatttcaagtaatcataaaaagcccacatatggccatcacaacacttgttgtgcacaatctgttcaaccaaaggcatttttactctacaacataaacagcattaggtgtgactagaaaaacattcatctaccaagatgttcaggccaaggttataggaaatgaattaaaaattatggttacatatggtcttggttacactaagatgttctgatacagcaataattgagaataacaggcctatcctctcctctagctttaggctctgatcctcacaataaaattaaagctaatcagtcctttaagacatactacaaccacaggctctctttcagatacactatactagaatagtgatttgatttcttaaaatcaaacttcgtactaattttctagcaatttagatactatggcatcttttttttttttttttttttgagacagagtctcatctgtcgcccgggctggagtgcagtggcgcaatctcggctcactgcaacctccgcctctcgggtttaagcaattctcccatctcagcctcccaagtagctgggattacagccaccacaccaccatgcccagctaatttttgtcttttagtagagatggagtttcaccacgttggccaggctgatttcagactcctggcctcaagtgattcacctgcctcggcctcccaaagtgctgggattacaggagtgatccattgtgcctggcccgcatctgttttaatattaatagctaaaatttacttagcatttactgtggtctctattctgaatcaagtaccttatatatattaccttatttaataccctaaaaaataattttcccacttagctaagtgatagacccaataatccaatctgaggttataatggcgcccagggtcctattcactgtatgatcctaccatagtcctaggtaactcataaacatttgctcttctcctagggagtaaagaaagacattatttcccattaaactgtaagctcaaagagatctgaagacatcaaactgaaagagacctgggatcttacctggtttttttcatcattgtgttgccaatacagcaactttctaatagttgtgaaatgaaggaaggttgaaggaaaaggttgctcagctataataagtcggaaaaggcaagaatcacattcattttcctaagtactataggatagaactgaaatttatacagtaacaaatttcagataacacataggtaaattttatagtagccagcttttccattacacaaatgtaagaattggcttttaattattttaaagctctggaaagcagtagagatgacacatcgcagtagagatgacacatcagtgagagattactaaagaactggcagtttgatcatttctaaaaatatgaaatttcatataattgttatattattgaactctctgagccacaatgtaaatttttgtcatatattcacctctcttttcaccttacatattcagcttgataatatgcactgaccatattcactttttaaagccaaatactcataagatctagtgatatatgagcacttaaaattcaaccaaatatcttctaagcacaatatattaacatttaaatgattcttttcatatatatttctttgatatatatttcatagccattagcaatgaaaaagcaaaaagcttcttgtttaaatgagtattccatttcagaaaggataagtttggtattgctttcttcaactcattttaacttttatcaaacattagtaggcttctataatggtctgactgtcccttattcaagtaaattaaacaatttagggctcatcacctgtatgatactcaaaaataccaaggaaaagcagccatagtacctaccttggttaggtgaatgactcctttagaagtgactgaacaacccatgaagcctacatattgaagctcaggacagtgttcagcaaatgctttcactgactgatctgtcacctagggaaaagacatggatgaaattattcaaggtaatagtccagtgaactcaaggatttggctcctgaaaatcctctcagccccaccttgcatcattactatttcctgccctgttagatcatttgaatcagcatacaaacatgctataatattcctgtatttttaaaagtcatctcttgaccctacatccacttcttatcaccccatgtttttatacttcttcagacatgttgacactggctacctccaattctttaccttctcccctccctctgtgtgtgtatatatatgtatatgtatacacacacacacacacacacacacacacaaacacacacatatatggttggtttgttttggggttttttgttttgttttgttttgacagagactcactgtgttgcccaggatggagtgcagtggcacaatctcgactcactgcaacctccgcctcccaggttcaactgattctcctgcctcagcctcccaagtagctgggactacaagcatgcatcaccacacccaactagtttttttggttttttttgttgttgttgttgtgttttgttttgtatttttagtggagacggggtttcaccatgttggccaggttggtctcaaactcctgaccttaagtgatccagcctccttggcctcccaaagtgctgggattacaggggtaagcaatcacacccaaccaatatatatttttttattgacatttaattcacataccataaaattcaccctttcaaagagtacagttcagtatattcgcaagtttatgcaccattaccgatatctaattccagaacatgttcaccaccccccaaagaccccatgcccattaacggtcattcccctatttcccactacctccaagcctggcaatctacattttcctattctgaacactttatataaaaagaactaccagtttgtgaccatttatgactggcttctttcacttagcataatgttatcaaggttcatccatgttgtaatatgtgttggaatttccttacttttcaaggctgaaaaatattccattgtatggatatactacatttttatgggttgaattatgtctccttaagattcatattttgaaatcttaaccctcactacctcagaatgtgatcttatttggaaatggggcagctatttccaatagtgaagtaaatagttaatttaggatgaagttgtactggagtgaagtgggctcccaattcaatataactggcggagcagagatgcacacacagggagaatgccatgtgaagactggagttatgctgcacaagccaaggcacaccagattgccaaaaagagtgccagaagttaggcaagaggcctggaacagatcctttcctagcactttagaagaaacatggccctgccaacactttgatcttggacttccaggctctagaactgtgacaccataaatttctattgtttaagccactcagtttgtggtacttggttctaacagccctagcaagctaatacacacattttccactctctcttgatctcatagtaatcaaggttttgtccctctcattcattgtcactatcctatcaattaaatggtcaatctcaattatcccagcatttcagcagtatctgacacaactgatgattcttctggaaacaattcatttgcttcttgtatcaactatcatggctttcctccttccttacttttggctcttggtcacttggttgagtctacctcatctcagtcctcagctcatttctcttttccgtcttacttcattccttaggtgatcaaaactaattgcatggctccttaataactctcctagtccctctctgtgtctcaccacactttgattttcttcataacacttatcactactgatcacattacacacttactcacatattagtttgtcactcttcccctctcaaaataactcttccctccctctcccctagaataaccaaccattctgatttgcctcggacagtttcagtcttagcactgaaaagtcctatgacccggaaaaccacttagttccccatcggcacctagaataatccctggcacttagtagaaaatattgaaataaataaatgaatttttttccttctttccatgtcctccatcataccttttacttctactttattttatttttagacaaaggatatatttgtatcattttaatatatgattttttaaatgtcattgtactagtggctttattttctgatacagttcatgtgtcttaagaagtctttttttaaagaactgggaggaggcacatttttacaccagtgactcaactttgatctgtaccatggttaattttctatatcaacttgactatgccatggggtgcccaaatatttggttaaacattattctgggtattcctgtgagagagtttctgaatgatattaacagctcaatcagtagactgagtgaagcagattgccttcttcaatggagagaaacttcatctagtctgtcaaaggtctgaatagaataaaaagtcagtgtaacggagaattggtgctctctctgcctgactatcttccaagcaggagatcagtcttctcctgcctttgattcagacttgcactggaactttcaccattggctctcccagttctcaggtctttaaacttggactagaatttacaccattagtttttgtacttctcaagccttcagacttggactgagactataccaatggctctcctggtactctagattgacaaatggagatcttggaacttctcagtctccataatcatgtaagccaattccttacaacaatctctagaaagatatacagacagacgtacagacaatatcctaatggttctgtttctgtggagaaccatgactaataccttgagtattacaatcccaagttttattatattaaaaactcagagctgaaaggagtggggcccaaggaactgtattttcaacaagcccccaagtgactcttaagcatgtgaaaacttgaggcccccagtgcttcaaagaagttacactgacagtgttttgtatttctaagcagccctgctttaaatgaatggcagaataaaattcctttttcgtctcccgcacctccaaaaaaatttccatttacaaaattatcttcttgtaattgtgcttaaattttcttcatgtttcccaaagatgtagcttataaaagaaagtccaaatattctctatcatatgcttaatttcagattcactttcttcacagtcaagatgagatcgacaaatttaacatctttgttagtttttcaaacaatagcaacttacatctctttggcattagctttagcatgggtgactctttttgtatcttccttacctatgctgaacagatattggaagaaagaagtatgtgagtagcattaatgctaaaacaatcataagaacattttcctaaaataatgaaaccaacagcatctatggtacatgtgataaaagattaattctcccctcaaaagtaaagtatgcttaagcatattaagactaaggatgccattgataaatttaaaataggctttcctgacacttagcattctaaaggcattatgttaacaaagaatttttaaggcactaaaattgctggaagcttcaatgaaactcaatcactattaaaaacaaaaaggggtaacagaggttaagtacatggtcagttggttaaacaccctgctcaatttcagtctaacattaagtttttcctatatccatcttcgaggagaggagaagaactcagatgaggattaaggacacaagaaaactcaggtccaagaggccagagcattcagagagaaaaagtggggtttgaaaatgtgcttcttgggtctttctctttcagctcaagcaatcagaataagatagctcagaggagcctctaacatcaacagagccctggaaagcaagacaagattgtgtcatggggatacagaaacactcttagcaggcttgggtatgttttaggagactaataaaagggccttgaagatttgggtggcatccagctccactccccaaggatagaagatcagttagggatttgtggcagaaggtctggaagaaacagactatagactacaggatgcagctactgggaccctggagtctcacttctagcttctctgggaccctggagtctcactgtctagcttcaaatcccaactggaccacttactagctgtgtgattttcaacaagtcatttctcctctctatacactttgttcattctataatatggagaaaattacagtacctaccccacagggtaaaatgtgagggtaaaataagataatgcatgtaaaatattttgaacaatgcatggcacattgtaattgttcaatagattttagctattatgataatcactccaggttcccctttcttctgtattccgattcttagccaggactaaagggttgaaatgcataagagaatattcaaaaagagtgtatttaaagcattatagtttcttctcctggttatcacaagagatcctgatcataatttgggggttttcagttataatctaaactatgggatggctgtaagggagacataggtgaaagtttgttactgactccctatggtagaaagaatgccattttgttaaggctcttaaccgagttgcacacaagaatcaccaaagaagatttctaatttaatttgttgggtacagctctgcagcaattttattttaaaagctccgcaggagattctaatgaacaaattctaatgccttccattcaaagtgtagttctcattccagcagcactgacgtcactttggagcttgttaaaaatgcaaaatctgtagattgcttttagcagtatggtcattttcacaaaattaattctactcatctatgagcatgggatgtgcttccatttaattcccattaaaataccaccatcattcttcacaaaactagaaaaaacaatcctaaaattcatatgcaaccaaaaaaagagcacgcatagccaaagcaagactaagcaaaaaacaaaaacaaaaaacaaatctgggggcatcacattacaagttcaaactatactgtaaggccacagtcaccaaaacagcatggtactggtataaaaatacgcatataggccaatggaacagaatagagaacccagaaataaactcaaatacttacagccaactgatcttagacaaagccaacaaaaacataaagtgagaaaaggacaccctgttcaacaaatggtgctgggataattggcaagccacttgtaggagaatgaaactggatcctcatctctcaccttatacaaaaatcgaatcaagatggatcaaggacttaaatctaagacctgaaactataaaaattctagaagataacatcggaaaaacccttgtagacactggcttaggcaaagacctcatgaccaagaacccaaaagcaaatgcaacaaaaacaaagataaataggtggggcttaattaaactaaagagcttctgcacaacaaaaggaagagtcagcagaataaacagacaacccaaacagtgggagaaaatcttcaaaatctatgcatctgacaaagggctaatacccagaatctagaagcaactcaaacaaatcaacaagaataaaacaaacaatcccatcaaaaagtgggctaaggtcatgaatagacaattctcaaaagaagatattcaaatggccaacgaatacatgaaaaaaatgctcaacatcactaatgatcagggaaatgtaaatcaaaaccacaacgtgataccaccttagtcctgcaaaaatgaccataataaaaaaatcaaaaagtaatagatgttggcgtagatgtggttaaaagggaacacttctacactgctggtaggaatgtaaaactagtaaaaccactatggaaaacagtgtggagattccttaaagaaataaaagcagaattaccatttgatccagcaatcctactactgggtatctacccagaggaaaagaagtcattatatgaaaaagatacttgcacacgcatgtttatggaaacacaattcacaactgcaaaaatatgaaaccagcccaaatgcctatcagtcaatgaggggataaagacattgtggtatatatacacaacagaatatttctcagccataaaaggcaatgaattaatggcattcacagcaacctggatgggactggagactataattctaagtgaagtaactcaggaatggaaaaacaaacatcatatgttctcactcataagtgggagctaagctatgaggatgcaaaggcataagaacgatacaatggactttggagactcagaggaaagggtaggaggggggtaagggataaaagactacatattgggttcagtgtatactgctcgggtgatgggtgcaccacgatctcacaaatcgtcactgaagaactcactcatataactaaataccacctgttccccagaaacctatggaaataaatttaaaaaaaaaaaaaagcaaaatctaaaggcataagaatgatagaatggactttggggactttgggggaagggttggggggcgcgagggataaaagactacaaatagggtgcagtgtatactgcccgggtgatgggtgcaccaaaatctcacaaatcactattaacgaacttacaaatgtaaccaaatatcacctgtactccaataagttatggaaattttttttaaaaaaaagcaaaatagtaggccctggcacagacctattaaatcttaatcagcattttagaaaaatcctagggtgattcttatacaccttaaagtttgagaaatactgctcaagtgataaagaactatgtcatcttcttggggtgagatgaagcaaaaactaaatggctatgccataatccaagcactacgcataatttttaaacagctttattgaggtacaacttatatgccataaaatccatccattttgagtataattcgtcaagttttaataagtttatacagttatataatcatcaccacaatccagttttgaacactttcatcacaccacccaaaaaattccctctatattctatgctcatatacagttaatcacagctctcacccacaggcaactactgatctgctccctatctctatacttttaccttttctagaaacttcacataaatagaattgtgtcataagtagtcttttgtctctagcttctttcactaatgtaaggttttgaggtttatccatgttagtccatgtatcaggagttgtggaagtggcaccactcaccattacccgtagtgatccactagcaaaatgtgtgcttcctgttcccgcaacagtacattctgctggcctagaggtcttagttccagaggaaacactgccaccaagagacacaacaatgattccattaaacaggaagttaaaattgccacctgttcatcttgagctcctcctacctttaagtcaacaggctaagaagggggttacagtgttggctggggtgactgacaggactatcaagatgaactcagtctactactccataaaagagataggaacacaggagatccatacaggatacaggaatgcatggagtacaggagatccattagggcttcttttagtattaccatgccctgtgattaaggtcgatgggaaactacaacagcccaatccaggtaggactacaaacggtccagactccacagggatgaaggtttgggtcactgtaccaggaaaaaaactatgacctgctgaggtgcttgctgaaggcaaaggaatacagaatgggtagcagaaggtagtcatcagtaccagctgtgaccacgtgaccagcgacagaaacaaggactgtaactgttatgagtatttcctccttcttttgttaaaaacatgtttgtgaatgtatacacttgtgctaagaaaatagcttaattttatttccttttccttcatcatgtgacataagatttattgactttacataagcatttaagtattgttaactttatgtaatggtatttgggttggggattggtgtgtttccagttgtacaaaggatagttgcattaagttaggtgtaattatgaccttattattgtctttatttgaatattatgtatgatctcaggagatgtgtatgggttcaagttggcaaggggtggacttgtgatgattaatactgtcaacttgattgaattgatggatacaaagtattggtcctgggtgtgtctgtgagggtgttgccaaaggagattaacatttgagtcagtgggctggggaaggcagacccacccttactctggtgggcaccatctaatcagcggccagtgaatataaagcaggcagaaaaatgtgaagaggcaagacaggcctagcgtcccagcatacatctttctcccgtgctggatgctacctaccctcaaacattggactccaagttcttcagttttgagactcggactggctctccttgctcctcagcttgcagacagcctattgtgggaccttgtgtttgtgtaagttaatactgaataagctctcacatatatatatatatatatatataatatatactattagttctgtccctctagggatccctgactaacacaacagtttattcattttattaatgagtagaattccactgtatggatatactacatcttgtgtatctattcaccagttgataaatacttgaactgtttccaatttggggctttgacaaataatgctgctgtgatcattcaaacataagtattgtatggacatatattttcatttctcttgagtaaatatctaggagtagaactggtgagtcacacaaatgtatgtttaatttttcaccaatttttaaaattgggtcatttgtcttactaagttgcaggagttctttatatattctgaataaacacccttatcagatatttgtttcacaattgttttttttgcactctgtgccttatctttaattttcttaatggtgttcttagctctgacatttaggtctatgatgttctcagagttcatctttgtttatggtgtgaaataaaggtaaaggttcatcttttgcatatgtataccaattttgccagcaccatttgttgaaaagacgatacactatagaggaattttaaagctcctgcctggaacaccttgaagaatcatacatactcacaggctatgggaaaaccaggcaataggtaagaattagtacgcagagaaaatgtgactcaggatttggaaagaagcatcagaaaatcagggaagaatgagatcagcttgcaaagcacattttgatctttcagtcagtcaatgctgtgatagagacaaagagaaagataaccctcagattcaacatgattcacatggcagaggtaaagaacgatcttctccttaagttggcattctcaaagccaagctacacttttataactgcatgaaatggatgtaggcacgtttagtgttacaccaggaaaagcactggtgataaggaatgtctgttgtactagagtcaaaaggaccattaaaagcctgcataatgtcaacacacatcaagatcctagtaaagcttcagtttagaaatcttaagctgctaaacctaaggcaaatgaaaaccagatacccagggtgcaaaagggaagaggaggagaatgttggttctcataagctcttgagggctgcactcaatcagaaatcttttgagggtggattcctgtgagatcaaatgtagggacaaaagaaaagcccctgcaggaggtggaaataataggcttagaaaaatgcagagttgggggacaacagtaatagcgactgtggcagaaatggccatatataactaagaaactcttggctagaagaaggataaagagaagacaggcagtacagggtcaccaattttgcttggagagttactgtttctaaacatgatttgggactgtggattactctacttataaacttggagattcagtctctagacggctcacactcagccgaggtttggggtactagttgccaccgggttgaagagagaatagacaataaaaatagctacatttactaaggccttaacgtgtgcccagctaagtcctctctatccatcatctgagagcctcataataatattgagaggcataattatccccacttaatggattgacttcctcctccaaatcaaaccactagcaggtggcaaaactgggttttaaacactggccttttaggctttaaaacctatgctttgtatgttataccaattaggatatgattcttttcatggaactaatctcactcaaatgcaagagcaaatccaaggccttcctttaacctccagagaagtagagtggcagatatcaaggcacaatgggtctactttctagggaattttctgagagaagtgttaccacttgattactgttttcatctcctgcagatagaatcggtgtggtactgatggtatgatagtcttgtatgtcctgagaactgctccaaaacatggaagcatagtagagagttaggggaatctaattcagaggtgttgaagaagctgcattagtggtagtaaattataaaaccataaaagtagtaactggaatccaaggaagcagttttatctagaaaggattaaaattaacaaagaaaaaaaagtaaggacagggaaagctcttctataaatttcaagattctaaataaagagatgcaatgtagtcttattttaagacttgaagttttcttggactataggaagacagatctatctttatcagaataagattgattcaatgaaataattttgtaatctgtgctgaaagatattttgggaataattgctagcatatctgggatgaaaaggaatttggtgtactaattctaaaaaggtggaatgaatctttggacattttaatactgccggattatagagttaatctgtgtaattctacatgcatgtaccaaacaatataacagtatttcttgatcttaattagaaactaaaaaattttcctagacttcaccccagactactaattcagagcctgaaaacatatacttctaatccttctcttaatgattcttatggaatcgatccagaaagtctcatgactaaatctcgtaacaatggctaactggacccatcgttatactagcactgtaaagatggcctagaatatacattgtggttatctctttgcccatttctactgcccccaccatggccaaagatatgtcattcttttccgggatatttggaataacctacacaatggacctccttctgccattcttgatgccaccaatctattttccactcatcaagtcagagtgatctttcaagaagcacaaatcatcagatcatgtcagtctgctattcaaaatcctccagtggtactcttaaaataaaatccaaactccttttataacctataaggccccgcatgatctgatcccatctcatctaattcatttcatcccactatcccctctccttgatcactttgtgatgatctttccatttatcctgttcactactctagccctagagtttgatacagtgtcccacgtacaacagaagctccagaaattaaaatgaatgaatgaagtatctttttgatgcatgccaatggcttgctggttcaatactgaagaaatacattttttgatgcaaagaaaaacagaactattgattttattggttccatgtggcacacacaagtagtggctaagaattagataaatggcttcacaaagctaaggagagaatttccaaaaaaatcaatagcaatactttgattcttcaatatgtctgaagtgaactgaaaaaccaatgtgggattagtggcacatgcctgtagtcccagctacttgggatgctgaggcagtagaatcacttgagcccagaggtcgaggctgcagtgagcttggaccatactgctgcactccagcctgggtgacagagtgagaccctgtctcttaaaaaaaacaagcaaacaggccaggcagggtggctcatgcctgtaatcccagcactttggaaggccaaggcaggaggatcatttgaggtcaggagttcaaaaccaacctggccaacatgatgaaaccctgtctctactaaaagtacaaaaaattagccgggcgtggtggcaggcgcctgtaatcccagctactcaggaggctgaggcaggagaatcacttgagcctgggaagtggaggttgcagtgagcagagatcacgctattgccctccagcctgggtgacagagcaagactctgtctaaaaaaaaaaaaccaacaacaacaaccaaaaaaacacaaaacaaaaacaaacaaacaaaaacaaaaagcaaacaaacaaatatcaatgacaatgtggaagaattaccaggggtgaacaactaatctcacttgagacctcaagaccaattcaagaccttctttccaccctcaatgaaaaagagcaaaacagagacccacagcatagcaaggctaatttctgggtcattttccgggagaaataccaatcgttgattaattttttcatctcttgcaggccaagtagtcagtgggcccatagggtaccctcatcttctgaatgcaaaagaaagccagcataaagtaatctccttagactaggctctgccctgactaagcttatacaggaaagggaaattatttccatctgttccaatgagatttaccagtctaaaacagtcatatagattcgggttaggagtctgtggaatagtttggttgtctgactatcctctctgccatgtagtaggtggtaaaaaaagacagcaacggtgggcattgggacaggttactggtttagggaaccataagagaatatactccaatcctgaacagctaccctagtccactgagtcaacattatctttgaaataataaagacacatttatagtgtgtctaatgaagggtttatttcacttaggtatactcagactcctaaatccctttaattcaacaaatatacaagcacctactacatgcacaacacttcatgttaagtgctgatgctgtatgaagatgaggtacagtctctgcctccaagagcagaggtaataggttgggatgtgaagagtcctagctcccacaactaccagtgagatctctgggaatattttaatctgcagcttgcatcccagttcggttcagttcagtttcccaaggacttctgactagaaccaaaagcaagtttgaagagagaacaagattatgggagaccgaaagccagcagaatggttgtgactttatactgaaggagtctattttattagcaatatagagacatatgagcttaatggactttaatatccccttgagttccaacagattgcaggtccatgactgatggagtcattcattaagggctttaagtgcagggtaataaagagaaagttgtacttcaaagtccagcaggtatacacaagaccaactaaaggaatatttcggcctcaaggaggctggccaggaggctatggatgcaacaagccccatgtacccagaagatgataacatatcacaccccagggcaccttagttaggcctagccacatgccaaagtcagtaaacatccatatctgatgctctacagagtacataaagtactgtgatgacagaaataccaaatgaaagaaatttatttaaattcacaaaaaatataaattatacttattagaagccttaaaaatggaacgcaagaaaatttttccatttgtttactcaactcttcaaaatccatgtgaaaattatcttttatctttaccttcctttgcttttatgtatttacatcttttacagggtacagtatgtatacctactattaatgcaccaggaagccttcttatttgaaacagtaatacaaaaacagagaacacattggcacttgtcacataacagctaaaaatggtgacagaatacttcgtatggattcactttataaatcatttcagtaagactcatcactgtgctcttcatttaatgaaaacttcatatctagtaaatttttaaaagaaatctaaaagcagattatttaaagtacttttcttttaaaccacagtcaagacaacaatatttactgagttcgtgttatgcgctaagtaccttgctatatacaatgattaagaaagacaggctaccctcttggagcttacaatttagtaagaagggcacatgttaaacatctatttcaagtgtgatcactgtattaaaatggtcatttgcattagtcaatgaattgtgactttttaatttttatttacttattttgggggaacagggtctcattctgtcacccaggctgaagtgcagtggtgcaatcacagctcactgcagccttcacttcccaggctccggtaatcctcccacctcaccctttccggtagcttggaccacaggcatgcaccaccttgccaggctaatattcttttttttgcattttttgtagagacagggtttcaccacgttgcccaggctggttttgaacttaagcaatccagctgcctcagcctcccaaagttttcagattacaggtgtgagctactgcacccagctgaactgttactttttatatatgccataattccatgtgtggttaacgtggaaagcagccaaacacatgactaaaaattacagtaaattagtacaaaatatttttctcaaatattttaagttgtaattatatgactgatatcatttcagtagagagctataacaaatattactttttaaataaataaatgttgcttttagaaatcatgagaaaacaaaatttaagaacttatatgtactaatataactttgacattttttttttagagacagtgtcacacactgtcacccaggctgcagtacagtagcgcgatcatacctcactgtaggaggcagagcaagatggctgagtagaacctgcctgcaattatcctccctgcgggaacaccaaactgaacaactatccacataaaaaagcacctttttaagaaccaaaactcaggtgagtgatcacagtatctggttttaacttcatatcatcgaaagaggcactaaagacagctgaaaagacatacttgaattgccaacaccacccctctgcatcccctggcagcagccacaaggcacagggagtgaatctgtgtgctttgggaagagacagtgccatgactctgtgaccttgcattggaactcagtgcttccctgtcatagcggaaagcaacaccaggcagaactacgctggcgcctatggaggaagcatttatacctgccctagccagaggggaattctcatcccagcagtcaaaacctgagttttggcaagcctcctactgtgggctgaagtgctctggggttctaaataaacttgaaaggcagtctatgccacaaagactgcaattcctaagcaagtcttgtgctgggctcacagccagcgaaactgaagggcacatgactcaggcagacaccacctggcgggagctgggggaccaagggagtgcttgtaccaccccttcctcacccctaggcagcacagcttgcagctccaggagagactccttccttccgcttgaagagagggaagagtaaagaggactttgtcttgcaatttgagtaccagctcagccccagtgaggtagagcagcaggcagagtcctgaggcccgtattccaggacctagatcctggatgacatgtctagatacaccctcagcgagaaaagaacctgccatcttgaagggaaggaccttggcctggaaggattcatcatctgctgactaaaaagagcccttggggcctgaataatcagaagcagtacccaggcactacttgccatgggccttaagtgagacttaagtgctggcttcacgtgtgtctcagagcattcctagctgttgtggctatagggaaaaaaactccttctacttgagaaaagaagacattaaagaggactttatcttgcagcttaggtaccagttaggccacagttgggtagagcaacaagtggtctattggcatccctgattccaggcattagctcttggatggcatttctataactaccctgagccagagagaagccaactgccctgaaggtgagtcctaggcctggcagcactcatcataagctgactaaagagcctttggtccttgaatgaatatcattggtagccaggcagtactccctgtgggcctgtggtagtggtggccatgagaagagactcctcttcttatggaaaggggtaggaagagtgggaaaaactatcttgtggcttgggtaccagctcaaccacagtagaatagaacaccaagtaggttcctaaggtttctgattccagtccctagacaccagatgtcatctctggatgtgcccaggaccatggggaacttgccaccctgaagggaaggatacaagcctggatggcttgaccatctactgattgtagagtactagggccttgactgaacacaggcagtagccagacagtgattatactgcagcccctgggcaagacccagtgctattctggttcaggtctcacccagcacagtcccaatggtggtggtcacagggtgcttgtgtcacccctcccccagctccacgtagctcagtgcagggagagagacagagagagagagagagattgattccatttgtttgggagaaagttaagagtctctgcctgataattcacagaattcttccagatcttatccaagaccaccaagccggtacacctctatgcaagagccacggcattgctggaaagccttcccaagaaggatgggtatgaacaagcccaaactgcaaagactataacaaatacctctttaatgcccagacaccaatgaacattcacaagcatccaaaagcccatcctggaaaatatgacattaccaaacaaactaaataaggcaccagtgatcaatccttgtgagacagagatacgtgacctttcaaagagaattcaaaatagctgttctgaggaaactcaatgaaattcaagataacgcagagaaggaattcagaattttatcagacaagtttaacaaagagactaaaatatatttttttaaattgagcagaaattctggagctgaaaaatgcaattggcatactgaagaatgcatctgagtctcttaacagaattgatcaagcagagaatcagtgagcttgaagacaggctatttgaaaatacataggggaaacaaaggaacaaagaaaaaaaaagaataaagaatgcctacaagatctagaaaatagcctcaaaagggcaaatctaagagctattgcctttaaaaggaagtagagagagagagcagtagaaagtttattcaaagggataacagaatttctcaaacctagagaaagataacaatattcaagcacaaaaagattatagaacaccaagcagatttaacccaaagaagaaagactaccttaatgaacaaggcatttaataatcaaattcacaatggtcaaagataaagaaaggctccgaaaagccacaagagaagaaaaaacaaaaaacaaaaaacaaataacacacaatggagctccaatacgtccgtaacagacttttcagtggaaactttatgggccaggagagagtggcatgacatatttaaagtactgaaggaaaaaacttttatcctagaatagtatatctaaccaaaaatatcctttgaacatgaaggaggaataaagactttcccagaccgacaaaagctgagggatttcatcaacactagatctgtcccacaagaaatgctaaagggagtttataaatctgaaaaagaaggatgttaatgagcaagaatacatcatctgaaggtacaaaactcacttgtaatggtaagtacatacaaaaacacagaatattataatactgtaattgtggtgtgtaaactactagtatcttaagtagaaagactaaaagatgaactgatcaaaaataataactacaacaacttttcaagatatagatagtacaataagagagaaatagctcattgtaacctggaactcctagactccagcaatcctcctgcctcagcctcccaagcagctaggactaaaggcaggtgccaccatgcctggctagtttgttgttgttgttgttgttgttgttgttgttgttgttgttgttgttgtcattgtagggatgagtttttgatatgttgcccaggttggtgtcaaagtcctaatctcaagcaaccctcccacctcagcctccaaaagtgctcggattataggtgtaagccactgtgtctggcctataactctgactttaaattagtcctatgtaattatttcatcaagcaaactagaagcacaaagcagtgaaatattttagcttttaattataagaaatttcaaaaacaaaaaatgaaagttgacaaaaatagtgaaataaacctccatttaacagtcttttagcttcaacagttacgaattcatggctcactttgtttcatggtcagcttcatctacttccaaaacacatttaagtattttaatatatctataaaagataagtctctttaaaaatcataaccataataccattattatatctaaaaaaattcagcaaaaatgttcatgtgaaacttatgaaaaaggaactaagaatagttttatgtagctaataatacactgaatgatttttaaatctcattaaaattttaccacagctttataaaaactgaccctttgtcaacaagggctttggaattcatagctaatcattttctaactatttaaaactctattagcatccaacgagaatctgataattcgattgtttatttgaacttccctgatttttgttcattctatcttgcttagtgctaggctggatttggaaaagtcagattggctgataaaaagagattgataagttatgtgttaaagtattgtgaaagagaaagacattggtctacaactaatgacacagagatctgtccctattaaaaagacctatgataagttaaatacgacctaaccactttccttcaatttgctgaccaaatttctttgactaatattgcttttatttattgcaatttaatattgagataatccaaatgaaacagcttattctctgactgttccatctttaattaatgaaaaaggtaattcaaaaagtaatctactaatgtaacagccataggtgtgtatagcagtaatgtttagaaagcactttttgtcacacacatacacatttgtacagtagctcactgagatcaacaggcaggtgcaatttctgttttacaaatgaagaaagagagaagttaaagtaatcttcccaagattatacgtgagcctagtaggtatttcatcaaaaaacaattaatcatttggttaagtgttttaactctctgaaagtaaagaaaccttcttccgttttgtcaaactgtatttcatttctaaataagatatttaaattaacagatacggttaaagactaaaaaagaaatgtacaagagtattactgaaggctaaattaaatctaccatacagatcacttaccaaaagttgattgtgtggctatatcatgtgttatatacaaaaatagaaaaaccagaaatagtatatacaatttgaattctgaatcctctaatcataaaggatgagatgaacttaagtctcagaagggtaacatataaagaacagtggaagagctctgagcagtggcagagctagttagtatttcaaaaggcatgctaaaattcacaaaaccagggaaaagccagctatgataaaggcaatgtatttagactttcgaactgtctatggttcttttcctacctatgtaactttgctttctgtgtttttattcttcagcctcttcctgaataccttttcttctccatgccatttgttgtcctcacaccttttctccatttccatctgtcactctacctccatttactagttctcttttcctcatatttcttctgaatccttttgcccattctcatatcctttcttaactggctggtcataatatggaagcattttaagtataattcttatattaatttaaaatcagtaatattaaacttttatttatctcaaaaggaaatttaagtttatataaccctatgaaattactggaatgtgtgtctaggttgcaatccagctccacttcttactagctacgtgaccttaaggaagttattatctgaaaagtgtgaaaatgagataccaacctaagggggttcttgtgacaattccttcagaagacctgcatgccatgcgtatactatacaatgcgcttaacaagggctacccactattcaatgtacaaacacttcctttctctatctacatggagctgacattttgaacactactgggcactaacttatttatatcattgtacttgataaaatagaaatcacttaatgaaaatctccattatgacatgttgcacctactctccaaaccattagaaacagaaatgacaacaatacataaactgtcctattctatatttattcatgaggctgaagttatacatcagggggaaaaagtgcaagttaaacaaaacttccagttagtaaaatatcagtaacaagtttaactgtatataacaggtttacctgtattttgcaatatatttaaaattataggtaatttttgaaagtatccaaataactgtttgatacttgaatatggcagcatattctactgttgttaaagtctctggaaagcagaacaatgtgtatatactcaaaattaggctttgtaatggtcttaaagatataaaatcttgagtaataagcaaaatagtgaagtttcttatttgtaaaggaaatatatcaggaaggtttccactaaggtatttaactcatatagatatgaatagacttgatttaaatgtataatattccataacaacaaagaacatacccatccctggaagtctgatgtataatatgcaaaaagaaaatgcacagaagcaagagcacgaccttcaaaaagtcacctgtgtttgtgaaaatatttcagactagactttaatattttaacaggagaaaatgcttcccaagatgaataaaatctaaccaaggtataaagccctaataatctgtattttaatcataaatggaagacaataattacttgttaaaaaaaaacaaacaccctgatgtatgaatatagaacatttcttacatattcatgttaacattccttaaacaagaaaaccgatcatcaaaaaacaaaatctaaaattaggttatacatttttcatcatgtcagacaaataaattcacagctcactaaatgttctttcttacacttcaaacagcttataaaatcccacctcctttaaataaggttctccaataatgggaagtaagatggagaatccaccatccatcgtaactcagtccccttggcataaacacttaaactctacaaagaaaaccatgctagtaacaggaaagcacagaagacattttctttgtcacttttggcagagaggaaaaaaagaagtcttttatacaaatctgtttaacttttttaaattagaaggtcagaaagggcagagctcacattgtacaacatcaagacatatactcatctctccaactggaggggtcaaaggaagttttggggtattttcatgataactcttctacccaagtccaagttaacatatgtaagtagcacagggcctgactgacagtaagtactcaataaatatttattgaatacatgaatgagttaaatcaatccagtgctttgatttggacctcagtgcctcacaatgtctgtctctcccacacagtttcttcagtttctggcccttttcctctaactacaggaattaaaatcaagtacaagaggttggacaaggaagaggtgccatatacctagagtccttctttactctcccagcacaaatctctcccccctcctcataatttcaaaagatacacattagaaactgtcaagcactagaggctgggcatggtgactcacacctgttatcccaacactttgggaggccaaggtgggaggatcacttgagccttggagttcaagaccagcctgggcaaaatagtgaaaccctgtctcaaaagtaaataagtaaataagcaggcaagcaagcaagctgggcacggttgtgcacacctgtagttccaggtgcttgggagtctgaggtggaaggatcacttgagcccaggaggttgaggttgcagtaagccatgatcatgccactgcactccaccctagctgaccctgtctcaaaaaaataaaaaaagggcagacaacagtttctacaacttcagatggttaagacttgcatccagagtcaaaaggactggatttgaatcaatcatttcacaacccaacagtcacatacttaacctctgctaactctaataatctcgtaaacagaattgccatagggcatctcccattgagttgtaaggattaacaaggataatgcaagtaaagaattcacataatataaacttggtaaaattgctttaaatcagttaatttggcaaaagatagaaaagattatatgttaatctggaggaaatacctaaattttcagaatttcatttaagaaacaaaatcatcaagaaaagcatatatttgctcaatgatgtatttggattagttttgttgaggagactcagtctcttgaaatattaggtaatttgtacttacctaatattgtggaattcactatattcagagtatacatgagtgaaatgagggcctgactgggagtaaatattaaatgtaattcaattcacaaatgttcaccaccaactacatagtaatgcacactttcaaaaaaataaaggccctgtctagtatatctgtgtttgcaatggtagtgatggtgggataatgtgcacaagtatccacaataacatgagataaatgctaaaacgattatgtaaaaattgccctggcttcgaagaagagaaagcaattggttttatgtatttggattcccatttggttctacataaaacgaagatagaggatacaaaaggagagcctttccaaagataattccagagatggaaatgaggtagggaccattgtaaagaaaaaaaaaatagggacaagggcccagagatgtgaatgtacaaagtatatgagagaataaaaaagtgcaggtatcaaattctggctttgccctagacagcactattaacagttggtcacattatttaaccttctgtatctcagttttattatctgtaaaatggaaattagattattaggctaaggctttctcataaataaggtcattctcctaaaaatgtaaggtatcattgttaagacataacttttttcagattccttttaacctcaggttttaatattttaaatataaataagtctttaaaattaagaaatctaaacttgtgatatttaaagtttattttttaaagttttgaggatattttaatttttactcatagcatttaaattctgctgccttttaaacttatttcagagtacccagggcttttagtggtttacatcattcatctacatgatacttgtgagtgacatgatccataacagccaaataccagggattaacattcaagtcaacgcttccagttccagggcaagatggtgtattctattcctcctgctaagaacagctaaaaactctggacattatttataaaacaaacacatgaagactctgactctttggctagaaagagcagtatttccttggggcttttttatctgcatgcattggtgtttccaggttatctgctaatgtagcacctagtctgcaatataggaagcaaaaagaaaatccagagaattcattgctctgttgctcctctggttcctaggaaaatctcaacttaaataagaaaagacaatcaagagataacacagattttagaattatttgacaaaaactgtaaatcaaccatcataaaaatgctttaacaattatagacatacttgaagcaaacaaacaaacactctcagtaaataagtagatgatataaagaagaaccacatggaagtttttgaactaaaaaatacaatacataaccaaaacgaaaaagtcattggatgatctcaacagcagaatgaaggcaagacagaggagtcagtgaacctgaagatagaataaaaagtacccaatctgaaaaacagagaaaatgaactgaaataaaagaacataaccttagacacctacgtgactatgacagaaaatttaatgttcatgttatcagaattccagaaagacaggagaaagaatataggactaaaacggtatttaaagaaaaaatggaagaaatgtccccaaatttggtaaaagacataaacctacaaattcaagatgagcgaatgttaaacatgaaaaacccaaagaaatacatgtcaggaaataacataaccaaattcctaaaaacgaaaggcgaaaataatcctgaaagcagtaagatctctctacaactcaaatttaagacacaatttgaatgacatcagatttctcatcagaaaccatgtaagccagatggaagtagggcaatatttttcaagtgctaaaagaaaagaactgtcagccagagttctatatccagaaaaaaaatatccttcaggaatgaataggaattagataagaaaaacttacagaattttttccaagcagacctaccctaaaagtataagagaaagctcgtgaaatgaaatccaaatgattaaagaaggaatcttgaaacatcaggaagaaagagcaacaggagaagtaaaaatatggattaatacaatagactttccctcttctcttcagttttctaaattatgtttgacatcaagacagtcaagtcagtccaggatgagaaaagttcaaagccagattcaacccagagttaatgctccttttcccatttttttcccttttcaccagaaaatgggtacactaatcattccttggcctagagacctgtctaaccctctgaccctgcaaccaccatgactagacatgccttgccctgttacagctttaagaaagggagatttcagtctttgctcctgctagggagtgtatgagacaagccaggaatatatctgactgatataagagctccgcacattatttttaaacatgagaggaacaaaatattaaaagtgaaggctcgttttatttactatctggtcaaacaaatatactgcctcattctgtaccaacatattaatttatagaaacatatctaatcagtattacaaacagcatcacgcacattgatgataaattaagacaattctacatttaacttattcaaatagtgaagcttgttgctctgcaacctttgaaaggccatacacttgtataagagtacagcctacactgtaagaaaaagaaaaaggagttttgcaccccggccttcgggaatgttatcttctgggtttggcctcagttcatattccactgccccaaacaagatgctctaagaagcagtacagagctgagaactacaaaatataagcgacgtatattttctggaacatgctagtagaggttacctgaccacaattagatatattcttgtactaacaaaatatgcacactaggaaagtcctgctgagggctaccacattaggacagagaaagaactcctcttccctttatccaaaagtaaacagcaacgaatgaagagattgtaaaaatagtaagaaggagctgacagctctcctacatccaggcaacacatttttggcatgcaagaaaaaagtgaccttattattttttaagaactgtttcatatccaagagcccatataaatctcttcaaaggtttttaagatgtttaaaagccaggaaatttagatgtttcagtaccattaatgctaaccttggcactgcaactgctaccaatcaattttttccttttagaaagaatgcataattttgatgaatgctacagcaaattacacactaaaaacgtaatttttcatgtgaatggggccaacgtctcttggcatgcttgtcatcacaatatagctgctaatcttcaaatacagttattaacaacttcagaaaatcattcagaagaccaattctcctttttaaggtcaatgattaccacagttaatgaccaattggctttagccattaatgttctgacctttacatcattttttaaactaacaaggcaataaataattattaataatggcccattttgaaggatgttttttagtgaccatctatgctcactgaaaacataattgtgttgtgttttatataatcacttgctggtttttacttgttttcttactgcagctggtagtgttttataattaatataggaataagagtagaggatgaagagatagaaattctgacaaactctagtggcatttaaaaaataaacacagtaaaacatgtattgggttagaatatataaaaagtactgaaagatacaaaatgaaaagttaaagccatctttctcttacattctccaaaggcaaacactgttatgtttcttgtacttgcttataaattgtttaatgcaaatgctcatgtatggtatatgtacttgtttatttttccttttgattttacataacagtttcatacttgatacattctttgcagctttttttacttaaaatatcttggggaaccttccacatcagcatgcatagatctcatttatttaatagctacacagtattctatcacatgaaaatacaaaattatataatcaattccatattgatagatatctaagttattgcctatttttgttatttgttttgttattgcaaaaaatacttcaacaaatatccttgtagatatattttgaaaaactagcaccaattatctgcaataatttcttgcagtccaactctcagattaaaaaatatgggccattttaattatgagagatttatttatactgtctttgagaaaaactgcactgattgataccagccattgaaaagagtgtcccttgcttcatgctcctgccatcaccagaaattatcaaacttatttttgccaacctgcagggtaaaaaatacctcaatgaggtttttgcttggagttctttcattattaataagggtgtaaaccttctcatatgtttattccaagatggtattttcagttattattattttcttatgtagacagagtaggaaaattaagtctgttccctttcattttgggccttaaaagattacagacacttaaatgcttgtcctcttatcagatgaatcaagtaacagtttaatagaaatcttcctacagccagacttcattattctgacacaatctaatgtctggttttcaaaattcataagatttcctgaaactgagccaagagaagttggcaacaggacaagcaggttacaaacagaagaatgtagactgcaaacacaacatgcagtagctttcctttagctataatcatagacaatttgctaccctgttatacataacacacatttctccacattatataaactcttcgtaaagctcaataatattccatcaatcctatataaattgttttataagtttttattctttatataaataacatattgtatagttctacaatttgcttttatcttttcattcaatattatgtggctgagatatagacatattcattgatacatgtagatctattccattaattttaaccacttcccattatttaatatacagtgatttatcaattctcttatgtatttttattacaaacaatgatataatgaacattcttgacatgtctctttgaacacatggacaataaccatgataagatctgtatatgcagatatgtgtgtacttagaagtggaattgctgagtcttaacgaagcttttgcacgggtgttggagacaatataaagaaaagagaacttttccaatattggtgagaatataaattttcataagcactttggagaacaatttgccaatatcttgtaaagtgtcttcatctgtaactataaactagtttatcactaagattccttctagtcttgtaattttataactggggggtttcttgttatcaggtgtaaaactggcttaagtgtattcagagcaattaagctgcaatggaaaacataccaatgcatgattgaagaaaagtgctttacaaggttaaaaaacatcattcgtacaaaattaaatcagcagcctctttgttaagacaaaatgctatgttgtttaaaaaaaaaagaaactaattctgaaaaaccagaattctctaagagtattattttcaaattgcttctaaaatttctggaacaaacaaaatgactaaaatcaggtaaaaacatagtaagatagttggtgtgaattccagtagtcattggttatctgtaagttggcaatgcacatatgcctaggaacctaataccatttaaatatgttctactacacatagaaagatacatgaacacatataagaccatccttggcttcagtttgagggcaaaatgtcacagaaataactatagcccacaagagctgtatacataccaaatttctctgacagcagagaggcaaacattatttcaccccaaagctgggtaaaaggtactgctgccattccttatgctctaattgaaaaattctcaaattctcattatgcacagcatatctggaccatcatccacatgaatcagttacacctatactcttagaaaaggctgatgtgaagatgttctgaggcccccaagtagaatctgtggatcctctaaaggatttacgattctgtatcaatgatctgagagattccaaagaactgcaataataaagcaccctcagcaagttaaagcagattaccatatcaataaagcattctcaaaacaaacattcaaaattgtaaccgcatgatcaaagtaactgttaaagttaatgaagagaagaaaagctttcccaacctgtactatatgaaaatttccttgtaagacaggttccatgaatcacagaaaaggtactttattctagggaaaaaaggtgatttttttaaaaatttttatttctgtcctgagcaggttttctgcaatggtaattctggtatttatgcatgtagaatggttctttgaatactgtctccaaatgattcatacctgctaaatgtattatttttaaatcttttctcatgtttgttaaagcatgaaataccacctctccactcaaagttcttcagattacaggaatactattcatcatttaatggttctttcaatgtcatatgtcttaccaatatatctcataaaattatattcctctctcttctttgttctctttacaagaggaaaatgaataaattagcttacatcctgccaccagctgactcccctactcagcccattctccttggttctaacattccgcattaaccatcagggataattagaactaacaataatttaagaagtaagtacgcaaatatagcaaataattaaaaatgtttaaagtgggctgggtgcagtagcctatacctataatcatagcactttgggaggccaaggtggatggatggcttaagcccaggagttcaagaccagcctgggcaacaaggtgaaaccccatctctactaaaaatataaaaattagccaggcatggtggtgggtgcctgcaaacccagctatttgagagactgggctgagaggatcacttgagcctgggaggctgaggttgcagtgagtggagtgggaggccacagagcaagaccctgtctcaaaaaaagaaaagaaaagaaactgtaaagaggtatccacatacaagttataccttaatagatgtgcaatcaccttttcacacagtataggtattcttatgtaagctcgtattttgaatcatagaaacaattaagacatgaataagttttacaaaatcttaaacttcaaatttaaagaattttcaagttgcattatatactaaagaaacttactggtaaatgagataattatgccttttgacaaatgtaaactgtgcttctagaaaagaaagaatgaacaagattttccccaaaatcacaacatattcaaggcaatttccctatttaagcttgaactgtataaatcatatattctctggtattttagaggagacaagaaagcaactgcaaatttctaaaattctctgcctatggtctcttccctgtcaattcccaactatacagaaaactgtcccgaatgctttccttttctccactgtttaagtcattgctgggactaagtttgctgatctgctaaggatcagaaatcatcatcaggatattctgtaggcatcatttattcccaagagatgaaatgaacagtgggagaaaatgaaaatcataaatgcctctaatttcccaagatgctcatttaactctgtaatattaaagagtaatagatttctatttaattgtattgcaaggatgctacaatatgctaatttgtagaatatttaataatttaagtcataatttcacacaaatatatattttcccccacaaaggtgagctaaataatcatggtaaaacaaaggacagccctaccctctgctttctttaatagggctcttagaagcactgcattaagaccttcagaaaaatcattgagtgtcaatgtttaagttaatcccaatgtcttaaactgcctatctacatacacaccactcaatcacaatttactgtaatatgacactatgcaatctgcacaataaagttattgctttacatacgtatctacgatgctggaaataatttagtatggctttagtgagtgtacaaagggctcatacaacttgatggaaaagagcattaagtaagtattatctccatcaaagaaattaatcaatctggaggaaaagtacacaaacacagacctacatacacatacatacatacacacataatttgtcgtttatttttcaacataataaaatacattttttgcaaatcctgaaaaacattaagatagaccataatcatagcagaatataattattctaaaaatagaagtatgttactgtgtactgaaagctcagcatgcagcatattttaatatatacatacaccgtaacatggattttcactttttcatttggttgttcctatcttatctttgtagtattttacaaaatcataaatctaaaaactgacatgattttttatgtttgttcaatgatccctacattttgaccaattcaaagctaaattcataaaagaggaagaacagatagcaggctttcttttcacttttttaataaagtaatctaataactgatttttaattcatcatcaataggctttcctggtttatggaaatttaacagaattcttttgggttcataattaggcttaatctcaggagtcctctgggcttgcgtccaaggaaaaactgaccagatccatgacatgatctagtttcactgcctgcaagcaacaaaggcagatgtcatttctaacaggtgatctggttcctatttcacataaatattatatatagcctttcagtagtttcacctctgccccatcacaggtactcaaaaaaacatttgttgaggaaattaggggaggaaattagaggaaaattagaactaaaaatataatgtcgatgaaaaggttttgttcctgccaattgaatttctctacctgggattcgacttaggtgaaatccaccaaagaaaatgctgaacaaagcaaggcgtaaggcaagggcaaagatcaccaagagtagaaacagataaaggtctagaataaagccaattctgcaaatcataagcaagaccaagatcagtggaaatatgagctgtactattaacccaaggcttgaggcaaagctcagagtcaagaagactaagaaaagcctgctctcctggcaggtattacatagaatcttccatttcggttatttgcatatatctcatctcctgacaagatcacaacttccttggaaggattattgtctaatttacatttacatcccctgctatgcctagcacattgcagacattcaattaatattaggcaaattaagtactatgccttctaaagaaaatcaatgcttatcttgacattcaaacaaaacatcagctaaagtcaagtcaaaatatttatcattgggcaaaagtttatttttttatttatttcattttattaaaattatataggcacctggcttgaattatcaagtaactccaaaacgtttgtttaaaaaatagcagacttgtctttccacaccacctctaccctatttcccccttcccagaggtaaacattttcagttctttcatgatcattttggaatttacttccatatctccaaataccatatctccaaatgtttgtattgctacttcttgatttcaagttttaggcatttgacttttcaaatatgaaaataaggatgaagctgtattttctccacccagacccaacatatacacaatctttcctatgtagttgtataattttagttagattcacatttagtctttacttagttatgactatataaaaatatatttttatatttatcattcctattattcctattatactattcctattattccttctccttccctgcacaagtttttgtttacctgaggtaaataagtgtatttttttttgtttctgttctgtgttttccttacttagttttttaagcgtgtaacaagaattcaacacaaaattcttcactaaaggatatttttaaagttgtgttgtgcattatgacagtggtgtcactttagcattttcaggagcaacataaatatttaaattgtttttaactgtgtttcagttaccagcctctggctgaataggagtccattaggcttggatcacaaactacctgggctttatattggttacagatatttcggatgttacagaacttaacactgattagctatcacttaaaagtattaaattattttaatgtgacgtaatgaaaacagcacaacaaacaaagacagacagatccaatagagaattctggcttcaccctagctgaacagttattaatttctttgaccctcagtttccttatctataaaacagggattactgggaatatcataagttgatttctgattactcattgaataatttaatgataacaaaggacttggataaaatattccataagcatacatccaccatgatgaaacacagaattgattaaatcttaccaaggccgtaaatgacaaagggaggatctttagggtaaatactgagaacaaatgagcgagagtcatttgagctccaaagttcaggaagagtagcaaaggaagataataattatcattattattaactgaataatttctatttatcaggtgctatctcatgtaatcctcattgtcagcagctgtgatgtaatcttgtccactttacagatgagaaacagaggcagtgactaaatcctttccaggttcacagatactaaagtggcagaaccaagaaaccaggaattctcatgccaaaatatgtgcccaggtggactcagtcacgacctgataatgtcttccataaggatttaaatgggcaaaatgatcttaaattgttcacatacatattgtattataatttttttgaaagaaagacctgttggtacctggaccgaggaactaagagtaatcctatgacgttgtgtatgctttgttaaaggtagcagaaaaattatgtttgcatcaacctgcatctccccagaccagtcataccttgatctcaaagactgatcacattaaggatgctgaggcaggcgtgccagcaactgtggggatgcaaattacatcacaaggttatgatacatagagcatactataaactgaattgtgccgctccaaaattcttacattaaagccctaactccctaactccagactgtatctggagatagggtctttggaatgtaattaagattaagtaaggtcataatggtggggccatgattcaacagggccgtggctttagaagctctctctgctatgtgatgacatagcaagaaagcagtcatctgaaagccagaagagtgccctcaccagaaatcaaaccctgccagaccttgatcttggactttttatcctccagagttctgagaaaataaatttctgttgtttaggccacccagtctatggtatttcattatggcagccttagcagacgaatatgaaacatgaacttaaaaggaacaaagttagttttcttcttctttctaccctttcatatgttggggtaaaaaaacaggtacgaaagaagcactcagttgttgaaaagaaaaataatgtgagattcctagaagtagaataggttcaaagaaaaaaatacaaaatttctgtttgttattcattaaggagattaagttgcatatgaagaccagagttgggtcaaaaaacctgggctctaaggaggctcagtctcttattaggtagatgcccactggccaagtcatttaacctttccatttcctcagtttaattaaggaagtcaggataaatggcctttaacattttttttttttttttttttgctaaaacactctaggatcttacaatctagctggtggaaagctagtcaacagaagagtatacccaggatatattgctgaagtgataacacacagagaatttaaaagaaattccaaattagatctgagaaaccaatagaaaaactaaacataataaacataatagataaagctagacataataaaagctgtaatatgctttatccagggccctcatatttccaaggcagtctatagatcatagtgaaagcaattatacaatttccatttaaataacaagtgtctgtgcgttaaaagtggcaggttttttctcccttgaacaataagtcttcggcgactatcagctattttcaaagcacaattagaattgaagaaaagacagcacaaacaatactgtttttcaagctatgagaatcaggaattgaagagatctgatataagaggaaatcaggtacaaagaaactatgttggttaaaaatatatataccacaatccataaaaaatgtctatcgatatgggatatgatggttttgtggaaatctttgacttaaaagttctaaaaagctaaaactatgaagctcattttattatgaaaactgaaattgagaattgatttcaaagcattcagaggattccaatgttttaaaaacataatgtatcctcaatgtagctgtagtgaggcagacagagagccctggaagtaaagttgtttacattcctgacctgccagctgctggctgtactatcaggtctaacacacttaacctctcttagccttttagtttcacccacacagcctcagttagaaatgaatatgactaatggggctttgtgaaagggctttgtaaaaatgttgcttgaaaaaaattcgagaacttctaaagaagtccaagacattttctcagtgtcaaagatgtgacaatatgagatgtaagacacataaagcaaaacgaaaagcaaaaggaagtcccaaggcaaaagaatcacataaggatagagagggtatctaaaaggaatttttttcaatagctgtcaaaataaaaatttaaatacgtgaaagcaagcaatagattattatttttaaatttacctacttggcactaacggtttttaaaacctaggctaagttgaaatgtgcagttatctataaggtaatatattttattgttcctatcaggatggtaaactctgtccactactggcttcctctacaaaaatcaatactggagaaactagcttagtgagagaaatagttataagaaacttaaaaaaaaaaaacaaaaaaaaaacctatgtacgttgaagtcaggatgctgcagcctaatttgggaggaaaccggttgttggaaaacttttccatgctactcttgcctctcttataaagataggtaaagcatacatcttcaccacggcatgggcattggacaggagaggactagttgttaatgtcagcattaacaattagtaatatggggcagcttaaggactcttgtgaagtgaaggtgaaaaccataggtagtgaagaggcaaggggtgatcagagtgattgggagattgggtggttcctatagttctctgccaaataacaatgaccagaggctggtcatccgcccttcccaattcacattaccacacagggtagctatatccaggaaataagaattgatctaaaaatcaactaataaaaacatctacctattaaagaaatacaactatctaaacatgtaacataatgggcttcccctttcagtaggcataggaaagggaggaaacggcaaaaccatgccaggcaacatcgtattacaaggagggaagaagagaacgggttcctatacccctacatttctcccagaccgatcattccaatcaggcccacaaaatgagagacaactaatcaagagattcttggaattgctgccactgtcttggagctcacaaaaggaaactgtattgtgcctgtggaactttaagccagaggagcagaggaggcaatggccactagatggcaccaaactacagccaggaccaagaaagattccgctctgtgcccaactcccaggacttttgcacaagtttgctatagtcatttcaccaatatcggtatcacacagtctcgcattttacataactgaaaaatctgcgatcccctgattgtcttgtgtagaggttgtatgtgctgaagcagaattattgaaatacatgccaataattcaaaataaacatgatatagctaaggcactaaggaaagatagcaatgtgaagtatgaataagaaatcattaaaaataatgttaagtattagtaaaaaaaaatattaaaatacaatagagataaacagtaggataaatacagttataggataaattgttgatttagaaaatcaaactgtggtccttcctaaaagacaatagaaaataataatataaaacaacatgaaagaaaaggcaaggaacagaagcagttatgtgaacatccagataacaggaggctcagaaaaaaatggtgagaagagggaggttgacagaccaaaaaaagcttgaaaggataattaaaataaatgttacagaactaaaaaagaaagatcaaagatctcagaatggaaaaattaataggacaaataaacccataccatggcatattatgggtatggttaaattttagaacaaaaagataaaatttctaaatcttccagaaagaaagaagataaactttggaaaatgagtaaaagaatataatatattttttaagtattgaagaaaacaattttgactctagaattttacatcaagccacactgtcacacaaagatgagtacacaatagaaatgctttaggcatacaaggccacagaaggtttgcccataaagacccaaactaaacacattctagagaaagtattcaaataaaaaacaaaatcaggaagatgatgcaaatatacaggatagaagggttacccaacattttacctgttattgtcttaaaaactaacataaactaaacacaagcttaaaaaaaagaaaaaaacaaagagcacccacaactgagaactaaaatgctaaacaatattaagaagaacaagcagcacagaaataataaagtgaataaatcaacaaaattccaaacaaaaatgtaatagggaagatttttaaaacgttactttcctgaagaccaaacatattaataaatatttataaacctttctcaagattcaccaaacttagggatgagatggggagatgggggggatgggacaaagcagcaaaatacagaatgaaaagggagaatacaaagtgatacatattttatttatttatttatttatttatttatttattttttttgagacagagtctcgctctgtcgcccaggctggagtgcagtggcacggtcttggctcactgcaagctccgcctcccgggttcacgccattctcctgcctcggcctcccaaatagctaggactacaggtgcccaccaccacgcccagctaatttttttgtatttttagtagaggcggggtttcaccatgttagccaggatggtctcgatctcctgacctcatgatccacccaccttggcctcccaaagataaatatatatttttaaagtgttgtaagtataggctaataatttggaaatctacataaaatggaagaaagtcccagaaaatatatacatcaaaattgtcaaaagaaatagagaccttgaatatgccaaaaattatgaaataatttggaaggtactcaaagcatccctctcaaaaagccaatggtctacgtgattttttacaagtgggatttaagaaacattaatgacttcctaatgcaagctgttatagcaaataggaagagtgtaaaactatacagctcattataggaggctactggaatcttgattccaaaatgagacaatatacgagaagaaaatatgggcccacttcacttaggaattagatgggaaaaaacaagcaacaacaacaaaaaccaccatcaaaaaaaagagctaaataaatccaatactttattaaaatacaattgtcatgaagtgttctggaatgtaaacttagttcagcagtatctatgactagctcaattaatagagggaaagcatgtgataaccattactacctatttataatttttaaaagtgttaaattatacagtgaagggaacttccttaagttggtaaaggttatacaaggatactgttcaatctgaacttagctgaaaacctgctagtggaactcagtgacaaaattaattcaaataaattttcagtttttaattttcctcaccatctcagttctcattactcactacccaaaactcgtgaaccatatataaccaattaattgagaatcttgctacaccaactccccatctgatttcaggccccaagtaatcttagcaaagaatacctgcatgaacactacacttaatggagggtctgcatctcctttaaaatcaggaacaaaagagactactatcaacacgactcaaacacagttgtagaggtcttggacaaaattaaattgaaaataaaataaaatttgtaacgactggatagaaagaaaaaaactatcattatttttagatgatataaatatccacctaggaaaaaaacaataaaatgtttaaaactgcagtacaagggaattcagtgaagttgccaaataaaagagttcttatcctggagtctataaaccctaatgggtccataaatttggatggaaaaataattacatgtttacattcaatgaaatacttctatttactttccctaaactttattacatttttactttcactaatctctattcagcatttctattataaatacagtcaagaaaccacagttgtcagcaataaaaatcaaaggtgtttccacatcacattatatttgttgcagacatcttaaaaaagcattaatgttcattatttcaaaattataattagtcaatattatttaatacataaaaaacacatctatgtattttcacattatcctgaaaaagttcccatagaattgctgcatttcaaagtgtccaggaaacttcactccaaaaacccatgatatgggagaaagagaaaattatccttattagaacaaactacccaatatgatcagcaaatttcattcttaatgtgaagtatttgcttcttttaaagaatctctactttatgccgggtgcagtggctcacgcctgtaatcccagcactttgggaggccgaggcgggtagatcacgaggtcaggagttcgagaccaacctggccaatgctggtgaaaccccatctctactaaaaatacaaaaattatctgggcatcatgacacacaactgtagtcctagctactcaggaagctgggggaggagaactgctggaacccaggaggtggaggtggcagtgagcttagatcacgccacagcactccagcctgggcgacagagtgagactctttctcaaaaaaaaaaaaaaaaaaaaaaaaaaatctctactttaaacgtctcttttgaatgaaatcatttggtcctaactgattcagaaagacaacaggtactgttgtaccagtgtagcatctataagttaagagcacccaaaacactgaaagagttaggtgctctgtcccaagtggtcaaaagataaagagaaccaacaaaggaactaaattatttaaactggccaaaaaagagagagtaggtaaaaatagtcaactttataaatcattatataaagtaggataacaggatggttcctgtctctatactagctcttttatactatttcaattttttaaatgtacaggtataagtaggcttaaaatgaaaatagatttcaattaaaaataaattaaaattttctgaccttgaaataaatgaattaggaagtattcagaattttcatctagaaacctttctaaatacatctccagttgttgaaaaagatcagagtgcaaagatgagatcagctctcttaagccttgccagctttattggcccatgacaataacttcagttgaataaatcttagtatgaaagtgccaattataactcttctaatttcagtgaaagaataaaccggtcaattactttcgacttccttagtttatatttcctaatgctatctagtatcagtaaacatgaaaaaaatcatgttttttaaattatatcattatagtgacagttgatagtttttaaatttttattggcattgtcataggtcaaaagccctatttcttttatctgtgatccatcctctatattaaaagattatatgaattaatattgtcaagaatacaaaaatctttaaaagaagcaacagaataatttataagttttgctttaatcaatgatttatctacatttaaaagttttctcttgttttcatagacactgattatttcattgtccttttagttgctttgattatatgactaacctgaggcagctgttacttcattttctgaaatactttatcagtcattctacctaatcggatagaactatctgcactgatcttctgcactaatcttcaggaaaaaaaaattcaatttgacatttaaagatattaatacaattcttaaatctagacaactgacccaattaatcatatacattttcaaatgacaagaaaccaaaagccaccattgcaaatactacttactgttctcaacaattcccataatattagatctagactatattaaacccagtatcactccataatgatataataaaatcaacatacactaaaaacatcctatctgtgatttccaatgttcaactgtattttgttaatctctatatcattcattaagagataatgaaaccaaccattgttcttagggctcacatacacagtaacatccttactttcaccaagacttatggaatttgcactattattaaatatcttaaaaatctctggaaaacaatatttaatcatcttcacatcaggatctgttttcttttttgtttgagaaatttattctaaaccagagcatctcaaatattaatgtgcaagcaaactatagcttgttaaaatgcagatcctatttcagttggtgggtctggggtagaacctgagttcctgcatttctaacaaacttttaagtaatgccggtatactgcccatcctcagatcacactttgaatagtaaggttcgacactacaattaagtttaacttttacagaaatgcaatatggttcttcatatacagaaatacttagttgcccttcagttttttcttactgaggggaactaattccaaatcttccatatttctgaactttaaaatgtctataatatacgagtaagtgtggtggagctggggcacatactaaaaatatacgatttttttttcaagttttaaaaatagccagaatttgctggaaatctcataatgcaactgtaagtaaggagtaattattagcagaaactataattctaactttaaagtttgaatacagtagtctcccttatccatagtttcacattccacagtttcagttacttgtgatcaaccacagttgaaaaatattaaacagaaatttccagaaataaaaaatacataaatttttcactttcatatcactctgaataccaagtatcatgattaaatcttgtgccatcctgctctattccacccaggtcataaatcattcctttgtccagcatatccacaaatgtcgacactacacacccttagtcactcagtggctggctcagttatcaaatcaactgtcagggtattgcagtgcttatgttgaagtaactctttcttcagttaataacatccccaatgtgcaagagtactgatgctggtaattcacatatgccacaaataagccataacgtgcttcctttaagtaaaaaggtagcagttttggacttaagaaaaaaatggtatactgaggttgctaaaatcaatggtaagaacgaatcttctatctgtgtaattgtgaagaaggaaaaagaaatttatgctagttttgccatcacacctcaaaacagcaaaatttgtggctacagtgcataataaagtgcttagataagatggaaaaggcattgtatttgtagatggaagacaacagaaatgtgttctgattgagggcagttgggtttagcactatctgtggtttcagacatctactgggatccctcatggataaggggaactattagaatgaaaaataatttttaattagttagatttagattttagatttattctatggcataattttatatttattctatagcataagttgcatttaattttacaaaaaaattattcaaaaaacatgctttttactattaaaggtatttaacattcagatattgtcaaattttgaagggattagcataatatattcaggattttccaataatggatatcactaaaaattatttaggacatcattaaaaaatctagttggcaataaagaaccagtttccctaaataataacgaaaaatcaaattaagaaaaactaatgctattatcaaatctttgtatatttgaaattgttatataatctaaatttagaaaactcaccaaatttttactactgaactagaaatccaagaactacaataagaaatttcacataaccacaaaatactcaacttctagtttatataagacattaacaaatttaggtggtctgaaattcttaattatgtaaatcatcaatgttcaaaatattcagtataagatgcagggtgctacttaatcttactcctactagtcataagtagtgtaacattggtaaagttatcatcattaagtattaatttcccatttctataaaaacaaagcaaattacttccctcatctatggtttattaaacaaatattttgtgcctattctggggcaggcactatgctgaagtaaagaataccaaagtactcaccacagcacttacaatctaaaccagaagaaagacaatatacaggtggctgaacaagcagatgaataaataaaataagtgctatgaagtcagataaagtcagatacgagggttaaaaatgactagaactgctgtatttggtagggacagattaaagaaggcctccttggggaagtgacatttgagctgagatctgtctctaagacattatgaaaaaccaatgttcacgcctattttgttttaaatgtattttctaaattttattattaataagctctgtttatttataatgataaacagggatgatgtaaaatgcaaaaggtaatttccaagtaattttagttttttgttgattgctaacaaagtacaaagttggataatttaaagtgtgtgtcctggacatgtcccatcctctagtatagtaataagaaagaaaaaattagaaaacattaggcagctgatggggagaaactggggagaggggaagaataaagggaaattaaagagctacatgatccataaagtggatattcaactcatgaataaatcataagtaagtgacacttctattttcattttattcctaagaggcaacaagaggtaggtagggatgtgggtgtgtgtgtgtctgcaggcacaaatgcatgcatatgtgctgtggcttttatacttaacttcacctaacactcctctttttactttcgaagcattttatctcaaagtataagatttaaaggcaaatctgtaactatgaaacggctctggttcaacgttatcagaaaaggaccagaactttaggttatataaattctcatgtttttcttctgagatgcatcagtcacttggcacaatacttcagtcattgcagaacacctgattcctcactccttccctgataaactgttcaatcagaactatgttgaatgtatttttaagtatcaaactaaaaaggtagaattcaaactgaaaaaaaaatggcaaggaaagaaacgcattttctttaaagatatttacatactactcaaaagaggttgatatcagttactacatatcctctttttataggtttttaattaagggactttaaaatggactatatgaattaccttggaatgtattcttcaggggaggtagaattgtaccactaccatcttagagtttttaagctggtcctgagaattaaattgaagtgagatccacaggagaaaagcttacacatctatttaatacaagttttatgtgccacaagagccttcataaagaaatgaagacccaaagactcaattagagttgaatattcatataatgaggtagacaaagagtagtaaattatgaaaatataacaaagcaaagggacttcagttagggtggttattttaggcagagaagtgaccaggaagataaaggttggtttcataaggttgtttgtacaaattcccctcagcttcaatttcccatccttgctaagaatgttactttccttcatatcgggaggacctctttcacataggaattccatcttgtgcttttaaggagtaggaggaaggtaagagtgatcttcttgaacctactgtttttcaagtgacttcacctcaaaataatcaatatgccactcaaagtggcgtattttgaggtggcatgctcttaagttctttaattatttccttacactgttatgcaagcgttcaatctttagttttagatgacatccatgatcacagcaacagtactgacaccattatctctaagggtaacccaagaaaggtataacctcaagaacttagtgggaagaatatacacaataactaatgccatcaaatttggttatattggatacagatgaaaaaatctgtaaattcctcaatttttatttattttttccacatgatcataaaactggtgcacaaaagaacaatcttcattctctagacctggagaaatctgaaggcaagaagattaaaatatgggtactggatctcctccctcaccctctatgcccctcttccaccaccttccttccaacaatatatcacctagacagattgtaaggtcttccaaagaagagaaccatgtattatttgtcttggaatccatagtacctaagacagtgccaccacaaaaaagctattcaataataaagaaaatttgctgaaatcttttagacgagggtttgttttctcttttttaatcaagttactttactacttgaaacactgaataaaacctaggtactgccctaaaatacatttccctctactactgttgctacaaatatcaaggtacaggaatgtggctatatcccctcaatggagattaggtaggtcccagcagaaccagaaaacaaaacaaaacaaaaagcagccaaaccaagtatcaaagctaaaaggtcttctcaacaattttgaaactaagatttcaaatatgtagattaaagatactaaagaagtaaacaatctccagcatctaaaagcacccaggagaggtaaaaagtacacatgccaggtatgttgccatataaaaaattagattataagaaaaccgtagaaactcttaatggaaaaggagtcttaaatactgagaaactctcagtgtctgtggataccctacaaaaaagtgaaggcgatctcccctacaatccattccactcataggttgagaaaggctgtttcctccatacatgtatctaaatgaaatgcacctaaatcatatatttatgatgcagttaaatcacatatttatttataactatatgaatcatattttaattatatttataattaaatataatttatacatcatatatttatttataaatacataaatcacatatttagcaacaattgtaatgaaaaggaggtgactcttaggttaataaaaaaaaaaaacatgttctcaaggaaatttgtctagtaaaaccaaagaaacagagcatccattagccataaactttgaggataagtgacatttaagattttctttctcagtatgatgtttgtttcaagtacgttaacagttatgttaacagttttaaattattatgttgaaataattgaacagctgacagttttaaattatttctcctttttactattatgagaagggggacagttatgttaacagttttaaattattatgttgaaataattgaagagttgacagttttaaattatttctcctgaaccctttttactattatgaggaggggggaaaaccacatacacataaagactaacagactgctgaaattctcctccaaaagtccatttattcatggtaaacattcatctctccccctttccccctctccttctccacattccctacctccctgtgtaagcatgcaattcacctcctttcccaataattacatccaatagagcagtggaaatgatgaagacaaatgatttagtaaataaagacaatgcaaaaaaaaaaaagaaatagcaacagaagagaatatgattaatgaaaattaggtacctatacctaatcaaatcacagtagaaatcataatacatgatggtctcaattcctccagtgaaataaaccatgaaaactggagctcccttcctcttccagtctattaaagaaggcctatcttctctattaatccaacaaatgtccaaatcatatttatgtgtggcagcttcttatcctcccccaactctcagcccaacatctgtttgattgtgataagaatgctacaagctagaggaggcaccagaatatacacacacagaacaaaccaggttaagatagctggtgaattcctgacacccggcaaaaccataagcaatctctttattcattacaatacagactcaaactctggagaaaacagtaggaaggtcctacaaacacacattatcaaggatgggcagctaccatgaagaaaactaccaatacagtcaacttcttgagaacatactggtggattaatacatgtttatgagttgggaaatacctgccaacagataataaactataaaacaacacctgaagcaacatgctcagaaagatataaatgcaagatttctctatgtatctatttgtaacatcttaatgttcattcattgctttcatctagttggaaaaatccttccaagtatttagtgatagaactagggaggaagcgttaagaattcttgaaagatctccaaaacaggaatttctggctcccttatgtgaccttcagcaaattaacctctctgtgcttcagtttcttcatctataaaatgaggctattaccagggcaacaggccctaaaatgggccttatagggtggtaatgaagactaaatgagctaatacactggtacaatgtgtggcacataaaaagcaaccaacggccgggtgcagtggctcacgcctgtaatcccagcactttgggaggccgagatgggaggatcacgaggtcatgagatcgagaccatcctggctaacacggtgaaaccccatctctactaaaaatacaaacaaattagccgcgtgttgtggtgggcacttgtagtcccagctactcaggaggctgaggcaggagaatggcatgaacccaggaggcggagcttgcagtgacccgagatcgcgccaccgcactccaacctgggcgacagcaagactccatctccaaaaaaaataaataaataaataaaaattaaaaaataaagaaaagcaaccaacaaacgttagctataatttttttttttttttgagacagggtctcactctgttgcccaggctggattgcagtggcacaatctcggctcactgtagccaccaccttccaggttcaagtgattcttgtgcctcagcctcccaagtagctgggactacaggcatgtgctaccatgcctggctaaaattttatgtttttagtagagacaggtttcaccatgttggccaagcttatctcaaactcctggcctcaagtgatcaatccacctcggtctcccaaagtgctgggattacaggcataagctaccacacccggccattagctacaatttctataataaatgatcccgcattttcccaataaaacggtttctcatttaacttaggataaaatcaatattattgtcatcagaaacctattatatatatgactagtgtcctaattgtaaaggtcacatcatgaatacagctacagcaaaatgaattatttatgtgtgtatgtatataaaaatactctatgcagagtatggtatgaaaaacataaccatagttaataactatcagcgaacctgccccgatattcacgtaggttcttttctattttccctaagtgtcggccagcttgagaaataaagggacagagtacaaaagagataaattttaaagctgggcatccgggggagacatcacatgtcggtaggttccgtgatgcccacaagccacaaaaaccggcaagtttttattagggagtttcaaaaggggagggagtgcgcaaataggtgtgggtcacagacatcaagtactttacaaggtaaaagaatatcacaaggcaagtggaggcagggcgagatcacaggaccataggaccgaggcgggatagcattaggagatatacctaatgctaaacgacgagttaatgggtgcagcacaccagcatggcacatgtatacatatgtaactaacctgcacattgtgcacatgtaccctaaaacttaaagtataataataataaaaataataataataataaaaggaaaatgaacaaaaaagtctctctggcctcaatgccactgaggcctattactggaaagtatacataaaagtttaaagaacaaaacaaatgcagaaaaaaaatgcaatatttattatgaataactcttggataaatgagggagaaactattcagttactatgcagctaccataaaaattctttttatcaaaatttgtacaatatttccaaagctatgctcagaggcaaatgtacagccctaaatgcttttattattcattaacaaaaataaatgtcactaatctaagattttcacttctatgaaataacacaagcctaagagcatcagagaaagaaaaaataccaaaattagttgatttgatatatgcagaaaggacatttgaaaaataagttgaagagatgattctgtggaataataaagagtataatgaattaaatagacacatagcttgctgttttcattaagaacaatgtagcaaacccatggatatatagcattagaatgaaaagctatatttcaacagatacagtgatcattaaaaagtagtaaaaactattatgtaaaaatctaggctaatgaatacaagaaccttgatgaaaatgttacttttacaggaatttcttaaatgataaaaaagtgattcaggaaatgtgagaaaacaaaaatgtctaatatctataagaaagaatgaaaaataattaaagacttataaaaaaagaaattaaaattgctaatgaagtttcgggcatcattgtcattgataacatcttatcaggagacagggtttttgagatcaactggtctgaccaaaatttattaggtgtgaatttcctcttcctaataagcctgggcgtgctacgggagactggagtctatctcacctctgcagtctcgaccataagagacgaccacgcccgggggggccagtttagagacctacccccaggtgcgcattctctttctcagggatgttccatgctgagaaaaagaattcagtgatatttctcccatttgcttttgaaagaagagaaatatggctctgttccacccagctcaccagcggtgagagtttaaggttatctctcttgtttcctgaacgttgctgttatcctgttcttttttcaaggtgcccaaatttcatattactcaaacacacatgctgtacaatttgtgcagttaatgcaattattacagggtcctgaggtgatatacatcctcctcagctgaaaggattaagagattaaagacaggcataggaaatcacaagggtattgactggggaagtgataagtgtccatgaaatctttacaatttatgtttagagattgtagtaaagacaggcataagtataaaagtattaatttggggaactaataaatgtccatgaaatcttcacaatccacgttcttctgccatggcttcagctggtccctccatttggggtccctgacttcccgcaacaaataacattaaggattttgtatgttacaacttttacatttattacaatatttaaaaacagaaccccaagtgtaagtacaattattactattattatcctaattatacatataaggaaactggagagcagagaggttaactactcaggtccacaaaaaggaagtgaccaagacagaattaaaccccaagtctttgtaatcctccaaaacagagttccttaccagaatgaatgctcatccacaaataactaactcagaattcaatttatacacacatatttaatctcacttaatgacctataagattacttataatgaatgctgaataaaatgcaaatgtgcaacttataaagtagaggataaggacacttctttcaccctaagactgcaatgagagtctggttgactaaggcactgcctacgacacaagactccaacagaaaagttggtcaaagagctagttaagattttttgttttgtttattgttttggaggggtttttaacaaaatatttaaagtcaaaccagtgtatgaaattactaaagcaatttaaaaaaatgccacaattgtcaccttctaagtggcctggtctatgctaagcatgctatgacttaccctgaatatgtttccatagaatgtaaaatagtaaccatgactcccttctgcctacttctattgccactaaataggtcaaatgttttactatctttgctatcagacagaagtgatggtgaacaggaactaatatcaatgaagtgctacctgtgtcaagaactatataaatagttcttgaatagttgggatatagaaatatatcttcccaacatcacatgagcaacatattattcaaattttgcagatagggaaatgcagacaaagagagacttaagtctcttgactaaatcttccactaagcaatggacagagcctgaatttgaactctaactctagagcttgctcaagcatggattccagaagcagcctcagctgtgcttaatgaacaacacataacctaactttctttgctggctctaatctcctaattccaacccatttactatcacagaatcaatgtggatgaggaatgttggcaggagagaatttgtacattgcatatagatttacccttcaacataaccaggagaaaacaatttgaagagacattatgcataaaatttttaacactgcattaaaagttgaaaacaataaaaagaaagaaagtaaatgtaatccaatattaaattataactggaggaaaaataacatgtctaactccaagtacgaaacaaaatgcttaattaattagctggatttattttaatgtttcttaactttttaatccttcatatttcactccttcactgtactacagaactttaagaaattgacatagcagtttattttaaatcctttaattgctttgttagaatatgaaaacattactttcagagaaactatcaaatgaccttgatgatctacacaacattcattatagactggtaaacatttgtgaaaatccttgctgtgatgattgattgcatttttccttgcttcagttactgcaaactaaattgcctgtcaataaagtgatgacttctgtcaacatagtttcttaatccttattcagtccttttagcaatgacaaccttagaataatatattgtaagtctttatggatcaataatgctgctcagtataaaacactgcaatctaccaccaggatttttatccttctatttataatgatctctgacaagctacctagcagtaaaatttcttactaaggagaaaaaaagacgtctaacaaacaagtcaaatacaacactataaacagcatatgccaatccaaacaagttaagaattttgagtgaagctcaatattagcaaaatgcttttatcctaaagtagttaatgactgagatgtcatttgaagaccactcaagaaaaaaaattattattcaagcccttagacattttgaaatgatgtatgggtggttatttatgtaaaaagccttctctacaatgtcagaaacagaaaatttccatttaaaaaccataaaacataagccaatgcataccctggctaattttttctctaggcaattagaggacttttttttttcatttaatctatatttagattgtacttcagacatctttatgtgagaagtagattataattgcctttaaacactacaatttagatgtttccatttaaaccaaaaattacttaaaataaatgccattctatcaatgaaaacagaatcatgacactgctttacaactgacattgcctcttttatatagagttatgttaactatgtcttctctaaatctgcatttttatcatttgttaaactcaactaacctgatatatttgatagcactgaactggaggggaaatttttcaacaagctagcagttcaccatatttctcctcccaaactcgtgaaccaagagaaaataatctgattttattgttattattttttaaaatgagagtgtattggatttatgaaagaattaacttcttatcaacttattaaactttctgggggaaaaaatgtaacctccatgcattccttttcaagaaactactgaaaaaattaaaattgaagagtaaaacaagtaaaaggaaaatatagaaccaagaaaaccagaaatctaatacacaaaagagacaaaagaaacataaattgaagcaggagggttgaaggtttcaggaggaatgtctgtaaaaacaaacaaacaaaaagccaaacactaatttatttggtcattctgaaaagagcttagagttctctcagtctgaagcaagaagcagtaattggtacaaagaaaattaagcaaatgggggtttaagtcattaacttcccctaaaaaacaaaggaatacctcagagatattgcaggttcagttccagaccaccacaataaagtgaataaaagcaagtcacatgaatttttggtttccagtgcatataaaaggtgtgtttatactacactgtattctattaagtgtgaaatactatcatgtcttaaaaaatgtatataccttaactaaaaatacttttctttcaagatagttgactagaagcatttcaagcatgcctcatttgcttagaagacccaaatcatgtgtagacaatcacactgtgaatacatgcctaagagggaacacgagttcaacagaaaagcaaaaggaaacactgcaaactaggaaggaaaaggagaaaaggcagcctgcttggctgggaccagccaggaattgggagttatccccagtatgggagagggtaagtgagggtcctattgaggtccactttcccacaagggaattatacaatccgggccaccagagaacgccctgaccctccaacccccaaatctaacttacagagtggctagaagactgtgaaaaggaactacttcagggaaagaacacatcctgggttccacaccctttctgaaacctaagaaacagtaagatgctattctcaatcttagctcttaaaaggctgtgtgcagtcctaggaacccgctgcaccagtcctaggtgttagagaaactcgggctgctgcatgcagaacagaggcacaagtcaggggtggactcctgcaaacaggactgagaagaaaagtgtaacatgggctgcagcccccagtgctagaagcaggcactgtctctgggacttaggcaggaggagagttgccacagaggcttgatcttgagcttggcaggggctccaatggcccaggactgagttgcaggccaggcacaaactgccaggtctgatagaacagccaggtcagctgcaacagcagggaaaatggaatgagccccaccagaactggggtataagtgggactcaaggccttggccactaggtttgaccccaccctccctgtggctggacctcaatgctgcagtagccaccactcacccaagcattctgccaggggcctgagaactgcatggcctccccatcacagctggtgcatgcacttgccactgggggtcctgagtgcaagcttgaccagtccagatgtgcctggctttgcccaacctcctttgacaagacagggtaagagatccagggtcctaaaggttacaaacccaatccaccacctggtacattgaagcactcctcttgagagactaaggttggacataaacaccctgctgcttctggctcttacctgtaagcaccacctgctggcctggaagccagcctgcacatttcaaccactgccaacacaagcacacagcatttggaacccagaaaagcatctcaacactgttactgccatcaacaatgccatgtcagccaactcagagactcgtgagctgcttcacctggccagtaaactgctattacaaccaacattcaagaaagacacctagaggcccaagaatcagcatgcctggaatcactaacacagttgccagtgttcaaagccctgggaacaaaaggcatgcttagtccaccaccatcaccactaaaacttgaagaccaggccacccagcatcccagaccccagcacaacttcatcacagcctccaaaaaacaacagcaccctaacaaactgaggaaaccacggataccagtaatgctatttagctaaaataataatattcacaatcacacacagacttcagtgctgcatgcacccagaaacaaaaccaaagggccctactcaaccaacatcatagtcacatcttcaggaaaaaaaaaaaaagtaatatgacacccctaaagaagcacaataattctctaccaatagatcttaaccaaaaagaaattctcaaaacccagataaagaatgttaagtatttattttaaagaacctcaacaagatgcaagaggaatctgaaaacaaatacaaagaacacagaaaaataattaagaatattaatgaaaaatttaccaacgagataaatatctttgggggaaaaaagcaaattctggactaaggaattcaatgaaggaaatacaaaatatattcaaaaaattttaaaaaaagactagtccaaacagaagaaagaattttagaacttgaagacaactcttttgaaataatccagtcaaataaaaacaaagaaaaaaattaaaaaagaataatctaagccttcaagacatttgggacaatgtgaagcaactgaacttatgaattattggaatacctaaggaaaaagagagatcaaaaagtttagaaaacctatttaatgaagtaataattgaaaacttcccaagtttagcatgagatttagacaaccagatacaggaggctcagagatccccaggcaaatactatgcaaaaatgactttgccatagaacattatatcaggctatctaaagtcaaagtaaaaacagcaaattctgaaaacagaaagaaaaaaagcacctattcacctataaaggaaattacatcagattaacagctgacttctcagcagaaaccttacagaccagaagaaaatgagatgatatattgaatgtgctaaagaaaaacattgccagcaagattaatcttcataaaggaagacaaaataaagtctttcccaaacaagcaaatattgaggggagtcattgctattagactggttttacaagaaatgctcaagggagtcctaaacttggaagcaaaaggacaacattaaccatcataaaaacacatgacagtataaaactcattggcaaagtaatcacacaaaggagaaagggaaagaaatgtcaccaaaacagaatactaccaaactacaataacaaatacagaaaaaaaaacaaagaatttagaaaacaattacaacatgacaggactaaaacctcacatattagtgtttaccttgaatgtaaatagattaaatgctccaattaaaagctatacattggcagaatgaattaaaaaaaaaacatgatccaactatatgctgatcacaagaaactgaccttacctataaagacacataaaaactaaaaataaaggggtaaaaagagatattccacacaaacgtaaatcaaaagcaagcagtagtagctatactcatattagataaaacagacattaagttaaaaacagtaaaaagagaaagagagaggggggatataataataaaggaatcaattcagtgcaaggatataacaattctaaatatatatatgctcccaacagtggagcacccagagtcataaaacaaatattactagacctaaagagagagacagatagcaatacaataatagtggaggaattcaacaccctactcacagtattaaaacagataatcagtacaaaaaaatgataaaggctggacttaaactggactttagaccaaatggacctaacagaatttacataacattctgcccaactgcagaatatacattcttttcatcaacacactgaacattctcctagatagaccatatgttaagccacaaaacaagtcttggcacatttttaaaaatcaaaataatatcaagtatcttctcaggccacagtagaataaaactagaaaatcaataccaaaggtcaaatcaataccaagagggactctggaaattttacaaatacatggaaattacacaacatactcctgaatgaacactgggtcaatgaagaaattaagatggaaattaaaattttttgaaataaatgaaaacagaaatacaatataacaaaacctgtgggatacaggaaaagtagtactgagagggaggtttattgcattaaatgcctagatcaaaaaagaagaaagattacaaattgccagtataacaatacatctccagaaaccataaaagcaagaataaaataaaccccaaattagcagaagaaacaaaataacaacgatcagagcagaactaaatgtaacagagactttaaaaaatacaaaggatcaacaaaacaaaaagttggtttttcaaaaagacaaacaaaattgataaatagctacacagactattcaaagaagaaagaagacacaacatcagaaatgaaaaaggagaaattacaacttataaccatagaaatacaaaagatcatcatacacttatatgctcacaaactagaaaacccagaggaaatggataaatgcttggaaacatatagcctcccaaggttgcatcaggaaaaaatagaaaacctgaacaaactaataatgagtcagtaataaaaagactgagtcagtaatattaataataaaaaactccccaaaaaagaaagactcaggaccagatggattcacagccaaattatcccaaaggtacaaagaactaactacaatcctcctaaaactgtttcaaaaaattgaggaggatggaattctcccaaactcactatatgaatccagtatcatcctgataccaaaaatgaaagacacaacataacaagaaaactactgactaatatctttgtttaacacagacacaaaaatcctcaacatactagcaaaccaaatccaactgaacatccaaaaaatataccatgatcaagtgggttgaatgtatcaggtatgcaaggatggttcaacatttgcaaatcaataaatgtgatgtatcatataaacaggatcaaggacaaaaaccatatgatcatctcattagatgcagaaaaagcatttgataaaattaagcatcccttcatgataaaaaccctaacaaaacagacagagaagaaacacacctcaaagtaataaaggctatatacgacaaaaccacagctaacataatactaaatgatgagtatttaaagcatttcctctaataactggaacaaagcaaggatacccactttactattcctatttaacacagtactgaaagtcttagctagagcaatctggcaaaagaaataagtaaaaggatccaaactggaaaagaagtcaaattatccctgtttgctaagatataatcttatatctaaaaaaatttaaagactctattaaaaaaaactcttacataactaaattaactgaagttgcaggatacaaaatcaacatacaaaaaccagtagtgcttctatatatcaacaatgatctaactgaaaaagaaatcaagttggcaatcccttttataatagcaacaaaaaaaaaaaacctaggaacatttaacttaggaagtgaaaaatctctgcaaggaaaattacaaaactctaatgaaagaaactgtattatagatgacaaaaatgagaaaacagcccatgctcacagatcaaatgaattaatatcattaaatggcccacactgcctaaaacaatctatagtttcaatgcaatccctatcaaattaccaatgtcattttttacacaagtacaaaaaaaatcctaaaaattgtatggaaccaaaaaagaactcaaatagccaaagcaatcttgaacaaaaagcacaaagctagagtcatcacattagctgatatcaaattatattataattttgttataaaagaacaaagctcacatcacgtaagctgataacaaattacagtaaccaaaacagcatggtactggtataaaaacagacacatagatcaatggaacagaatacagaacccagaaataaagccacatatttatattcaactgatctttgacacagttgacaagaacaaacactggcaaaaagacaaatagtgctggaaaaactggactgccatatgaaggataaaactggaccccaatctctcaccatatacaaaaatacactcaagatggattaaagacttaaatataggaaccaaagttataaaaatactagaagaaaacctagggaaaactcttctggacattgatctaggcaaagagtttagattaagacctcaaaagcagaggcaacaaaaacaaaaagagatgaatgtgacttaattaaactaaaagggttctgcatggcaaaaggggtaataaacacattgaagaaacaacctgcagaatgggagaaaatatttgcaaactattcatccaacaggggactaatatacagaatatacaaagaactcaaacagctcaccaacaaccaaagactacaaataaccccatttaaaagatagcaaaagaaatgaatatatatttttcaaaagaagaaataaaaatggccaacaggtatatgaaacaatactccacatcgctaatcatcagagaaatgcaaagcaaaactgcgatgagatgtcatcttactccaggcaaaatagttattatcaaaaagacaaaaaataatagatgttggcaaggatgtagagaaaagggaacattaaacactgtagtgggcatgtaaattagtacaacctctagggaaacagtatggagatttctcatagaattaaagatagatttaccatttgatccagcaattctgctactgggcatctacgcaaaggaaaagaaatcaaaaaagatatctgcattcataagtttactgcatcaaaaagatatctgcattcatatgtttactgcattattcacaatagcaaaaaatattcaatcaacctaagtgtccatcaacagataaaggaaatgtggtatatacacataacaaaatactactcagtcacaaaaaagaataaaatgtcttttgcagcaacatggatggaactggacgtcattatcctaagtaaaacaagccaggcacagaaagacaaatgtcacatattcgtattcctaagtgtatgctaaaaaatgagctctcatggatgtagagtgtggaacaatagataaggaagacttggaaaagtgagtgagtgggaggggggaagatgatgagaaattagttaataggtacaatgtaggttattagggtgatggatacccttaaagccctgactttactactgtccaacctatgcgtgtaacaaaattgcacatgtaccccataaatttacacaaatgttttagtcctaaaaaatgcaaatgatcatctgagccttcagtaagctgtaatctttttgctggcataaagttttgcctcaatgttgatggctactgattgatcagggtagtggctgctgaagcttggggtggctgtggttaatttcttaaaataagacaacagtgtttgatgtatcaatgaactcttcatgaaagatttctctgtagcatgtgatgctgtttgatcatattttacccacagcaaaacttctttctactacagagtaaaaattgaagtaaatcctctcaaatcctgccactgctttatgaactcaatttacataatattctaaatcctttgttgtcatttcaacaatattcacagcatcttcaccggtagattccatctcaagaaaccactttctttgcatatccataagaagtttgatcatgcaactgcagcaattcagtcacatcttcaggcttcacttctaattctagttctcttgctatttctaccagatctacagttacttcctccactgaagtactgaacccctcaaagtcattcaagagagttggaataaacttcctccaagcttctgtttaatgtttatattttggcctcctcccatgaatgatgaatgttcttaatggcatctagaatggtgaatcctttccaggttttcaatttactttgccaaagaggaatcactatctatggcagctatagccttacaaaatatacatttattcttaaacaataagagttgaaagtctaaattactccttaatccacaggctacagaatagatgtgttaacaggcataaaaatggcattaatgtccttgtaaatgccatcagagttcatgggtaaccacatacattgtcaatgagtggtattattttgaaagaaatcttttctttctgagcaataggtctcaaaagcgggcttacaatattcagcaaaccatgctttaaacagatgtggtatcatgtgggcttgaaaacagtgggctttgtaaacagtgggcttacaatattcagtaaaccatgctataagtgggcctacaaacagtggactttacaataaccataacatatataataataatggaaaggtttaaaaaattgtgactcaacaaaataaaaaaaaaacaaacttcaggccaatatcgttgatgaacatagacacaaaaatccccaagaaaacaccagtaaaccatatccagcagcttatcaaaaagctaattcaccacaattaagcaggttatttatccttgggatgcaaaagtggctcgacatgcatgtcaataaatgtgattcctcttataaatgcaactgaaaacaaaaaacacatgattatctcaatacatgcagaaaaggctttcaatataattcaacatcccttcatgttaaaaaccctcaacaaactagacattgaagaaacatacttcaaaataataagacccatctatgacaaacccacagccaacatcatactgaatgggcaaaagctggaagcattctcctggaaaaccagaacaagaacaggatgtcctctctcactactcatattcaacatagtactggaagtcatagacaagcaattaggcaagaaaaaggaatgaaagacaaccaaatagaaaaagatgaagtcaaaactatccctgttgcagactatataattctatatctagaaaaccctgtagcatctgcccaaaagctccttgaactgacaaacaacttgagcaaagtttcaggacacaaaatcaatgtacaaaaatcagtatcattcctatatacaaacaacatccaagctgagagccaaatcaagaatgcaatccaattcacagtagccacaaaaaagaataaaataccaaggaatacagctaaccagagaggtgaaggatctctacagtaagaattacaaaacactgctcaaagaaatcagagatgacacagaaaaacattccatgctcatagttaggaagaaccaatattgttaaaatggccatactgccaaaagcaatttagagattcaatgctattcctatcaaactaccaacgacattattcacagaattagaaaaaaactattttaaaattggtgtggaaccaaaaaagagcctgaatagccacagcaatcctaagcaaaaagaacacgtctggaggcaccatgttccctgactttatactacaaggctatggtaaccaaaacagcattatactggtagaaaaaagacacacagacaaatggaacagcatagagagcccagaaataatgacacacacctacaacaatctaatcttcaacaaagtcaacaaaaacaagcaatgggaaaaaagactccctattcaataaatggtgctggttagccacatgcagaagattgaaactggatcccttccttacaccatctataaaaatcaattcgagataaattaaagacttaaatataaaacctaaaactataaaaatattgaaagataacctaagaaatactattttggacataggacctggcaaagatttcatgacaaagataaaagcaattgcaacaaaaacaaaaattgacaaataggacctcattaaagagcttctaaacacagcaaaagaaactactgacagagtaaacagacagtctacaaaatgagagaaaatatttgcaaactatgcatctgacaaaggtctaatatccagaatctataaggaacttaaacaaatcgacaagcaaaaagcaaacaatcccattaaaaagtgggcaaaggatatgaacagacacttctcaaaagaagaaatatacatggtcaacaagtatatgaaaaatgctcaacatcactaatcattagagaatgcaaagaaaaacgacaatgagatatcatctcagcccagtcagaatgactattatttaaaaaaaaataaacaacaggtgttggtgaggctgcagacaaaggggaatgcttctacaccactgatgggaatgtaaattagttcagccattgggaaaagcagtgtggtgatttctcaaaagactcaaagcagaactatcattcaacccagcaatcccattgttgggtatataccctaagaaatgtaagtcattctaccctacagacaaacagacatgtaagttcatcacagcactattcacaatagcaaagacatggaatcaacctaaatacccactgatggtaaactagataaagaaaatgtgatacatatacaccatggaatactacctagtcataaaaagaatagatactatcctttgcagcaacatggatggaggtagaggccattataccaagtgaacaaacaaaggaacagaaaaccaaatactacatgttctcacttataagtgggagataaccactgagtacatatgaacattaagaagagaacagacaccagggcctacttgagggtggaagggaggagaagggtgaagattgaaaaactaccttgtatcaggcgctatgctcattacttgggtggcaaaatattctgtacagcaaacccccacaacatgcaatttacctatataacaaaccgcacatgtaccccgagcctaaaataaaagttcaacaacaaaaaaagctgaaggtaacatttagaaaaaaaaaaaagttgtgagagttaccaaaatatgacacagagacatgaaattagcacatgctattgaaaaaaatgggaccaacagactggcccgatgtaaggttgccacaaatcttcaatttgtaaaacatacaatatctcagaagcataataaagcaaagcacaataaaatgaggtatgcttgtaaacaaccacaagttacaaaaaggagggaaaaccgaacatagtacattatgtagctctattgcaaatgttcacacagtaatgatagtgttatataaatatattggaaggatgggaagagaaaaaaacagaaaatgatggaagggaggaaaaatactaaattattttctttcatagtagaaaggcattatgtaattaaaatttaaaagtcaggaaatggcagtgagaaatttgtgtgggggtaatacaaaggtaaatgaaagagaaaatacaataacaaaaaagttgaaaacagctgtctctgtggagaagactaaaaatggagagagaggtatctactcttcactttaaacataactttgactttttaaactatgtacacttactacttttaaaaacacttttaattacttgaatgaagtaaaactacatgaagcaatgctgatgacatctcaaaaaatgttgggaagaaaatgaaaactgcagaatgttcactattgatgccatttataccaagttcaaatacagaaaaccaacaaaaagagggaagtgtggactctgaagttaagcaaactggaacacctctacttactagtaatgacatcatgggtaaatgaaagctcttagcgacagctttctcgtgcaaaatacagataacaatacctgtatgattatgttgttttgtaaattaaatgatataacacacacgaagtacctggttcatagtacatgcttgataatgtgttattattaattttctttttctccacttttcaacttttctatgatgaatatgtaaatttaattcaaaaatgtttttctaaaatgttaagacgttccttgaattaggaagttacatccattctttgttctaatatttggtgttaaaggaatagctcagcctcaattacacctcctttgtgctgatctcacacacaaataaacaatggaccaagaccaatatgtaaagaagtatcagtttgaagaagtgccctgatctcctcctctacttttattcattctacagattattggccgttcattaggtttcaagggatggtatgagaaggtatggggactataaagatgcaaaatgcatggtgtctatgctcaaagagcttactgtaatcaggagagggaagcagagaggaaacaggcaaatgctgccatgacatgacatggctttgaagttaggcagtctggggttccaatcctgtaactgtgttttggggaaaatttcttaatatctaagttccagtttcctatgtaaaaatctgaagaacagaaattgctttggaaggttgcctaacagccacgataacatccttaaagcaactatcatgtgacttacagtatgtgctcaatatttggtaactcttggtcctattaaaattattgcaggagataccttctaaaatgaaaaattcaggggaaagtctttgtgcaagtgtattttactctgtaaaacattcacaaaaacgcacaaataaatgctatgcagattcatagggagagaatctactttcagataagagaaaccaagggatatttttagtggagacactggcattttaaataccatcttccacaaatcttaagacacattttcatgttttaacatctctgaagctgggtgtatctggcaatgatggtgtgtcagtttaactggcaacattttttcttagtggtacataaattaataacacatcttagattcagtgaagtagagtccatagggatgaagagaattctgtagaatggcaatagcaaaggcacacaatactgggcgtgaatgttagcacatatagttcaggttggctggcatgtcattgtacacaaagaggagttaggaagcaagactgaaaaggcagactgttccattagttgtttttttaccccatgtctcgtgatcacactattttaatttaccattcctgtatggtaaatcttggtatttggtaagattaatcagctttagtgttcttcaaaattatttggctcttcttgctattccttcccatgtcaatttcaaatcagattggcaaatattgtaaaaagaacatgctacttgggattttgattgggactgtattgaacttaatggattaattttgggggactttctattcaatcacagaaattacagaatagaaactatagaacagaaattcctgttttcccatccaaaagcataacactgatctccatttatttagatcctatatctttcaacaaagttgtataatttttttccataaaggtcttatgtatcttttgttggatctattccttggtattttgggggttgttattgcaaataatgtttgaattacatcctgtaaattgatggcatattaagcaatttaaagtatatacggtgattcaattaatgctaatgtttaatcttgttttctgcatgttgatatacatcacaatttaaaaattaacaaaaatatttccatgatatacagaatattaaaactgcagaagtggaaacaaagaagttcataccacatatgcaacgccatctaaaataattaaagaacagatttaaattgtcctggaaagaacatagcatccaaaacctacactcatgtatattatacaatacatataaaatgttgagctattaaatattggactagttccatttctgcaactgtgaaataaatgatatgagtggcaatgatatcaaaacaattattgtcacccaccttattgattatattctgtcaactctcaactgctcacaccaacagagagaaacactgatacatgcaacaaaaaaactacaaatagttcacctagctgagttggaggcatgctaaaaagttaggcatcctctaagtttgtaagtattcagaacagccaggtcatcacgtgctctgcttttccttaaaacaacttcactgatcctacaagacagctggtagcagagaattgaaattactggcaggagaaatgaatctcaaacagttgccttaagtgtgaaataggctctacacaggcatttatttttccaaaagttctttaacctaagttctaaattctccttattctctttaccctttcttagaggaatattaacaaacttaaaaaatgaaaataatgaagtgagtttgggaccagtatgctaacttccaaattaccatgatctgagttccagatctcaagacatccaactgcgtactagacattcctaaccaagtgttctccgacatctcaaatgagacatgtttactactgaagtcctcccattcccaaaactatgtcctctttccattaatacctatgtcaaggactagcagtttaagccagaaacccagcagtcagtcttgagtactgcaaaaaacattctgaacccaatgcacaattaatcatcaagacttgctggctgactctacttccttaataccctctctcctctcactatcactgccctcagttcaggtggtcatcatttctttcctgtactattgcagtaattcctttaatttgtctatctccatcctctacagaatgatcagaataataattcaaaaatgtaaatggatgttactcttctattcaaaattatttaatgcctccccaatgcttaaaggataaaagccaaaattgttaacatagcaacgaaaaagctttttttttttttggagacagtttcgcttttgttgcccaggctggagtgcaatggcgcgatcttggctcaccgcaagctccacctcccaggttcaatcaattctcctgcctcagcctcccaagtagctgggattacaggcacacaccaccacgcccagctaattttgtatttttagtagagatagggtttctccatgttagtcagtctggtctcgaactcctgacctcaggtgattcacctgcctcagtgtcccaaagtgctaggattacaggcatgagccaccatgcctggccccccaaaagcttttatagtctgtatctctagtcagcctcatggtccacagtccgttcttcctgatctttctctctaaatgtccaccagaactttgcatatactgctccctcaacctaaaatcccttctttattttctattttccacctggaaatattcttcaaatctttataaactagctgagggatcatgacctcacaaaaaacctctgaactcccaagaagacttaagcaatgctcgaagtgtcttttcaatcatgccttattacatagcacttagaacatcacattttaattctccattaatgtctttctcctcctaaataatatttaattgggaaataccaagacttagcatggtgtcagtatttattagacactgtaaaaatatcttgttgaggccgggcgtggtggcttacgcctgtaatcccagcacattgggaggacgaggcgggtggatcacgaggtcaggagatcctagctaacatggtgaaaccccatctctactaaaaaatacaaaaaattagcagggcatgctggcgggtgcctgtagtccaagctactggggaggctgaggcagaatggcgtgaacccgggaggcggagcttatagtgagctgagatcacgccactgcactccagcctgggcaacagagcaagactctgtctcaaaaaaaaaacaaaaaaaaaaaaacaaaaaaaaacttgttgaatagaaacagtattcctatattagtttcttattagtctgaaaatatggttattgctcatactttaaatatttcttggtaggaatcattacatcttacaataaggatttctcattataaagtgaaatattgtaatactaataagttattttagaaaattgaaatattttacactaattttagtggcctattcacaagaaactactgaaagctttcacatctaaaacaaagtgtgaaaactgtgaattccattaagtgaaagacattttcaaatatggggacatgtgtaattttattcctagaaaataatattggaatacttctgtttcctctataatttccctaagtctctacctgactctgagcacaaaacttttaggggatcatatacaatttccaaaacaaaaatacagcttcaaaattgtaagtctaaaatgaagattatatgcttaagtaacttctccaaataaaccagacttgcttgctaaatcacggtatattttataatcaaaagatgaaacaccataaaaagcaaacaggtatttgctgttaagtcattaattttaccactgcagaaattatttaagaacattattaataacgaggatctcactcagaagtaatgtattttggccaggcgtggtggttcatgcctgtaatcccattactttgggaggccgaggtgggttgatcacttgaggtcacaaattcaagaccaacctggccaacgtggtgaaaccccatctctactaaaaacacaaaaatcagccaggcatggtggcacatgcctgtaattccagctacttgggaggctgaagcacaagaatccattgaacccaggaggcggaggctgcagtgaggcgagatcataccactgcactccagcctgggagacagagcgagactcttgtctcacaaaaaaaaaaaaaaaaaaaaaaaggagaagtaatgtatttcaatcattaagataaaaaaattcaaagcagacatgatattaaaaaaactgattgtcaaatctatacttatttctaacataagcattcaaagaaagaaaactacatatcaacagtattttgaaaagatacactatatatatggtatatatatattcttactgaatatatatatattcagaacatatatatatatatactgaaaaaaaaaaatatatatatatacacttactgacagtagtgttcaaaatacaggctctaacccaaaaaaggatgaattcttcttattttattgtctgaagtgtatactttttgtaattcctaatagctgtaggctcccaaaaaatactttgtgctttatcatctaagctaatattaacattattcagtgattctcaatcattataaatatttttatgaatttttgaggagaactgtctaggttcagaagtttatatcccaacagaggcttttaaacttcatcttacaatgccaagcaaagaataaaaatctcaaactgaagaaatcaaatttaactctctctctcttctcttgacatttgtatccatccatattcttcctccataaaccactgaaagcaaactgcataaaggtaagtctttactctgaacttggctagaagtgataagaaaactcatcaagacaacaaatataaaaacaagttaaaaaaacaaaaaaatacaaatctaagccattattagtcataagcaagtctatttctgcaataaaccttgttacagaatgacttacttcatatccacagttgttctttaaagccatctactaatgttactacattcagcctatatttaaaacaaaaacacctatgttaggtcttcatttttaaatttaagagtctacttttacagataaggtgtcaatttacttttgttcttaacagtatttatattcctaaaaaagacacattttggttagtagttatttagagtgacattactttaacacaatgcagcaacaacaaaaaatatttatataagagtacacttttttaactctgaaggatatattatttactgaaactttacacaattcgattcctagtaaaattttaaaatatttttcagtcaagaaaatattttcaattaacattaatttgtgatattttactacaagaaaaaatatttaagaactttctcccaaattcatatacttttccaaattttgaaatatagtaaatttttaatattttttaaatataaaaaataacattgagcatttaattctcatatattctaagcacattacatgtatattaacacacttaatcctcatagtattcttataacataaatactgttataatccccattttactgaagggctagggaattaagtaaattgttcaaggagacaaagtagaggagctaagaattgaacccagacggtctgctccagagtccatactttttactatattattatacagactcctgcctgccaagcactatccttaagacttgaaattgacagatcaaacaaacaaatcagttactgttttcaaagagttcacaactatcaacacacacacacaatcaacaaaccttctagtaataagagatcttccagtaatacaatccaattgctaatagagctcaaaccagcatgattaattcttaaagtaacacttcacaaatttggcctgtgcctcaggtctcaaaaggtaggaaagggaaagagaaaggaaaaaagtaaggcttaaggtcaactggaacaagactataaagttctagcgagtgacattctaaggaatttagattcgactgtgtagcacacagtagatagccattaaagaatctttaaaatgaccagccaagtgttctagtaggaaaattaaacaaaaccaaaaaaaaaaaaaaaaacctttcagtgctagtaagaatagggtggaacagggaagagattggagacaataacattagtaattcaattagtcaacattacacaataagctctctggaatagatgaggaagactgaaataagagagttgtgaggagaaaagaaagaataaagttatttccaaagcttagacactaaatttttaggagaaagacaagagatagggaagaatcaaggctgaatctcaagtttctggattagaacactaggaagaagtgatgacattaagtggataaggaaaaagcaagaggagtcaaggggaatcaggatatgattcatgatttgaaacaatgtaatacagctgacactacaagtcttcattttcatataaaaaatcagtgactttgttatgaaatataaaatgccaatttagtttcttaaacttgtttctttcggccttatttataactattttcttgctaataatacatctaatactaagtactgaatgatttatgtttagaaagtacaacctaaaataaaaaaatcaacctccctaaaacccaaaagcactgatttatttactgtacattattaatgtatgagggttaagactttgatgcagctgtagcctcactttgatgtcaggaatggagagaagtaccagttgccttctatatctagtcttaaagaacacacatttttaatatcttcgaaaccatgaaatgtcatttcatatttatttttttgctttgctctgagaaaataagtagctttattaatatctgtattaaatctatcattaaaatatcttttaaaatgaaaacttcatttactaatacatacttcgacagtatccatttcaaacaaaataacacattcaatatgacaaaaatcaaaattctaaaaattacatattaataacaaaaatggtaatttttgtttttaatatacctaattccattgttgctcaattagataatatacttttttcattcaaattgatattaaaggaaaataaaaagtattttattatcttaaatattaaatttagcatcattttctgaaataataaacctagcatgcataggtaacaatatataaatcacctaaccttcttcaattggataatctccacttaaagcaaataatcatatttaataactccataaataaacagggtttattcttaacacaggattaagaccattcacctcttttaaaggaaaacttataattcagtagtatatagcaaagttagaaacttaaacagtaaaggtaataaaagtgagtcattttataatctacaacagtaaaggcattctggtgaattttatgagaagtacagtctttagacataagaccttattgtgacaaaattatgtaatatatagaacctcagtaattaaggaatttaattaacaattgttgctgaatttgcaaattaatatacttcaggttgaccaagagatggtgctcaatctccatatatataggaataaatatcccaaaagcattaccagtaaaataaaattattttcagactatgtggcaatttaaagactcaaacatcaaaaatccaatgcataaacatcacattaactgtttattctgtgcagagggaaataattttggataccttcaacgagaattttaagaatcatactgactgatcatctatacaagactgctaaaattgttttttaaatgtttctgaaacattgctttcaaaattagcattcagtactacaaaaaacattaagcaactcagaaataaacttcaaaaaaagtttattcataacaaattaagaaataattttaagtcatttattccaacttaactcatgctttagaattcttactgaataagcatttaacattctattcctttggtagaaatacagtttttacaacaaacaaaaaacctaaaatattcagcaaaatcagaatccatatatcttcaaaaatttacagtttatggcattatattctccatttataaaaatggcatatgacccaactgactgaattctaaatgtaagctacagtcaccaaaagcaatgcaattacttctgaacagaatgatgataaagcaattactcctgaattgccacaaatacccatgtagggcttatattatacaattttaatttactattatataactaatttgtttttctttttagggagcaagaaacataaagtaccctagaaattctagaaagtacagctccatatgatatacaatgccccaacaataactttttgtctatttaagttatagtcttcttgctacttcttactactatgtgaacaagacacacagaatttggcttccaaacatctaaataaaacagaaagcactgagaaaaatcgtttttgtataaaatctgtgcatagagaaagttatttctttctactccaccagtcaaagaagatcaataaatcaagacaatcatagatttaaactaaaatctaaacaaaacttcagtaggctttaaattttactgaaagcatctaaagccctaagtttttctttataaaaattaaattccactaacttgcctaatgatgctaaggagaaatcaacaaaaattcagtctgagagatgggaaacaatgttgtaactgtaaaaaaatataaatcttttttttaatagcaaagttcttgatcaacacaaaacacagttcatcctttgatatagtaatatactatcttcctcatacagaatattaaataaaagtatcaaagtcttataattcctaattcaatttaatttttaaatccatgtttgtttattcactattcttaaccattaatcaaaaacctaatttagtgtatacatattttcaaaataaaacaaaaaataaaaacctaacatgtcagcatttaaaatatatttattcttgcagtttttaaaatgagccttttttccatatccacattaaaagtatagcacactgatttaaataatattatttactttcagtttcatatatagtgccagcatttaatgtattaggagagtataacactttttcctctattacctagctgccaatatggatacctcattttaacatgagtacatatctgaacaaaaaagccccaaatgtttactgctattttaaaaaacagtctgatttataacagctttttaaattatttaaaattgttaaaaatctgtcaagattctatcaagtttgtttttcttttaaacaaatggcagagttggacctttatacctttatgacatacatacaggataaattcccaatctgcacctagtttaaagcgttagggcagatccctctcttctatttccaaattaaacctgaggttctcacccacccatctccctacctcaagataccattaaagtatattttgtacatacatagtacagttttcaaactacgttttcatatcaacacaagcaagtttacattacacaaatatgtactaaaaaacaaagacacactagtttatagatatagaaaagtacttaaatcacaatctaaaagttattgaataaggaaagaaaagaaaacaggagggctaatttctatataatccttcaattttagataaagatatatttttccagaaaagctccctggcgttttactttccaataaattgctataatgaatacctatacttcaaaatgcaaaaaataataaaaattaaaattaaaaaaaaaaaaggccagcctgcccctgttcatgattggctgcttgtccagtaatgcctgggtccctaggtaagttatccactctgcaggagctgattgaagcagtgcatgtgaaattcggaaggctccagaaggaactaaatagcgtggacacaataacacgacaaaatgtcagtcgagaatctgaaaaaaagggtagatgccatggaaaaatcattagatatttcttcccagaacatctaaaatgatgggtaaataaagctcaatgtccaaatctagatcctacatttaaatgcttcagaaaattaatttcttaaagtttaaaaggagtatgtccattcttacggacaattcttgttacaattttcagtttataaaattttaaaaaccagaaatagataatcatatatcagcagttcacttaagatttttgttaacattttagaataatcactgcttatacaaatgaattagtatttatatctctgactcgaaaacttttagaaacttaaaaagtaaaataattttcaaaagttttactcattgatactaaagaactccatttacttgattaaaaaatatagcatcgaggaaaaaaatatgtatctatccttcaatattcaactatgtcaaagatctaaaatggaagattctttctacagagagacactcaaactttttctacttctatatttagttcaaagtggcccaatttagaaacaaataacatttattattttttcctcatattcaatttttggaattgttgaacaaatgcttccagaaataaatataatagttgtaattaaatggttgaatcaaattatctatggtattgtttggataactgtttaaaactaatgactataaaagatcttcttttttatattacttatctccacatgaagattttctactggaaagtttaaccatgttttatatacagaagaaatagttttatttcactattgtagcaatttaagaaaacctggagggcagcttctagacctaaaaattattcattagtatgaaataactcacttagcttttctcattcacccacaaataaaaaggtaacaaagaaaaaggaaaaaataaagatatatatttttattaccttgcatctatataatgaaggtctatatgcaattgtgttatatatgtaagagtaaagttctgttagttccaaaaaactgatgactcaaaatgatttagaatgaaagatcatagtaaaataaaatgaatattaaagaatatgtctgtatatatatatttaaagtctaaaatagtagtttaaaatgcagtctataattagatcacagagaataaaatatagtatacatatacatgtacacaataaaaagtaacagacctactgaagtttcattttgtaaaatcaaattgattcatgatgtgattactatagcattttaattatagcttcttactgcattttttatgcctctgagcatatgaaaatgtacaaaaacactcagagatctctgaatttattattcctgccacttattaattcagtggactttggtgctcagttttctattaccaagtcttaagatagaggggacacatatgtatatagatgaattaagtgataaaaacctaagatgaattcaagagctttaaaaatgcataataaaaagaagttttaaaaacaatgcagatcattttttcatagagaactgttggcatcatttgaattccaaaacgatgttaggtcagtaattttactaaatttatttttacatatatttacaacagcttatctatactgcaagattcttacatctttctcacacagcacttgcagctacatttctaatggggaaaaaaagtaaatattatgctaactgccatatagttgaatgcaacaaaaatgaactgtggttaacttctagggcagttgtttgttttaaattgcagtaccataggtctaatctcaagaaaaaagacaaacactggacaaataacacttattcttggatggaatgtgagtgataaaattttaacattcctggaaaatgtatatcagtcattggtataaatgatgtgtattaataactatccaccaagagacaggatttttccatttaggacaaccatcaaaaatttagaatccaaaaaagttcagcacattaatcccaagaatgataatttctataaattttatagatgcctatcataccaataaatgcctattatgatttttaactctgataacaatgaaatccagatatgtctcattcttaatgggagatatatgtattgataagctataacaggataactaattttaagaatacctcctagtaggacaggcaatccaaccatttctcatgtcgtgattggaatatgacatttctgtgcgccaacccatcatatgtctttctgaaaaacatgccacaaatgtggaccaatcaataaagtaattggtcaaggctactttttctgaaaatacatatgtcatccaatgcaactaaattgatatatccaaggataaacaaagtttacactaaaatcaagacaaagatagtgtaatgactatcccaagtaaatataaagtcatcactagtcaaaaatacttccatgaatacaccaacatattgtaactgaagaacaatttctttccaaaaaaaagggtgggagggttcacctccagtttatggaatgagtgcttcaaacaaaatcccaaaataaaagaaatacatattgcttcctaattctacagagttatatctttacctagaagcctctctaaatgagtctttagcttaaggaaataatcacttttaagaattagcctatcattgcctagggttgagagaaatcttagaaaattaagagatacttacaagacataattctacaaacaaagactgaaaaatttcttctaaccaaacaactgtaattaagataattttcctcttcaaacccttaacctaattgaactgttaattttactatatttaaataacgttttaaggaatgaaatgttttctattttcttaaatatttcaatataaaatgttcagccactgacagttatcctttatgtatacactaatagtttttcaataatgtaatctatgaaatttacatatagatacgcctcattttctaaagaaaaacctatgttgaaatacaaatcagtaataattcatagttcaaaatcattttttgtttataaaaaagaaaagccttataattaaagccaaaaagtcacaaataatgaatatgtaattcaatacagaaaggcaatttacgttcacttcctaagtagagtacctaacacataaacctgcaaacactcacattttaagaaaactggacatgaaattatatagtttcaccattacatttaagcccttggtctaaatctagtttgtgttcacaacaaacattacaaaatgcttaacttttaatatactcttcccaaagttcaaaaaaatcataagacttgtatatatataaaaatgtttcaaaatatagtgcctctactaactcttaattagtgagtatagggcacaagtaacagctgtatagtaaaccacaatgtatgacgaaaaacaggctgtaaaatgcatatattaccaccacaaatgttaacttaatgagctaccagaacaaatttctagtctcagttcaattccccttgaccagataacttcctccaaaacacacaggcataaacacacacacacacacacacacacacacacacacatacccacacacaagcaacactacttattcccctttttcatatgttggtcttccaatttaagactacaggcaaataaagacaagtcaaactattctctttcactgtggaaataattctgaatttaaaagggatgactttgctgaactaccacatacaacatatgtattctgaagactttatttttcacttcaactagaggcttctcccatttaaaacaaagttttaaagtggaagtattttaactacagcaaaattttcggagtttggtccaggtattcttacctgtggtctgtccaagtatctgcaaaggtcaaaaatattttaataataatttaatactaacacattatttgccttttccactctcattctcttagtaacagtggaatttttcagagactacatgacctgtgataacatcatcattctgatgactaatagaatgtatgcttgtatattcaaactttctcattttgaatttcaagtgaaaaaaaattcaatagatataacaacgtaacaaaatctctctggcatctcaaataacttttaagagtataatgggtccacagaccagagcttgagaatcagtgaactagtggaaatcaaatacagctttttactgggagtggggttatcttataccatgttccttcctactaatttacctttcacagcccaaagacatgtgtctccacccattttaattttattacacttttaaattcaaaacaaataatctatgatgggcattaaacactttgatagttgttttaaataaattcgcagcagccaaaatttctatgaaaatttttatctactaccgtataattctttaaatctgcttttcttcaagtaacagcattctagaaaaagtattttaatcttaatttgaatcactggtatgcttcagaaatcatatgccaatattacttcattttaatattcagtaattcaacccagaaggtttattcaacatttatgaattaaccaaataacataattatcatttataattatcatgaaaagtttcctgaattccaaaattcctgaataaacttgaatgatataatcactttcagtgaagatttcccctacttaaatgaaactaagattagtaaaaaaacaaatagatacacctatctgctttaattttgtatttaaaaataaatacacctatttgctttaattttgtatttaaaaataaatacacctatctgcaagccctttgggttgccaaaaacaaaaataaactgaaatgaaattcagaaaaagagaatctcttacaattatcaatacaagaaagaaaatgcctaggcaccaagaaacctctttctctctctccctcatttggtatttctaccctcataatcaatattccttttctgttacctcatatttcagccttgtacatacttgattaaaaactaaaaactatttccctacctacggaaaggaagacctcttccttgtccttctctataataaaataagcataaaacttttccataagggaccaatactctactgtatgtctacaataaaacttttgtattagaaactgactccatttctcaatttctaattcttaaaagaagaatctagggaaaggtaaactttttgagcttctatttctccatatgaaaaatgaggatataagacctacctcataaagctgtcataaatcaacaagtctgaccctaatagaaaagagaggaaagagaacttatgtgcaggaaaaagtaagtgtatatggcgtgttcagaaaaccacatatggatttggttaacatagagttggttagtaaggacatagtagaagtcaggtttgctaccacatgttctcacatatagctgaatgatgagaacacacagacacatggttctcacagacacattggggggatcaacacacactggggcccactggaggtgggtggtagggaaagcatcagggaagaatagctaatggatgctggacttaataactaggtgatgagattatctgtgcagcacaccaccatgacataggtttacctaagtaacaaacctgcacatcctgcacatgtactctggaactgaaaagttgaagggggaaaaaaaaagaagtgaggattgctaagcagaagtgaggccaagagagacactgtcaactatactaaagagtgtggcatctccaacctgtatgagaggaaaactcactgaagggctttaaccaagaatgggaacacagaagaagaatatagtgacagaggaggatagctaagactacaagttcagtccaattgagttttgggcatgctcagtttgaactgaaaataaagagaagactaagaaaactaactgctcaacaatctcagcaaaaaggcagtaaagtcagaacactgttaggtagtcctttgaaactgttttgaacaatctgaacagaaagaaacatccatccgttttatcactccacccctgaaaataacagtttcataaaacaatgtttacccttattgtatgatacatcctgatagcttcttttcctttttaaaaaaatgccagtttggatctcataaatttatatcaaaacccattagtagagtcagattaatactgatctaggatactgttgtagtaatctgagtagatccccaatatccaagggctgttacatttggatttttaatcttatccacacctgtttacataaatggaagaatacatgaattgcatatttttaggagatcttttttactttggcagtaaattttatacattttcttgaaaaaacatatgtgtacttactgatattataattctactttttagatatatgggggaaaatacacttccaactgcctcaagtaggcctaaagacttaatcaatgatgctgtgaatgagaaacgctggtgattatgcatttaatacaaattactaaaggatataggtctccaagagcaactttttagcacactgtagtctaaaacaacattatattcaataatttgctacacagatagtagtagttaagaatatgaattttgatgccatactacccggtttctaaccttgtacctgaaatatactagctgtcatctccctgagcttcaagcttcttcatctggaaaatggagtaactaccttacagagatagtgtgagaattaaactagacaaaatatttaaagtgtttttaaaaggatcaggttcaaatgttaactattattataatttatctttgataaattgttttctagcttctttgaagtaaaggtgtatttcttcactctgtggtttgtcaagtattctatcatcttcagtataaaagacaggggatagcatttttccatcattgtgtccacagaacacagagtcatattttaacttgggtacaatttgcaggtcttatataaaaagaaactgaaccttcatattctctctcttcactaattaattatcacttgtgagcacattaaaaaaagtccagggttatctctaaatattgattgacactagcaattactccatactattaaatgtactaatttactttattgattatgcctctcttaatccctcccatttattggttcttacacttcctctcttttttatgatatacattatctttaggtatccatcatgaaacccaaaaagtaatagtctgaaatcatcaggtcaagtacccctatacctctcacttctccctcagtgtatcaatgtgtgtaacgcaggacctgttactggtatttatggtgatgaatgtgagtcaccaagaaaaggttgtattatattgatatatattctccttaagaagacatttttgaaaaactgttttaaaaaagagaaaaagctttaaatttaagttagtgacctttagttatccagtctaggatgttaactcttttgagtatatgtaaaatcttgttttatttatttattttttgagacagggtctcactccgtcacccaggctggagtgcagtggttgcaatcatagcttcctgcagcttcaaactcttaagactcaaggaattctcctgcctcagcttcccgagtagttgggactactggcatgtgtcgccatagccacctaattttttaatttttttgtagacacagggtctcactatattgccctgggtagtcttgaactcctggcctcaagcaatcctcccaccttggcctctcaaagtgctgggattataggtgtgagacactgcacccagccatatttttttttgttgtataccatatcaatctctgattttgtttaacatatatattgctattactgatagttgatctttgcacaaaggtactttgctgctatgaatgacaggatgttcttttgtatgagagagcctgtacaacaaattacccttcatcttgacccattaacatagctttaaaataagacagctaaagaaaaaattgctttttttgagatacattgttataaaacatcaaagaataaggaaaaggcaaatcatcagaaactttataagcaattccagtttgctttagcttttatctatgtgtatatgtaatacacaatttaacaacttcatttaagtagtgtgtaacggaaaacataataaaatatgatacatgaacattttcttacatattggatgaccaatgaatactgcctcacagattcaggttcttggttctgtttgttcctataaatagaaacacgaccttgtccccatttttaccctagctatccaaagaaatgcctactactgctgtttttcactatcatgactttttaaaaaattttgtatcaactaaaattaaggaatgagaaagaatattattgtattaatagtaaaaataacaatggtagtagtaaaaataatagtagtagaaataacaataacaagtaatggtggttttcattttttgagtgtctagaatgtataggcattataaaaagcatatttatatgttatctcattataataatcctataaggaaaatattcccattttatagattagtaaaactgaggttcatagatattaaataacttgcccacaatcacaaggctagtaagggtggaatggaaattcaaaccagtactatcgtcttaccactagtaagaactctgactcctacaagtatattctgcggtcaaaacaggttttgcttaatggaaaatgtgatagaaatattaattctaatttgggaagaaaacctccgtcatagattttgaattagcgattattccacaaaatagcttaattactaagagaatctgaatgagcactgtgacacatcaggttgctgctcagaacagaattaactttggccttcacttcctccatcctttacctgtagttgataagacaactattttcacttgaaataaattaggtagcattaatttttttaaagcataattgtaaatttactgattttaaataatttttaaatggctaacatatggtttagaatagacacaaggaaaagggcactcataaacactgtacgtaagaatataaattgacacaactattcttcctgaaaggtaatctgccaataggtagcaaattttaaaagcaaataccctccagatcccaaaatttcactttcagaatatgttctcaggaaataattccaagagtaaaagaaaaaacaaatacctggcaaggcaatagagaattattacagggatacttataatactgaaacatcagaaacaacctaaatatgaaacataattaattggtcatatagactatgatacatcaatacaatggaagaccaaagtcgttttttaaaatgatggtataatctgtattccttcacacagaataatgagtaagagatagtgtaaataagcataagccaaaataacagagcatagccatttttaatattaaaatacatacatttatatctgtacatacatgtattaacaagtctgaaatgaaattgaccaaattattaacagattatgtgtttgaaagaactctgtaaaagtacacttttaaaaacacattactgtactgtttaaattccaatcaacaagcattacctttattttaaaaaaaaggctattttcatctttttaaaaacaaaggaaacaatcaagatgcctaccaagatgtaactacaatactcattacagcataatatagaaagcaagagaaaattttaaatatcaaataaattaatatatacattatttcccagccataaataactaatgttctatttgattatttatcttagaataaagttcaaagtgtactaataagtgaagccacatataaagaataactttttttaataaaatacaacttacatttacacagaaaaaaactgaaaatattcactcaggtacaaacagtgactgatttttgtatttgggtggtggagtatgggtaatctgtgatttctgccatttgtactttactgtgttttccaaggtttctttagtgagaaggtactgattttgtaattcgaaaaagtaaaacaaagaaataaaaggattctctacccctcatctacttacatttgcaacaagaaatattctatattcaatagttcaaataaaaacaattctgtttaaattatgttagatggctaaaaatcacaaaagttcctctgaaattgaatatttatcaaaatgcaaaatattattctataagttaaatatttaaggttttttaaaggcaggtgaatgtctgtacattaagagctttctttaaataattctatttgagggtaattcaggtcttcctaagcatcaccaggattttctggcataatatttcctatacaagatcacagttctacaatttggagctctcacaaaacatgtaagacctccaagtggacttccgtcttcaatatatgcaaaaggactgcaatgctaagagaaaagcactatcatactatccacatatcctgacctttaaaatattacataatcaatggacagttccttttctacccaaatatcttgacctcaattactacatgtttttactctaagagctgctttactcgaaaaaaatgtttttaatcttctgtcccaaatttggccacactatttctacttaatgatcccgtcaagttatctgtatctcaaaaagtttgattatatcagaaactgctcatttaaactgtgtagctaaataaataacccagctgtggatacaacatatataatttgaaatattctagtagattacttatataacaattattttcaatcagaactttgagatattttttaaactgtttcaagaaataacttagagctagctactcaaaattaagattatgtatgttaggaaatctgtttaaaaactgcagggcccttctcttattgccatattagacaatcattacaccactacttaagcatcgtaatatggaatgtaagtttcttttattttaaatcaaaggcaatatgtgacttgtcagggttccttctttacacatgtcctacatatgaattgcctccagcccaacaccgaaagtccacagacaattttacttcactacctgctgttgccagttgagatttaatctcctctcagcattccctctgccaaaatgccagcaaacttcttcagaaaactacagccactgccattcttgcttctaatagacaacaattcatgaccaattcaacacaaataaaatttggggctgaaggagaaaagggaatgagggaaaagtaagtgtcactgaaatcactgcattctaccttcagttccccactgcagaaaagtcaacctacctagccttctctcacctacctttttttatttttatttttattttttttctgagatggagtctcgccgttgttaccccggctagactgcaatggcgcgatctcagctcactgcaacctctgcctcctgggtcccagcaattctcctgcctcagcctcccaagtagctgagattacaggcgcctgccaccatgcccagctaatttttgtatttttagtagagacagggttccaccatgttggccaggctggttttgaactcctgacctcaggtgatccacccacctcggcctcccaaagtgctgggattacagatgtgagctgccacacccggccttcttacatactttttatcactaattctcttcatgttctttactcttaatatgctccaaggaagtctgagtattcttccaaatgtacaatacattattttgggtctctgaaatcccaaagatccaccactggtatctctccttggactgagtcttccctaagagtctttttatttcatctccacatccccatttgccattctgcataagctcatggagaatctaaaaaaaagatagatttgctctgatgacaggaaaagagaaaaaaacattaacattgttttgtgtcttgttagttgaagaagaaagagctcttagtcagaaagagaatgcataataacaaacggcttataatgaaccaatgaaagagaagaagagagataatggcccagtgccaggaaatgctgcaagcgttctaggtacttatgtaagaagagttctagttagtccctttagctttcaaactattatagaaaacctattctccagaccctgaccccatctcctgtagcttcagctagcatacagcttgatactctgtccaggtcattgaagctaccgtcagaagacagaaatgtgtctttgagacacatttccaggactcaaaaagatatttttttctataaaaacattcttataaaaggtggctaggtctcataatacataccaccagcatcacagcttatgtaaaaggctattgcagaacagattaggagcccattacataaaacattcctagaaagaataagcatccctagtctctctcaactcccataaaaaacacaatttttaaaaaattaactcgtagaatgttgctcatttgtatttcatgaactaccctatacttctaatttccatgtagaaagcaatttcctttctctgttaaaaaaaaatgaatctcttttttctaaacttacatatcctgagtagcagattgcttgactgtagcagtccaagccattgctggaaggcagccccaatagtagggagagtaatttcacacatatcttctatttaagcagccacacatgttatgacactgcccagatgccaaagtatgagtaaaaaaacttttataaacctaagttacacttgaaaagcaccttaaaaccaaaggaaaaaaaaaaccctgctattctaattttaaatgttacttccaagacaaggtaatactatagtaaaaataaaatttccacccttaaaaacacaactatgtaaatttttcattactttaaggacatacaaagaaatgagtctcactctattattgtccatagggccaatttagttattctatgtaacatattcacaaatgtatatatttcttccaggccctctaattaaattactccaataccgataatttctaagttatcagcataatcatttcagcagttaaaatatgataagctaataacagagactctgacttcctatttttaggttagactgaagttattcatatgaaataaaatgaatttaatcaattacaaattccaactgataattaccatcatgtttttaaataaagggaaataatttcacaaataatcaaatgttagttactaaaaatctgactgtccaatgttcaagcagcttttatttctccttctaacttctgctcttgggtcatctttactgcttagccatcgaagaaataacatacttataagaagagatgataaagtagagattcatctaatacaggtttctacctgatgaatgacctttccaaccatattgaagtacagacaatccattctattcagagaagtaccagtgatcacaacttctctggaagaagcctatctaccacttatagttacatccaaccttggacacctggattggataaacatcctctaggagcagacttcaattttaaaacaacagcccaagctgtcttcaaaaagcagacacttaaggccatttaatttcatctctaccttctgccatgtaagaagtccaccactgtgttggtgagggaagaattaaaacagacagacctagttctgtcattcatttacagcaagccaacaactgtaaaatatgcccttagtagctatattaaactattctcattaacatttcagtaagagttggatagtggcaaaagaagaattatcacaggctggtaccaggtttaaagatttttctttcaattatttacatttatatattatgatattctattgtctattattcttcaacccattattaagatatggattactgtttcattcaacagcctgagtgacaaggagtaccacatatatgaaagaaggaaaatatctgtacgttgtagtcatttaatgcacatcagttctagtcccaaagcatatctaaaaaacatttttgaacaattaatacagtattctatttattttactatataaggtttacatggcaaaaagaaagaacctgataaaacaaatctaaaaataaaattcttactaatatgaatctttagttaccatacagaaaaatgtagactttcatgataaaaattgaagatgatgggagatattatatttggtggcaaaatgttaaacattattaaatctgggtaaaaggtaaataggagttctttgtgctatttttgcaacatttctattttctattacttcaaaattaaacaaaatttaaactcaaatctgcaagaaagatcatatttaaaacattttaatactaccaatatttaataagcaatcatggagccttaaatgctaacatattttcacattcttctgaatatattttctcttgaactgtgataaaagaaaaaaaggcatctagcaactgaaatacgctcttaaaaacaatcatggtcttcacattgttggccaatattgaaatggcataatcaaaaagtctttaaattatatttacaaagactagatatataagaaaaaagtaattctgtgaaaacataaaattcctaagactatcccataagtcagtttagaaaacaagtacaataagagaaataatttataacttaacatttcattcatatggttgccatatgctgtgttccaaatgcctttattcactttaactctaaattttgtatttagcctgaatatttcttcttccatgttataaatttaattcagattaatactgcgttcaaaagttagtctgtactacctagaaattaggccaaaaaaataagaacaaccagaaaaaaaaatcaaagtgtctgaaattactacttctaagagtgatgatgaatttatttcatttcattattttaaaatcaggcaagaaagttattaaagtcctaagatttatactactactatcctatgtttatataacattttataatttataaattacttcaaaatctatagtcttattttagtcctacaaaacactgcagactaggttaagacaggtatcataatactaatttagtaggtaagttttatgtctgttgtattattaaagatcatttattgtcttattttcaaatttaaaatttttttccatttttatttacaattttatgtaaattctaaacaacaaacaccattattttcactatgagaactgtcttctaaaaatcaatcaagaatgatagattaatcatttttagaataaattaccagagtttaaaaaagtacaacctcattagaaaataaagacaatcaaaactcaggaaaaaacatataaatttggtcactttattactgaagtaaaaaggtaatttaaaaaatcaaaaaaggaattctcatttatctttttaaaatctattagatctatgaaatccagagaagaagatggaaagaaaatcagctttagtaacatattctgttttactttttctgagttatttaacatacaaatagtaacatcatcaagattcttccatttataatttaatattttgtgcttttaagcgacaagatgaaaatgtgtaatttacggataaatttagtgaaagtgcaatcaatacattatttattaaagagtaaataattacattatatttcaaaatatttgtgtcaataaagtaacacattaaaaattaccccaagctttataattttaacccaatctgataatatatttctgtcactgttatttctaattataatacaaccaagagaatttattctcttccaaaaaaatgaaccttgttaaaaaaaaagagagaaaaaaaatcctttaagcaacaaagcatcaaccatatgcttatttaacttcagcaccatagtctctcataaaaacacaaagaattcccaaacaaaacaactgaaattaggcttgctaatcaaaatcatttaataattcaattaggatataaatctaattttttcaatcatttaaaatacataaaatatttaaagaccaattaacatgtcataagtctataaaatacttcagaactgataatgttaagaaaaatcatctttgatgcataaaataaaccctctatgtaaacagctatcatttttagacattccaaaatgggcacaaaacataattggagtctgactaaaatgctgccctgcaaatgcacataccttgatgatgaggctatctcctgacatctattaaacaaaggtcttcagtaataaaatctctttgaatgaggcccacacagaagtatcctgaacagtatgtattatgatacatgaaaaactgtatattatgaaatctaataaaactctacccttaagaaagattaagacttttagtagaatccatgcttgcttgcatgaccctctaaaacttcaaaggagaaaaaaaaacagtgacaaactgttattaaaatactttgctagacaaatatatctttaaaagatcaacaatggaagaattcaatgtgaactataaaccatttttatacggcaatatcaattttaaattctaagttcttatgaaattactcctacaactataaattacttctgttctagattaaatattaaacctaaaagacacttaatttatgattaataaaatcctcttttaaaacacaagtgctagccaacattgtacagaaccttaacacggcaggcactcaaaagtatatcatataaataatagctatcttcaaacatgaactctaaaatttttaacattaaaatatcaaaacactgaagagcatttttaaattcagaagacaaaacttatttcctttttttaacgatgtctattcattattatactaactagattcaatatagttttagccttatgaaatagtcatttttaaacagtataataatgttctaaaaacaataagcaagtcatgaaccagataacagcatactaaaataaaccttaaaataaataatatatatgggaaattatactgttgatttttttttagagatcagtaatcactaaatcacatcaaagtattaaacaactggaaactttgtaagttattatacatccagttaattacatgaaatataagttttaacatcgaaccaataaaatattatctactatacctttttatacaattaactgtgtatttatcaatctgtatatttatcacatttaaagttatttataataatttcaaagtctattcatgtaaaaactgtacataaaggtctcaatttctagttctgagttataccactatcaaatcccaacaggtactaattaaggagaagagatgcaaagctaaatcttagctttcttctgtattatgttttccactacaaggttttataaaacatgtaaagttaacaaatcggttcccccaaaatcaaacccatatatattcatttgttaatgtcatatacataaaatcttcctcataactttttaatttctaacataaagaacactttattaaaagttacaataaattactgagttttgttttttgttttttgtttttttttttaactagaaaagatctgtaatagtcccaacacaaagaaaagacaaaagtttgaggggatgcatatcccaactaccctgatttgatcattacacattgcatgcaggtatcaaaaaaaccacatgtacctgaaaaatatgtacaactactatacatcgactgaaaaatttttggagatttttaaaaatagtattattaattatcactatttttgtataaattaataatctgctaaaaatactctgttatggtataaaaattaggatataatacactaaaggttaactacgtaagtacaataaaaaaaaatttcaaacatcttaatatgccaaattcatgaaaaagttataccaataagcataacctaagtatagccatattacaaatattatcttaaaacaatatgattaaatatctatcccaagacctacatagaatttctgcagtcaaatggaacagtattctttagtgtaaaagtattaatgtaaatgcaaaaggatttaaaatcatacataatgaatcaatcattcactatgtatctgcaaataaataatcaaatgaagctactatttttattagaattcatatttgctaacataaaagctttacagataattaaataattacaaaattatatacagttctggcccaaaatgacttttatgaaacagatcacaaaaatattccaatgcctgtatttaatgtaaaataatacgctgatagctaaaaaaaactataaacatttttccttccaaagaaatcaacattatgtttcctaatataaaaggagaaaaaaacccatgtgcacaacaaagatgccttgtattcttaatcatcgacagccagtttatcaacaaattagtaatgagctatacccagcatactgtactcagtaacagaacaataatacacccagtaacttagtgccttatgcatttgttttttacctttgctatgtcttcagcaaaacaatcagtaagatacacagataagtatttactgacctcctattacatactttacactgtgctatatgttactatatttataattatttctattttgatttccaaataaatcccaaataatccaatactgttaaaaaacatgtatacaggaaaaaaaagttcctcaacaaccaatatacataaaatccttgaaattttgagagggaagtgaaaactagttttaaaggctaatagcatttaatatctttcactatttgtatataatttcaaatatgggatatattttgattctctctcatcaaaactgtatttcattaagcatttctggcactccgtgcaatcataaataggaaacagaaaactagcctaattttacaggattaagagccagaatttgagtacctagaattaacagcatgtaatgacacaatatgatgctctcagatagtgaaatgtttaatatttccatctatggtattaaaaattataagtcaaacaagtgatggttatgaaaacaactgcctagcctctattatatttataaagggataactgcaatcaatattttaaaagctctgttaactttacagttttaaaaatcatagtgaaaatgaaatattgatttaaaaaaataagtcataacacatcccaaatcaaggccaaacccaaccatgactgactatgactgagttcacacatggagcattctgctttgtctactcccctgaaagacacaaggtgaggacacacggcactgccttccaattgttttattctacccaaacaggcaatgacaacaaaattattttaaataagccattccacttaaacttatttatcttctgtgtaatagtgttaaaattatagaagaaatctagttcttgaaactgatcattccagtgcagaatgggaaaattaacatgagagaaaagcaaaataccaagtcattcccattaaaacagcattaattatgtaccatctgaaatttttctggatgtgaaaattatctgtgtggcattacaactacagcaaaagttaaatatcttatttcttgaattaaagcatttgtaatttggttgggacaagtaactatcattagggagaggttatacctaatgaattttaactatgcactgtaatgcaaatgcattaacaaaaaaacaatatttttcaacagaatttactttataaaacatttgaaataatatgaagattttaatattttcctatcagttaaaatactactttcaagataatttaaaaattttatttttgaataaacacaaactaattttgaaaataattatatgtaaccctaggaatcgtttattttaaatgaacaaaaatctaaaagttattattttaactggagaaaattatctctcagaaaaaaataaaatgacatttttgataactttcactttttcaatttaacaatttatttttaactatataacttctattaatattactataaaaactaggataattacctctataattcaggctagataccaccaaaaagtcagcagcaatcttttttctcaaatatgtgtatttgagaagtgtgcagtgaaaaataaacttatcaaaatatgaggtgaaactgtttactagggtcccgaaatgactacttgcctcgaatattacttacacatcatgaaaaattactcaattttgaaattttaaacaaatctattctcttacctcaaaaaacattttctaagatgatgaggtcctcctttagaacatttagcattacaaacttctctctccttgctagctagaaattatttcaccactctaaaattatcatgttttccttttcttttacctttagctttgttcctttccttaccttttcttttacgcccttctttgtttttgtcttttcatatttcattctttctttaagccagcagcatacagacccaaagtggcctatgtcactaggtctggtatagctataaaaaaataaattcttactatttttaagggaagaaaaacaagccagtaatcatctgggagagcatgaggggattttaacccaccagacaagcctgtccaataaaactcagacttgaatcaagtgattgtaacttctcaagcaaatacatacagctcttggaaagcatccaaaaaaaaatttttttttggtctcttctgtctagaaaagagaactaaaaaaattggactataataattcaatcccttttacaagtctatttaacatgaaaatgttttaaatgaaatttttacaagttaggactttaaatgttttgagaattttacattttatttaaacatttaaatctgagggaaggctcaactctgttttctacttcccacaatgtttgctccaattagatatcagttactaaatacgtaattgctagatttgttaagaacaaaaaccctcatttttacaattaagaaaataaccaaagtaattctgtaagcctctaaaaacttcattttcagcatattatcatatttaagtaggttatcttcgaacagggttttcttaaaacaaattcgctttgtaacaatttatagataatgctgattttaattggaaaaatcacgcaaatttgtttaaagaaaaagcacgtttaatgcctatctgcgaaccaaactttatgccaaatatccgaagttaaataaataattaccaactagtacacctaggagaggtgctctaagagtatgtattccacaatatatttagtaacagcaatcttcatgttgcctaaccatagatgcttataagaaattatttttttctgataattttcacatccaatataactgctgatgctcgtaagaaattattactactattacctattatatgtcacacatgcacttattgctgtagtatgttcaaatccaagcaaatgttcacatttaacatccttaattactgagtatataataatattacaatattgaattggaagaaactgagtatcaaagtgtctatgggtagaggtaaattcacaactctaaaatatttattctgctgcttctttgaggtcagaagagtagagaaaacgacttctttccaagtactgaccaaatcaagtacatgtcttttatttgtgcaggtatgaaaaaatggccagaagatctttccatactgtttcacatgaaaaaaaatggccactgatttatagaacagtagactggcatagaatgctattctcttaaagaatctgcacactattgtcctgaacatgctccaatgtccctggacacatgccatattgtgaaatttacattgctactgctctattacctgtggatattccattccattcaaaaagtgctgttttgactttctaactataactcaaaactcagaagccaaaaaacaaaaaagtggtaaatgtaaataaatttaaaaaaaaaaacaagaaaaaacttctgcatgtcaaaaatgctatgtaggcaaagcctaaaactaaatgacaaacaagaaaaaaaattataactccaatcacatatgaagaactaatatctttaatttataaaaagtgcctaggaaggtagaagaaaaagattagcaactcagtagaaaaatgagccaaggacacagttacagaaaaagaaacccaaacggtttttaaacataccattcccaaacagattcataataagagaaacgcaaattaaaaccaactcagataccacttcttgactgtcaaaatggcaaaaaattgaatagcttaacaacacaccactggcaagagtgtgggaaacaagcactctcaatccactgcatataggaatgcaaaatggcataatctctaaggaaggcaatctggcaatatctacgaaaatcacaggggcctgtacactctgactcagcaatcccatcctgagactgtctcctacaaatacacctaaatttgtacagtatatttataaatgacataatttatttaattgcaaaacagtggcatatcctaagtgtctagcaatcaactggctactgattgaaagaattaagctacctcccaattctagacaacactttcagaggagaaaaaaagggaacaatcttatgaaccaattatgaaagacctgttaagtgcgggggaaaaaagtgtgatgtacatactaatctaacttttatgtaaatatcatcctgttctttgtgtaaatactagctactctttgtataagaaaagaataatataagaatttttttcatattttcataaacactaattatacatagagagcagtggagaagatggtgattgatgggagcaagacttcctggtttgtatttttgaaaataattacatttttgaaccacaacgctttctacaaataataataaatattgactttgccagatattagaggtaaactattactctagatctctcaaatcatctattaaatttccatcaataatttaatagatgtttccaaacagggtgctgaggtaatatcaaggcctgtctatactgtacatcaaggtctgtacagtcactgaaaatgttatttgagaacttactgtatgcaagactcctggaaaaaaagatcgagctccaaaatcttattaaatgtcaatataacatgttcggtttatagctagaaaatgtataatgtgtacattggatgtgaccaacagtgctcaacaaaaactgacagaaaggtcccacagctaataacatattcaatggtgaaagactaaaagctttacctctaataacagaaacaagacatgatgcccatttatgccacttctacttaacatagtactgaaagttataaccagagaaattagaggggaaaaaaagaaaggaaagacatctaaattagaaaggaagagacaaaattatctctgttcacagatgacatgatattgtaaatagaagaccctaaaggttccacatacaaaagaactattataataaatgacttcagcaaagttgtagaataaaaaaaaaacataaaaaatcaggtgcatttctaaacacttataaggaacaatctgaaaaagaaattaagagaactattcaatttacagtagcatcaaaaggggtaaaattcttaggaataaacttaaaggaggcaaaagacttatacactgaaaattacaaaatatcactgaaagaaattaaagacacaaatagatggaaagaaatcccgttttaatgaattggaatacttaatattgttaaaatgtctatactactcattgcaatatacaggttcaatacaatccctatcaaaatctgaagggcattttttgcagaaaaagaaaaactcatcctaaaactcatatggaatctaaggaccacaaatagccaaaacaatcttgaaaaagaagaatccactgggagtcccacacttcctgattccaaaacttatcacaaagctacagtaatacaaaaagcgtagtgctggcaaaaagacagacatagaccaaatgaaacaatctagaaacaaattcttgcataaaaagtcaaattatttcctacaagggtgccggcactattcagtggggaaagggcagccttttcaacaaatggtgctgggaaactggatatctacatgcaaatgaatgaagttggacctttaccttgatccatatgttaaaaattacctaaaaatgaacggaagacctaaaacatatgaattaaaactataaaactcttagaaggaaaggtaggataaaagctttacaacgttgaatttggcaatatttctaagttttgacaccaaaagcacaggcaacaaaagtaaaaatgtatgttaaaatacataaaaattttaataatttctgtgcagtataggacacaacagaaagacaaggaaacctatggaatgggataaaatatttgcaaatcattatttgataaggagttaatatctgaaacatacacaaagaactcctacaactcaacaatgaaataacccaattttaaaatgagtaatgtattagaagagacatttatccaaagatacgtaaatggccaagaaaagcacatgaaaacatgcttagcgacatgaatcattagggagatgcaaatcaaaacaaagaaatataacctcacatccattaagatgtctactataaaaataaataaataaacaaacagaaaataacaagtgtcagcaaggatgtggagaaattagaatccttgggcactgttgggtgaaatgtaaaatggtgcgaccactatgtaaaacagtatggcagctcctaaaaatattaaaaatagaattatattaagatccagtaattttacttctggatatataccccaaagaactgaaagaagggtctcaaagacatttttgtatacctatgttcatagcgttacttataatagccaagaagtggaagcaacccaactgtctatcaatagatgaatggataaacaaaaggtggtgtgtatatgtatatatatgtgtgtgtgtgtgtgcatgcacatgtacacacatacacaatgtaatattactcagcctatagaaggaggaaaattctaacacatgctacaacatagatgaatcttgagggcattaagctaaatgaagtaagccagtcatgaaaaggcaatgctgtgtgattataatgaataatctgaaaaagaaattaaggtacctagaagaggtacctagaggaatcaaagtcagaaaggcagaaaataggtacctagaggagtcaaagtcacaaagacacaaagtagaatggtggttttcaggagctggaggaaaagcagtgtattgttgtttaatgggtataaagttcagttttgcaagataacgagagttttggagactggttacacaacactgtgaatgtactcaccgtcactaaactgaatacttaaaaatgggtaagatggtaaattttatgttatatatattttaccacaattatttttttatttaagagataaaaaaactgatagaaaggcacaaacttgccacgtaccgccatcaaattcagtcaaggaagaaaagagtgatcaaccaagaagtattatctttgtattcaaaactttaccaagtaagtagaatgcatgaattcttatctcaaggaggaaacaattctaagggcacaaaaatatagtatctgtgaaatattcagctaggtaagttgggcaaaaatttgatcttaagaataaatggaaaacttgaaaaataagtgggatttattttagcaagagaaaaagggatactttttcaggaaaaagtataaacaaaggtagaaactgtgaaaaataagaagaaagggaaaaagaaatattaacatagcaggtcccacctcaccatctataatagagcttaaatcagttcttaagcaggaaagcaatgttattgaaaaacagtaaataccctatttgtctggaattggatcataggtacacctagaagtcgtggcatctgacaagcctaaggagatgctattgcagttcagaaaaacataaaagcgttaggattagagtcagaagtagaaacagaaaagcaaggaatcaacctaaggaaacaagacagtaataatgacaggtgaaatacaggggatagaagtgaacaagacataagcaatagctaacattttctagcctacaaaaccaaaagactctactcattcaaaaattacttttgagcaactaccatgtgcccaacactcttctagacagaggacatagaaaggaacaaggaagataatctccccatttccactgagtttacactttaagggtggaacatgataaacaaacaataacagagaaaaacaactgatactatcagaagattttagacaagacccaaaagcccttaccattaataaattgagcttcatcaaagtaaaaaccttgctctcttcaaaagactctattaaaacgaaaagatacacacgtagaaaaagtaatcacaatgcatacatctgacacaagaacttatatcaaaaatatagaactcttataacatgtaagaagacaaccaattaaaaaaaaataggcagaagatttggctgggcgcagtggctcacatctgtaatcacagcactttgtgaggccaaggcaggcagataacctgaggcaagaagttcaagaccagcctggccaatatggtgaaaccctgtctctactaaaaataaaaattaaaaaaaaaatgagctgggcatggtggtgcacgcctgtaatcccagctactcaggaggctgaggcaggagaatcgcttaaactcgggaggtggaggttgtagtgagccaagaacctgacactgcactccagcctgggtgacagagcgacagagcaagactctgtctccaaaaaaaagcaaaagatttgaaaagacactttacaaaagaagagataggaaagcctaatacatatgttaaaaggtactcaatatcattagacacagggctaaccaaataaggtaccaccatacactcactgagagtcaaaaccacaataaggtaccactacacacccactcagaatggctaaaatttaaaaatctaaaaataacaccacctgttggtagcgacatagtagtccaaatggagttctcaaacattgctagcaggagtaaaaaatggcacaaccacctgcaaaactcataatttctcacaaagttcaagttaaacatacacttcccaaacaactcagccaactcattccttaaaatttattcaagagaaatgaaagcttttgtccattcaaagactggttcatgtatgttcacagcagctttatatgaaatacttaaaaactggaaacaactgaaatgtccattaacaggtaaatggatgagcacattgttttatgtccttacaatggaatgctattcagcaataaaaaagcaataaactatgatatacatacaatactcacctaggaattgttgtcaacaatctttgatccagaagtaaatccagacttagactaaggttgacataagagaaagctaagccaaaagtcaaaaagaactagctccctaaatgtactgtggagacaatgaattaactcaaccctaaagcctgaactacaccccagcacatttcagttataagccagtaaccttcttattgtttaagcaaactgacttgagttttctgcaataagaaaattacagattatatgatgtagttcatatttaatgatttcaatatttgccatttaatagtaagatgatttaactgcaaagaatgaagattcatggcaaagaaaatgatagacaccaaggcaaaaaaaatgaatggactggaacacccactgtggatatgttactaggagtaaaaaatataaaagatgtaacaagtgtaggcagagttttgaaaacaacaagcaaacactaagattaaatatgactcttccagaaattcccaagatgaaaggctaactgaacctcaaatacataaagcaaccattggttactttttccccttgctaagctctcagtaagaacagcattcactaccaacaaagctctggcaataattccaggtttcctttggtcatgaagaagagagaagaaaaacggcagttgggaagttaacaagagggaggctaacatttgtgaacaactatttcccaagatgctttgttggacagttcacatacacagagttcatttaatcttctcaacaaaatagattatatcgtctccaatctatacatttaaaaaatcaagatccaaggagcttaaatgcttaagaaggaacctgcaatttgtaaaatggttaatattggtgttggaatctatatctgtctgacacaaaaactatcttcccacaaaccacttgatgaggataaacaccaagaagtttgtcactgtgtgtccctttgtctggcctggccttaaggaaagcattagttacttcccaaaagaaaaatatgctcactaatgatatgaccaagtatatagtattgaacattatttaaagtatcttaagcctgtttattcttatctctgactccaggtattaaactatttggtggtctcagagaatgacagcaggagacatgggcattatttaaaaaaaataaacaaaaacactaggaatggagatgaagagaagtatgtagaaagacgtgcctcttggtttcatcaaaattatcaacaagataacataaaaagggcaggagaatatgaaaatatattcttctgatagaaaaccatcaaaatttatggctattgtttgtgatgggaaaaaatgaaaagagccatagtacccatcaataatgaagtcttgtagaagagaaaatgcaatataatttttgaaaatagggacagatacacgcatgttggtatgtgtattaaaagttttctgaaaataatcaccagaggaattagcaggaggctttcagtttttattttctacttttctatattattagaattttataatatgcacttttttttatgagaacaaggattatttgggcctctttcttatatatctcaatatattgtaaaatcaacccaagtatatacttttaaattatgaatagctttcaatatttatcaagagttttgacaggtaactgactgaagagatactctaactaatcatttaacatgtgactaacacttttacatatacctgacttaatcctaaagtaataatgttattcttatgccataaatgagaaaaccacctcagagtcacttgctaagggtcactcaactaagagacagaggtaattatctatcctttgatcttcccaattcaagctccaaggtgcttttcattataccacaattgcctatgcaaacaagaaggtattttaaagttaaaatatacttatgtaagaacttctgtttatatttaggtatatcttgtctctttccaaaaagaaattgaggcagctctttctggaaataaaccctacaggagaaacacaagtagaaataaaaattaaggaaaaaggaaaaagaagcattttccaaaaagttattctataataaagatggaagtcctgaatactttgccttagatggactaccatttgtttcttggtttcttagatgtcaaagcaaagaggaaaaggacaactatacttctttaataaaattcacagcattatcttaataaaagaaaacaactgcttaaagtctagctttccctagtattaagaccagggggaatacttaactgcaggttctcgtaagggaggactcataggatacagtggacaatgtccttaacaataaataaacatcaactcaatagaataatgccaaaactcaattcactttatttaattcttcaagtactggtacctatgcattacccaagtactaccatagctcaatgaaataagtctttaacagcaaaatacctttataaaaaattatcagaacaagtcattgtaatgagtacaccacattatatactataaaatagcttctttaactttaatcttcaaaatatttcacttgaagatgaaataacttagaagttatcattagtaaaataagtattacataagtgacatccctttcaaattcttactcttaaaacacagtatacaatatatgagaggttaacagtccaggctcgggaacagtggctttgataccaggtgttactgtcttccccagcaagcacttagataggtaaatacaacataataggaaattactcctattagttaaaagttactataaaatcagtagaccagcatggcctatggaaaagggtctggaatcatactgcttcatatgtggttagtattcaataaatacttaatgcatgagagaacaataggctatggggttacaaaaaaataactgaaccatatagctaataaccatgaagtagccaaagactactttatggatccagaatcatactacctgtaacaacagaatcatgtatgccctagctttcaatatagttttctagggtataaaataatgtcacaccactatcaaatctgtttcttctcccaaataccataaagaaatgactgctatgaaccacgtgataacttttttccattaaattattcaaatgactgatctacatcgagaaaagccaatcagctataccattttatctttaaaaaattatttgatattgttttaaaaagtatgcaagggattactgtttaggtccttcatatgtttaaaacaacactgaataaacttcaatgcaattaattatgtgaaacttctcaaactacaacccaaaaccttctaggccaactgttttattaataattcataagcaatctcaccaagatatattttaaagaacacacacaaatcaacaaatatagatttcctagaacacttcgtaaagcaaagaagtatagtcgcaatataaagtaccaagggaacaaaaaaaactccccttctaataaactcacactatcaccttatattgttttatacatacacacatacacatcatcatcacaggtacacacacatcatcacacgtgcacacacatcatcacacatgcacacacatcattgcacgtgcacacacatacatatgcccacatgagctttccacttagatgacaatctcctaaagattgagactggtacaaacatgtattctatatcctgatgaaacctcgtctctactaaaaatacaaaaaaaattagctgggcatggtggcgggcacctgtagtcccagctactcaggaggctgaggcaggactgtcgcttgaacccaggaggcggaggctgcaatgagccgagactgcgccactgcactacagcctgggcgacagagcaagactccatctcaaaaaaaaatgtattctatatcctacaaccttataaatacaattgatcataacttgttcaaaaggaaaaaatctattgttgtcaatgttaaaaagtgctaatttgatctccaacaaaattttatcaattagttcactcaatatcaagaaatcattaaccattctaagtaccgactattcttagttacaaccaaccacatttccaaaggactgcattagtatgaaggcagatatgagcacacattttttattttacacagacttcatgttaaaaatggaaactggagaaaactccatctgtagtgaaagcaaatattctgtttggtttgatttcaccaaaactgtgtacgagataaatactaagctattgaccaattaactaagctgttacagaaaaagaaagactaatgtttcttacaaattggtagttttgaaatccaagtcttaaaatcaacatgaatatttaatgtggtttttccatttttctcctttaaagctgttattaaatcaatagcacttctagcaatcaaagaaatttagtgcaatcattttatccttatgaaaaattacaatggctgaacttattaatgacactacacattgataagtaaaacataaaagtcatttggtaagcaaaaaattcacttatttccattccaaactgggaaatggctagacattcctgaccaactacacccgtcacctaacagagtaactcttctaacccgtatatcaagtcacaggaattgctaaaattgcaacaaatcaaaactgaaaaaaaagacctcgttatccatatttatgaatataacttataaatgaaaaatgcaaattcaagggaccaacatatagataccacatattcaatctaaagatctgaaataatttgatgtgaaaatatagtagagaatatcttaaaagttagaatcgaatagtatcaaccagttcatcaaaatgacctccttagaaacttatttgattaaaaactagtaaaaactaaataatgtactgatcagacatatatacaaatgtaacaaaatggaaagaatgataaacataaaattcaggatagcagttacctttgaaggggagtcaagatgagagaagggaggaatgcataggtagatgaaagttattgataatattctaattaatagtatggatggagcgttcctgagtaaatgttcaaaagctttttgataaattaacttttataatgaaataagattatgcctggaccaattaccacagtatatcatgaaccaacgattgtaactagtaaaattctatgttgccaaggtccgttttgaaaaaaataatttatatttacttacagaaattcactttttataaatgcttcctcctaacattaatattaaaacatcaacaactccaatctttttaaacaaatattcagattaaaagaaggattataggaattacctgagaaaaccaaaacaaaaatcattcttctccctaaatcagagtaatactatcatattggtttcaagttactgtccgtcagaggtagttcaggacaaactttttgttttttgttgttgttgggtttttctgagacagagtctcgctctgtcaaccaggctggagtgcagcggcttgatctcagctcactgcaacctccacttcctgggttcaagcaatcttcctgcctcagcctcccaagtagctgggattatggttgtgcaccatcatgtccagctaattcttgtatttttagtagagatggagtttcgccatgtttgaccaggctagtttcgaactcctgacctcaagtgatccaccgcctcggcctcccaaagtgctgggattacaggcgtgagccaagtggccagggcaaacatgttaacaatgaaaagcaaaagcaaaagcaaaaaaaaaaaaaaaaaaaaaagagtctatagttaaagattatgaaatgaatctgtattaagatcttgtaattttcaaaaagcttcaaaaatagatataaaatcttatataagaagttctaagtcaaactaccttaaaatgaaagccgaagcaaaacatacaataatttataagcaaattttgcttaagtcaaaccagaaataccagtatatatatatatatatatacatattcaacatattattctgaaatttcccaagcataaaatatatttatagctaacagtagtctataagacaaatattaatgtgaagacaatgcaacataatatatattgttttatatttacatttccaaatatataaaggaagaagatgtaaggttacctgagagtatcaaaaccaaacatgagacttcatgcaaagatggacagacaaattactacgttaaaaaatcacttttaaaatgctaaagtgctaagattctttattcctctgactacaaaacaagtaatttcaaaaaaactcttacatccagagttttgaggacaaaatgactgttaactatttatgaacctgaataaaatgtggcagtatttaaaatatcaaaggttgagacactgaaatctagtagtggtcaaatctttgctcttaatgtaaagaaaaacaatataactgaaatttttagaaactgtcaattctcaatttatcaacacaggaagctaacaaaagacaaaaatatcatccttctggacttcagtcacatactctaaagatgaaagggcagggaaaaagaaccatacatacaaaaaccccaatgagattgtctctttaaattttctttcaattgacttgattagaaagggttatcttaaaagaaaacatagtaataagtatttatgtgcaaagagttaattcaaatttattcaaaattacttagtgaggtaacttcccaaattttaccatgaggagacctgctacgtgccaagctcagtactatgcactttatatccaccattatattttacaaatgatctaattgaagttacaattagaagcttgagaaatgtagagtttgatgacttgtaaagcctgacctacagtgctattggaaattgcttattagtagcatttccaaatatatagtgataacaaagtcagaatgagtacattttaatattttattcaacagaatttctaggtaattaaggttaaaaaataaataaacacctaaattgcccaagaactaggaaatgaaaatctctgtgctccagttaagcttccactctgacttctaattcactgtacatcaaagaaaatcaacttgccctgacacataaggactattcccttcagtgatcaggcaggtgttgaggccagaaagagagcctattttccacagccctttaccttgtttgatcactggttacttttgatctgacactgccctctgtctagtaatgacttccccctcatagaccctacctcacatctgtcagaaagaataaagggcatcaaactgagacctgacaacgcctatgggccatgcgatgtgctgccaacagaatgttccccagctcccacaattttcaattcagtttcttttgttctggtaggtagagggttagggtaccaatgacagcagaaaggattatgaccaactgtgaaaccaagccttcttgaatgtgtatcttttattttcgcttcttcatcttcttaaatgctgcaaacttcatggtggttactataaaatacatattcaacaagtgcaatagaaagtttgtttaaaatccttttccaggagaaaacaaaggacacaatacattgtaattcaactataaagctttaaggaaaaaatttcaaacccatggtgtgagattagtaaaggcccgctgtcaaagagcacgttaatagtaaatgaaaccaccgaagtcttacgcggaccacgacttagtgggtactgccattcactgtctgaaaatggaaaagtcccctaaaacaacgtacatatttacaagaagtaatcatttcaattgttaaattacaaattctacactattggtgtgagaataaggtaaaatcaaaaataaattccactagtcttgtttaaataatgtggtgaatatatacaacctttttcttaaggcattgatagtactagtttttagatgttagaaattagaaaaatcagatcaaatattttggtatcattttactcataatttttcaactatcattaaaacattttgagttcttgaatataaatattttcactctcccactcccccacccccccccaacacacaacaatatatggctcattatcaggcatgcaataaggagatttgccaaaaagcaggcttagaggatagtatgacttttaaggttaagacagtatctttaaaaaaaaaaaatacgttttttttttaaattttgaaaagtaggaccagaagaggaaactgcatgattataagttacaagcaaatttaatgtaaatatagcattataatgcatacaaacaaataaccttagacatgtactaatatagaagctcagagatggagggtaagcactaaggtgattacaagttgactccaataactggaagttcatttctacaacagctgagaaaggtatgccttaacagaaagggggaaggtacccatgtctaaagaattaacctgtgacactaggcaaatgcacacactagactgaaaatgatttaccactattgaagatcagatgtgaaattcctcctattattatactgatcagcaattagcataattatattcttaaaaaaaccctgtttttgactgtaatctaaaaacatgataacataaagtatattagaaaaatgtgattgttttaaatatattttaatgtatgaaaaaagattattcttatatacttggactaactttatagcagaaagccatatgggtatactagaaaaagatattacttctagaggggaaaaaaaaacacaatttaatccaaggataaacaatagtttggcagaaccaacacttgtccaattttttcccctctcaaattgtccaaatgtcacttaatcctccaagaaaatgaaaaaacaaactgcattactgtaacaaaatatctatccttattcttggacattcttttcccatttttgattctacaaaattgttagaacatattaaagaaaaaaatatacgggaagaatttatgaaactagaaactaaaaactaaaaattttatatagagtattttttaaaaaacacttgccagtgtaacctctgcgtggtgtattactctcaaagcatgcaatgccggtgttctgaactaaatttaatgccagatctgcctgatgcattttattggtaccaagaagcaaatatttatcaaatattatatttaatatctacctctaattgcaacaataaagtcaagctcttctgaacaaactcaaccacagaagcaactagttaactttcatcttttcaagaatcaagtagttaaagtatgacaaaagaaaagagactacacttcttagcagtcctgagagattgcctgaaacagaaggatgaaatactgaaacaaaccaaatatcttcaatgagatgtacaaccatgtgaatgaaaatatataacaggtaatctgtaataaaatatataagtaatttgtaataaaataataaaaataactcagtaaataaaaatgtttaaagacattaagtttcaaaatccacttttaagaaatcattttctaaaatctacctaattcttaaaaagaacacacttatttgggactttacttcttcaaactatcattgccattcttcttgtatgaatgttaatgaaaaatcacttgatattgctatagaataaagtatatttcaccaattcagtaaataaaaattgaattttacgtcctaaaagctatacttttatgtacatattaaagtataaatggttatgtttaaagttactgacttgtctcatttaaaatgtgattttaaaagaaactctttcttccttatctcaaagagaatttttggccaggcaaggtggctcacgcctcccagaactctgggaggccgaggcaggtggatcacaaggtcaagagatcgagaccatcctggccaacatggtgaaaccctgtctctactaaaaatacaaaaattagctgggcgtggtggtgcacgcctgtagtcccagctacttgggaggctgaggcaggacaattgcttgaacctgggaggcaaaggttgccatgagccaagatcgtgccactgcactccagcctgggtgacagagtgagactccatctcaaaaaaaaaaaaaaaagaattttcccagaactaaagcaaaaggacttaagtatatcaatggttcatcttcactggcagttcctttcagaaaatttacaattcatacactgaaaaaaattttatttttaagaagttctaacaactatccatttaatcaaaacactgaagaatatacaggtttctttaacgtgtatgcaaacgatctcattcttattccaaggagttacactgggagacattaccgaactaaaactctcaaacctacaacaaattatcaatggattagtaagaactaactaaatacaggaagctgacagaatacaggaaagtaaaaaatgtgaggtaattctcaaagagtatttgcgaaaaataatattcagctgagcttgaaggtagtaatgaacacattctggaagaaagaagaagagtgataaaaggacaagtacaaaaagtaaaaaaaaaaaaaagtaataagacagagactagtaactgaagaaatctttgaaatgagccactacatatttcttaaatgataaaaatagtattttggaaagagcactcctggactgtagatatgaccaacaaaagtcaacctttagaaacatcttagtttatgagtgaattcagaggaatatatacaatgtatctttaacctttcacacttttttccattaaattcttcgcacaaaaaagcttaaaacaatgaaaaactatagaatgtatactagatctgatgaaactgcctacaattatatatgataaacagagatttatcagtatattaatagaatgagtatatgtgtatatattagtgtcctgcaacaatttaaaatgtatgaaatagcaagctacaaaattatcttcaaatacttagaataaatattaacctactaaaaagatatagaagttttatcatgttctcagaggagttacaatgaaaagctagaacatgatgcaaataattttataacctctcggcgttcacttggacatttaaacagtaatgaatataaatatatgccttcttctttatattctcaaagatatacagtaaaaatgaaaataaaagaaaatcacccaactatagttcagtaagaaggactcggatttacaaccacttttctttgtattacagagtctcaatatatttatttatatgttttattaaagtgaatgataaccatctagattttatgctccaatcaaaaatagccaataaagatctggtaacagacactacaaattttttatccccaaactctcctgaagtaacttgagtacttctaccatcatactttagaaaccaaaaataatgaaatatggcagccactaaagaaaaatactatactgatatagtctgcaacctagatgtggctacaactaagatgcaagagaagaagggttgggaaaaaaaagtatcgaaacagtatggacttatctggcttttaaatttcttggctattaaaatctggatgatatagtcaacaacaacaacaacaaaaagaatccaccccaaaactcacatgatgaatacatccttctactgcctgtcaggtaactttatgttcaaacctttgtaaataatttaaagaaagacagcaaaagaagacaacctacctaatatgagtaagcaaaatctgcagcactaataggaacagtactcagcacacaggtttagataggaacatcacctgtatatctttgcctgaagacagggttacctgacaaaggcccaagtgccataggacatttacaataatgtatctttgtgataatgactacaataaaatgatggaaaaagtgcatcctattacccagaagccagattcaactacagtttgtaaactatatttagaaaggcaaatctttatttaaaaaagaaagaaagaaaaaaagctaattctccaattctccttcctttaagtttagtcactgaaataactgggaataagtcttggatatcctaaaaccctagaacctcattactgtggataaaaacataagccaaaacttcttcctagatccaaataatacatttcacttgttgactggctagaaaggtagttcaggaaaatatcctcatagatgacaggcttaatgtactactagcatgccactgccatctaaccttataaaatttctatttgctaagcctaatgactcaagtctttatctcaacccactatctcccgttgccaacacttgagcacaaagcccaagactgcacttccacacttgtatcttagagataatttgttttgcttcaaatatctgattttaacaggtagtcaaaaaagaaagcaaataaaaattagatttttattaaaaaaaaaaaaggacttaaactacagactatgtatgtggggaaaaaagcactagccaaggaattacactaaaaataatctactaaccataaattttaaatccaaaagaagcattctaaaatttgatccagaaaaaaatatatttttaaagaatacttaaatactatttggaatttcctatttttaaccataacaaattctgcattatccacactgggatatccttatcggagtttttaatactaagctagcttcctcctgagatcccgtttgcatttggccatctcctatcatcagctgatgaatccccagagttagtgaactaattttaatattgctaaactaatataattaagcaggtaaatctgctgggtaaaaaataatgcattccaaagaaaaattgtctggatatcatccaagacactgcctgtcttccatacgacactggcacacagggaaagaaaaaatacacattcattctttattgctttcaatgccttcaaatgatagaatataatccacttatgttcctgccaagctatgtgattaaaaaaaaaaaaaaccttaagagaaagataccaatagactaaaaagagaataagaggatacgatctagcaaagaatttagaatgagtaaaaatgtatttattcttcagattgaaattatactgtcaaaaaaacgtgttttaggccaggcatggtggctgatgcctacaatcccagcaattcgggaggccaaggcaggagaatcgcttgagcccgggagttcgagaccagcctgggcaatatagtgagaccctgtctctactttaaaaaaaaaaaaaaaaaactcgttttaaattaaattggatctttcaaataccacttaaacaaaataaaaccgattttattaacagtaagaatgtacaagtcaacataattctgacaagaattacattctagttgatcagaactgcatgttgttaatgacaattatgccaaaaaataccccttgagtacattagtgactttggctggataaatttgatacataaagaatggcatcattaatgtgctaactaggtcaaaacaatttacttactttaaaagtgaaaaaacatttgactctttaagctattttaagcttttatttaataaaatatgtcaccaaaatatttgaagtgatacattttttaaagcatgcacaatgcagtagtaacccatctgtccctaacccaacatttattgaatgtctattatattccaacactaggagggatgaataaaaagatgagcacatattcctggccctcaaaagagttgacactccatcagcaagatacatctctaaaacatgatttcaattaccagtagagagtgatttgacatgatatagaaaaatttgaaaatgtacatatcttagtaccatattgtatatacttctcatatatgccgtagagaactcttgaagatgagcacaagagatttatacaataattttattgcaatactgcctctgatagtaaaacagtagaagcaatgtaagtgtccttcaataggaaatgaataacccagagatttatacatataatagaatactaacaatgaaaaagaatgaattatacccattatggctagatctcaaaaataaaagtaaacatgcaaattgtagactcatatatactttgtgagaccagatatttaaccatatgtcactagatataaattacatgtgaccacaaactaaataataccacatcatgggtatccacatacatattaaaatattttttaaagcattttagatcatcatagcagttgctctggaagggaacaatgggacaacagtacgaatgtaagacaacagagacttgaagtttatttgctttattaattcaagcagcagcagcaaatttaataaaatgttaacaactgtcaatttatgggtgacaggcatacagctgttattactcctttttgtattctatatttttcttaatttctcaaaatagataaataaaacaagaattaaaatctgatcacatttcacacttgctaaaatctcatgctatagttcttattacctagagactttcaaatttcacagcatgacactgaaaaaaatttaacaacctggtcctttctttcttttccagaccaaatatgaatacttccctactacctagcctatcaacctagtggcactgtaacactcaccacttattaagcattccccatatttttctgatgttttatctttgttaacgctcttttccattagtgcaattaccttaccctaaaatatgtctgcttgcatattcatcacatcactacatgtaattcaaaacttagttcaaatgtcacttactatttataggattttcagattcctttcttatccctcacataagaataactatttttgcaattggtgtttctatagcactatcatgagaccaggatcttctctctttggcagtataactcttgtttaattcttcgacacctctcacagtgcctggcacatagtaactgttcaaatgttaatggaactgaatgaacatctgaaacaagtgttaaggaacagagtacagagttatcagttcatgaattcattaaaattgccattaaatcttctggacaaaaatcaaatggtactagcttctgaatcaaaatatcacaaaaatgtaaaacactatgtctgtaatacagagaaattttgtataaaatactgcaattctattattaattatattcatattcaaataggattaagattaacactaaatactagctttcctctttgataatttcaggaattttcctagaaaaatttttaaatacacttctgctggtacttgcagcttctcctgaaatcaattatcatcctaaaaaatgattttctactcatgctaataattaacttcttcctttgatgtctcacagcactggtccataagtgttttcaagggagataatgtcttttggaagttgctacttggttcaaacgtgtgtggattagcattacaggtaatgtatccatgcaatccaaagggctagagaagagaagtttgggaatcttaacagatctgggttagaattttgactttgacacccacctgttgttaacttctttatgcctcaattacctcactggtaaaattggataaaaatagctacctcatgtggtagttatgaggattaattatataaaacagcatagtacctggtatattaaaaatactcaataaaagataacttgtatcaaacattttctattaccagcaaatgatagcaaaatcctgagatgtagttgctatggtctaaaggtttgtgtacccccaaaacccatatgttgaaatcctaacctccaagatgatagtattaggaagtgggatctttggggagtgattaaatcatgagggcagagccctaatatatgggattagtacctttataaaatagaacacagggagcttgtttgcctttctaccatgtgaggatacagggagaaggtgtctataaactagaaagcaagccctcaccaaacaccaaacctgccagtgccttaatcttggacttgtcagcctccagatctgtgacaaacacatgtctgttgtttgtaagttatccagtttatagtattttggtacagcaacccaagtggacaaagacaacaataagatgatgttcaatatctttagatcacctctttagaatgccacattcaaatattactgttcactggaaactaccattctgggtttaagtaaatgccccatccattaagaggggaaagaacactgaaggcgagtatatactctggatgatttgggaggctcaagtgagtacttaaccctttgtacaaaatccctcaaaaatgtaaattatttatgtctggtattacaattaaactcacttcacaaggagtatttgagaaataagacatcaagattataggaggggaactaagggtgcggacaaccaatctccttaatatattaactcatatataaacccattaatttattaactctatggtgaacagtaagagtcaggaaatggaagctttcacataatgctgaattaactactgctatttaaactgtgacacaaatgtttatcttatatactactctagttgattatcaacatggctaccaattttttcacctaactgctacaacagcctcaaatcacagcaaagagaaaaaaaaattaaactgtcagtggctaacaggtaaaaacagactaggtgatattagacattgatacagcccaattcaaattagtaaactgcagaaagcaaataataggcttcactatcctctcctgataggagaggaaaaaaacctttattgaagctttcttgtgttttgtggcaatgaaactcatttggcgctttacctcttaatctcatttagtctgatcctcaatagaacatgtatgaagtagtattgtatcctttctgcaaggaaggaaaacaaagtgcaaaaattaagataactaaagcaagtcacatgagtaagaaacagcaggatcaaggttttaactgagttcagtgcaactcaaaaatggcgtttgcctccatctccccttaaaatgctttcagcctagggggtcgggggggaaagcctggagaggtgaatttgatcctacatcattcatgtaagcctccaaaggatgaaatttaaaacaagattgttacagcagcagtcaaaggactctaagagaagtcacagaattataaaactagtaaaatatcaactaagagactgaaaagtaaacagtcacaattaactttcaggaaatcaactttccatttccctataatcatttccctataactttctgaaatctattcatagtattactattttcttgagaattgagtaatctataatagtttacagcctaattattcagagtagaaaatgtaaaaaataggccaaacacacacataacgcatacagatctacatcaaaaatactctgacatagggcatagcacagaagctatttttagaataactcataaaattccagtagtttaaaacactggcctatataacaaatggcaggtaatctatccgacctcatcgttttacaatggaataaaaagccacccaaagaggttctctgtccaaaaagtagagaagcagaatctggtacagggaaattaaagaagcacaggaaatatacttaactgaggtttctagataatgactatatgctcaaactaaatatgacttaaaaatagctttgtggcatgcactatacaaaagtgatataaaacctatcactagaagaaacagacacatacaatatgctagaccctcactacagctatactcctcaaatctatgtgtatagtcgacacaagagttttacagcaaatgcaaactatacctatgtaggtacatgacacctgtctcactcaaaaataactgaaacagaactcaaagaattctcttttgggaaaattctacatctaaggccgggcacggtggctcacacctgtaatcccagcactttgggaggccgaggtgggcggatcatgaggtcaggagttcgagaccagcctgaccaacatggtgaaacgccatctctactaaaaatacaaaaaaaaattagctgggcatggtggcttgcacctgtaatcctagctactcaggaggctgaggcaggagaattgcttgaacctgggaagaggaagttgcagtgagctgagattgtgccattgcactccagcctgggttacagagcaaaactccatctcaaaaagaaaaaaaaaagaaaaaaaaattgtacatctaagtcctcagttctctgcttcaccataactcatttatggcaaatcattgtcctcactttccacatgaataaaacttctccctcataaacacaggaatccttccccttttctaaagtttatcttacttaaactagtgccacaaataaaaatgttctactatcttactactttgtgtaaaatggtaagttcatcctgtggcattctagatacaattattttaaataacttaagaagaaattttcccattaaggtcacataaagaacaaaaatgtaaaataaaccacaacatcagcagaaaccatcagcagaaacttatagaggcattacatccttatagttacatcaaggacataaaagctatgtcacagaaatatacaaagacaatgctgccatctaaaggccaagatataatatgaaaagatgtatgtatactcaaatactaccaaaatagcttgatattttaagtcagcaaagtttatatgaaaactatgctatgattatttttagactctgcaattaagctataatactctttttgagaatattcagtttattaagagaattagcaaaataatttgactgattatcagtatttgtcaaagcatagttgaaattcttttggcattctttctgacagtgttctctgtacgtacctgtattagttgctaacttaaaatatttgttgttacattactaagaataggtgtcaaagtaaaaacatcctaattacttaaagctatggcttcgcaagtatttaaatatttctctttatttcataaattttaaaaatacaaacttcctataggaggttagttatcaatatctcaattatccaataaagagttcaaattattctaaatttccttttgtaataaacttaaatgggaagaactgtagtgaattagcctttaagacttagcaaaattacctcaaatttccaatgaaatgaaaatgttaaataaaaaaaaatacaaaactgatgcccttagcatttacgtatataacatatttttaatgtaccaaaatactagaaaaaaactaatgtgaacataacaaaaaccttaaaaacataaacagttgctttctttgggaaaccattggctaaaaattgtttgattgccaataaaactatttctttatgtttactcaacaagaaaaataaaagtcaacaaatatcctactgcttgagaaacagaaaacttctaaattgagatcaccatcctttaatttaccttggatgtaaagtgaaaaccaaaagttaggtaacaaatacagttgtgatgccataaaaactactatgttttacatatctcctgtaagtcagacttcgtactagacaacttaaagatacagtgtcatttaatcgtcaaaactataactagcaaatagacagatatcaataacttcatttacaaatgaggtgtaaagaactcaagtaactttcccagggtcactatgcaagtgagtggataccaatattcaaaaattcagtctaacacagacctaacttctctttacaaaatcctactgtctcaagaatgactattacataaaaattattaaatgttatgaactccaaggggcaataaaaagatctcttcatttttgaaatacaactaaaaaagcaagtcttctttgtagtatactacacattcaggactaccctgacaacattttcaaatacagacatgcattgcttaatgacaggaaaatgttatgagaaatgtgtcattaggtaattttgtcattgtgtgaacatcacagaatgtacttacacaaacctagagcatacagaaagccctgggccatatggtatagcttttattgcccctaagctgcaaagctgaacagcatgtcactgtaatgaatactgcaggcaactgtaatacaatggtatttctgtatctaaacatagaaaaggcaaaaatacagtataataatcttacaggaccactactgtatatgctatccactgttaacccaaacattgttatatggcccatgactgtatgtacgctatttttcaattttaagaactcctactggtgcatcctagtgacaactttttcttttaactgatatgatgtacctatcatataaaaacataaatgctttggaatattattcagccataaaacataataaagctctgatacatgataaacacgaatgagccttgaaaacatcatgctgagacaccagaaacaagaccacgtatcacgtgattccatttatacaaaatatctagactaggaaaacccatagagatagaaagtagattagcagttgccagggactagaagaagggtaaaatggggagggatagctaatgggcacaggatttttttaggggtaatgaaaatattcaaaaattagacattggtaatgactgcacaacatggtaaatatactaaaaaccgatgagttgtacactttaaaagggtgaaatgtattttatgtgaattatctctcaaaaaaaattgtaagatttttaagcacaatatattaaatgtgtctgcattacccatgtatgtgcttaaaatataaaatctatgtaattgccctattatatgctctaacttattgaatcccattttttatgatactaagtaaaagactctattttacaagagtacatttttctggacaataaaaaaaattctaactgtctagaattattataatccctagagatatcagaaagaactacacaaccacagacttatgtttggcaaacaaatttgatttttccaatttaccagtattagttcactgtccacatttagaaaagatgcattggcacatgctaatgagggatttttaacatgcaagtaccacacacaaacaccatctattcagttaaaagatcaatttataaaatcatcactttaaaaggatttttgcttttgattaagtagtatttgaaccatcacaagaaaataagcagaaaaaattataaataaacttgaaagaattcgaaggttaggaacaaaatgaacaatacaaggatgataacaagtacttactaatttgttttcctgcatgtatatcctttgtaatttcagacagcccttagctatgacgatcatgccttcatctgagatcttgtaacactggccgaaatgaatatctttgagttctctgcattttgagcccagctgtaaacaaacagatttagctgaatgctcaaaaaataacaaaggcaacatatttcaagtgagattttcatataattttttgaaaataaccacgtcagagttaaatatttatgttacttgtaaaataagatagaatgtaagcaatccataacttaaaacagtactgtataaacatttttaaccttctaatttacccccgtttcaaccaactcacattacaagccctccaaggtatgtatattccttaacagttcaaaattacatatctattactccagtatatatatttttaaagacagggtctcactgtgtcgcccaggctagagtgcagtggctcaatcatggctcactgcagcctcaacctcctgggctaaagagatcctcttacctcagcctcctgagtagctgggagtacaggtgtgtgccaccacacctggctactttttaaattttgttgtagagctagggtctcgctatgttacccagactagtctcaaactcctggcctcgagcaatcctcccacctcagcctcccaaagtcctgggattacaggtgtgagccactgcacccagcctctcttgagtcttaatagtgaggaaaaaaatataatgcttaaaggaataaattatggtgtattcataaaactgaatattatacaaccactacaattggaagaaacatttgacaaaaatgtatgtaagtttttatagtataatccaattttataaagaaattatgcatatttaaatacatacatgtgtatttgtgcacagaaaagggactgaaatacataccaaggtgttcacagtggttaattctgattagcgcatgagtgagtttttattcccttctgcctatgaatcttctctaatttttttaataaacattgcttttgtaagaaaaaaaaacttccaagttctgtctcaagtaatgacatcagaaatatatgtgagttcagttacttttccaggggtggtgatagatataaactatattattataatctaggctgcactacaaccaataacatattcctacagaaatgtaaactccatgaagacagcagtttgtctattttgttaaataaggtaactctggtgcccgatatcttacacttagttgatacttaataaatatttgttaaataaatgaaaaggctgatcaggattatgcactataaagcagctctcattttaaatgcgcaaatacaagaaaccatgattttggcctcatatactactaaattccagttaattcagtggttctaactggcccatggagagaattcaggggttccaggaaagcagattttttaaaagtgcatgttcattttttatgttatcctccaaatgaactttagcctttccttaccatatgaaaaacagcacagtagcttagcaatacctaagactttgtaagcaatagaaatcaaagattatttcatatatcactgttgcagataccttgaaatatttttcattagtagtcatcatgctcattagctatcagatttttattgaattcattaaaagaggcatatatatttctataacaaatgttgaggaaactaaatccaaagccaacagtgggaaaagcaaagaagtctattgaagaactctcaacaggctcacatatatgtctggcagtgaggctgaggttggggctaaaaatactagaattcttgaaagtctgtttaaaaattagttaaatcctcagatcacctccccattactgcacagcctgaccttgccctttttcctacaatggcaaaaaaatgtatttctctggggagagcaaaacgtagggtttttggactggggtataccacagatagctgagaaccaaagcacaatgctgaaaatatggggatttgtgaacgtttatacagtgaaaacggaggaattcaaagaaacatttctatcccattttccagaatgaaaggatatcaacttccagactgaaaaggcttatccacttgtccagcataaatgacaaaaatagacacatggcaatgcaaatcatcaaaaagtttcagaaacaggagtttaaagagattctacagacttagataaacttcatagaaaggattaggatgaaaatgcatcaaacttcttaacaaaactaaaagaaagcaacagtccaatgccatcaaattctgaagataaattatttctaacccagaattctgtactcgggattcagattatgaattaagtgtgaaagcagaattagagatgttttcagacatacaagttatcaaaagatttacctcccatatacactttatcaggaaggtactggaatctgtgctctataaaacacgagaatacaccaagggaaagaaaacatgacatctgggtaacagaagatctaacccaacagcaagagaaagaaaatcttaaggataacggtcgtaagatactaaggtgaccactaatgccatcacacttgtatatgagaagtccagactagactatcccaggcaaatctgctgtagggcagtaaatgtaattaagtattcacatatagacatactaatgcaactggaggaaagctttggtcttcattagtgttaagagtataaaaactaggtaaagaaataaaaagacatttattaattccaatgaaaacaaaatgctttagagaaaaaagataggtacataattatagaatgtaaatactgaatacttatttaacaaaaattataatagaattatgttggaaggatgagaggataagacacagggaaggaagtataagtgagctaaatccttatctttgatacaaggaatcagcaataaacagtcaaaagtgggtaagttttttaaaaaatacaaacaaacatgccaggggaaaatgttttctcattctgtaggaagcccaactagtctgattcccggtctctccactgattattctgtatttaataaactggatattttcagctcatatgtatacttcttccccttgtgaataaactgcatacagggagcaagcaatctttatttctctatttggggccactctgctggtcagcctagtcaatgactagtcagttagccaaactccagagtcaggttaacaatcccatttagcattgtttgtaagcaaccttctccaccttagattttctgagtgctaaagctgacatcttgctccttcatcactatttcttcgtcatacttatcaatttgataacatcctgagcagtgaataggaggccccatgagacctcaacagttagtacacaagctagaaaaacggagaaataaaagaagagaatctacatatcaacagaaggaataagtgtggtttttggtgaagtcttagacatcaatgtgcatggacaagttggtagaacctcaggttaagacacgtaaatcacagcgccgcaggctgggaaaataatttaaactgactacatggtgttttgacattgaaaagtagctttggtggctttatctataaagaaatgacttttcatacaggccacgtggataaccacacaaagatgagaaccatgtggatggcatatgcagaaattaccagcatgtgaggtaaagtcagatgtggggaacagtgcctcacaggagaagctattatgatttactactactgagtaaaaccatcatttaatctcactgcagaaactgatattctgttttagacatcactggatataaccggcaagaccagacccaaatcagtgcctatctgcactactcaccattacgccatccacaaatgtcctaagttccagactatccaagcactgtaaagtcaatcattataactgatatatttacaatttggctgacagtctttaaatttctcaatgttgtattcatctatgacccacagaaaaacattcagagggcatcaaccaaatcttacaaaatcatcaccattaggatgccttaaatctagcacaattagtactctatctaaaaaccatagaaatagaatacaattcttttttgttgttgttttgttttttgagacggagtttcgctctttcgcccaggctggagtgcagtggtgtgatctcggctcactgcaaactccaccttctggtttcaagcgattctcctgcctcagcctcccgagtagctgggactacaggcacccgccatgactcccagctaatttttgtatttttagtagacacggagtttcactatgttggccaggctggtctcgaactcctgacctcatgatccgcccgcctcagcctcccaaagtgctgggattacaggcgtgagccactgcgcctggacgaatataattcttctaaataaaaaattatctgtccaggaagacagtgctagagacactggagctctactctgtcaaaagggagaaatcctgtgaagtgccctggcatccagctgagacaccaaaaagatggtaccttgggagcaagaactatgccctagaataaggcctattctagatgatccaagttagagggatttgggaaacaccttgggctttccacataataaagcataaaactgaacacaaacaagacaaggatgatcattcagtaactgtaatgcttgctttaaaagaaaagatttctggttttcagtctggcatgtaaggagtttagaagttgccaatctgttctaaaaaataaaaagctgatcacactgaaaaattaacaattctttttagatccatcagagaaatgaagacacagaccaaaccactgccacaaaactgcagagacagacagatgcagagaagcacaactcaccagaagagaaactactaccagaaacctcagcgggaaccagggctagagtaggaaaacctgaactctgcatttgacaaaatactggaggcacagcgtggataagtctgataattaaaaattccagggggaccaggttataagacaacactcatgcttttgtgagttttatctacaggagctctaccaggtcttcacggagaatactggagagaaatcacctcatgcatacagcaatgagaggagaaaagtaaccattttgaaatatgccagagcattctattatttttaacaaggcctgtcctcaggaggaactgttttaccagagcctaacctgtgggagttttgtcagagcctaaccttcctaggggaagggaaatattgaactccagccagttctagccttccatgtaaggaaagggatataccaaactccagccctctctagccatcccagcccacctaagggtaaggggaaaaaaagaagcactggtaaaggtagcccagtggcacagacttgccaaaatattaaaacctaatcctaaaactatagatcattcctcctctccccacacctaaccactacattactaaaggcccatttatgaaagttgcatttcccagtataggttgcgtatcccttatccaaaatgtttgggaccagaagcgttttaattgttggatttttttcagatttttgaatatttgcattacatttatcagttgagcatgcttaatctgaaaatccaaaatccaaaatgttctaatgcataattcctttgagtatcctgtcagcactcaaaaagtttccaatcttggaacatactggattttggaactttgaattagggacattcaacctgtgcatcgtgtccacctttcaatgaaaaattaaaaggcataccaacaaggaaaagacaatttcaggagactgaaaaaagcatcagaaccacagtcagatacagcaggaatgttggaattaccaggccggaaattttttaaaactacaattaatatgttaagagctttaatgggaaaagtaggcaacacgcaagcaccaataggcactataaaaagatacattagtagatgggacatggttaaggaaaaagtctgagtttgagaatataatagaaagttccaaaactgaaaatcaggagaaaaaagactgaaaaaaaatgaacagaatatctaagaaccacagaacaactacaaaaggtataacataagtgaaaagtgaataccaagaaaagagagagagacaggaacagagaaacatttgaagcactcctgactaataatttacccaaattaagatcagataccaaactacagacccaagaagttcagagaataccatgaaggaaaactgcaaacaaacaaacaaagaaaaaactacacctaggcatatcattttcaaactgcaaaaaatcaaaggttaaaaaaaaaaagaaaaaaaaaagtaagaaatctagaaagaagccacaggataaaaacaccttacctacagaggggcaaaaataaaaattatatctaacttttccttagaaaccacgcaatcaagaagaaagtagagtgaaatatttaaagtttcgagtgaaaaaaaaccaacaacctagtattctatagcctgtgaaattatctttcaaaagtgaaggagaaataaagactttgtctaacaaaaaatgagggaatttgttgccactagacctgccttgcaagaaacgataaaagaagtttttcagaaacaaggaaaatgacacaggtcaaaaacttggatcaatacaaagaaagaatgcatcagagaaagaataatgaaggtaaaataaaaacatttattttccttattcttaattaagctagcagataacaatttcttcaaaataataatgatgtatttcatcatatacacacacatatatatgcttatatatgtgaagtaaatagtatcaataatataagggatgaaaaactttatttatttatttatttatttatttatttatttatttatttatttttgagacaatctcacactgcccctagtctggagcgcagtggcatgatcttggctcactgcaacctccgcctcccaggttcaagcaattcttgtgcctcctgaatagctggaattacagccgtgcgccaccacacctggctaatttttgtatttttagtagagacggggttttgccatgttggccaggctggtctcgaactcctgacctcaggtaagccacctgcctcagcctcccaaagtgctggaatttcagacataagccaccgcacccagccagaaaactttaaaatattttgttattataagatattttcactacctgtgatgcagtacaaagttatttgaaagtggagttggttataaatgtatattgtgaattccaggataaccactttaaaaagtaaaagaaaaaaaaccaactatgattgactgctaagaaagagagaaaactgaatcattaaaatgctcaattacaaccacaaaaggcagaaaaagtatggaagacaaaaatattagcaaagaactagggcagcaaatagtaaacattaacggatatggtagatattaatccaactacagaaataatctctttaaacatcagtggtctaaaaacaccaactaaaagacagattgtcaaaatggatcaaaaaacaagacccaactctatgttgtctacaagaaatctactttaaatagacagaaatatataaattaaaagtaaatggatgaagaaagatatgccatattaatactaatcaaaagaaagcagaagtagctacattaatttcagacagagcaggcttcaaagcaaagaatgttatcagtgataaagggggacatgacttaatgataaaggagtcaacactccaaaaaaacctagaaatctttaagacatatgtacctaacaagagagcatcagaatatgtgaagtaaaaaatgacagaactagaaggagaaatagatgaattcattattatagctgaagactcttagcacatgatccagcaatcatgtaccttggtttgtacccaaaaaagctgaaaaaattatgcccatgcaaaaacctacacacagaagtttatagtagttttatttataattaccagaacttggacatgcccaaaatgtccttcagtatttgaatggataaactgtggtacataacaggcaataggatattattcattgctaaaaataaatgagctatgaaaagacatggaagaaacttaactgcatactactaagtgaaggaatccaatctaaaggggttacatactatatgattccaactggaatcataaacattccagaagagtttacaaagacaataaaaacatcaggggttgccaggagttagaggggaggagcgaataaataggcagaatacagaggatttttagagcagtgaaaatactctatactgtatctataatggtagatacatgtcattatatatttgtctaaactcatagaatgtacaataccaagagtgaaccctaacataaattatgggctttggaaataaagatatatcaatgaagatttattgattataataaatgtgtcactctggtgagggatactgataatgggaggggctatgcatgtgaggaataggagtatgtaggaaatatgcaaaatttctcaattctgaaatgaacccaaaactcctcttttaaaggcttttaaaagtcaaaagagcattcacaaaaatcaggcagcaaacaaaatttcaaaatttcaatgaattcaaaagtgatctgaacagtgaataaaactgtaaattaagagagttgtaaattgagagaaaaagtacttaaaagcaatccttcagaaatgtttaagaagaattacaattattaactaaaaactgggaacagctataataacttcagacagagcagacttcagaagaagaaaagttatcagggataaagagggacatacataataacaaaaggggacaatactccaggaagacataataatccttaatatgtattcatctcacaaaagagtgtcagaatatgtgaagcaaaaactgttagaactacaaggaaaaatgaataacttcactattagagaccttaatatccttctatctgaaatggaaagatccagcaggcagaaaattagtaaaggcatagttcaactcaataaaaccattaattgactggatataatggacatctagagaccacttcatccagtagtagaatacacattcttctctaacgcacatggaatattcaccaaaacaaaccacattccaggccataaaacacacattcacaaatttaaaagaataaaaattatacaatgtctgctctcatactgcaatagaaataaaataaaaatcgattacaggaaaatgacgaaaatactcccaaaaaacttagagatttaaataacacgttttttttttaaattatactttaagttctagggtacacgtgtacaacgtgcaggtttgttacataggtatacatgaatgacacgtttcttaataacacatgggtaaaagaagaaacttcagaagaaatttgaacatattttgaactaaatgaaaataaaaataaaacatcaaaatttatgagatccagcaaaagcagtgtttaaaggcaaatttatacttttggatgctgttgtaaatgaaatcgtttggattctatttcttttggggtgtgtagaaatacaactgatttttctgtattttgattttgcatcctgccactctgctgaaatcacttattagttcaaatgggttttttgtggtttctctggggttttctattcataaaataatgtcatcttcgaatacaaatagttttacttcttcctttccaatttggaagcattttatttctttttcttgccaaattgctccttagaactttcagcacaatgtaaaacaggattgccaaaagcaggcattcttgtcttattcttgatcttaaggaaaaagttttccaccttttatcactgaatatgtcagctgtgggtttgtcacatatggtctttattatgatgaggaagcatcactctattcctagtttgataggtttttgttttgctttgctttttcaagaaaggctgcttatttcaccaaatgcttttgcacaccaattaagatgactggtttttttttcctttcattctcttaatgtggtatattacattgattgatatttgtatgttgagccacccttgtactccttggataaatcatagtaggttacggtgtagaatccttttaatctggtgctgaattcagtttgctagcattttgaagatttttacatactcgttaaagatacttgtctgtagctgttgtttgttttgtagtttcatttttgtagggtcttgggctggctaatgctagccccacagaataagttaagaagtgttgcctcctcttcaatttttttgaaagagtttgagaaggactggtgttaattcttctttaaatatttgaaaacattcaccatcaaagctatggtccttagtctttcttcattggaaatttttttaactgattcaatctccttatttattataaatatattccaattttctacctttttctttttttgttaagagatggggtcttgctatattgccctagctggagtgcagtgaatatagcttcagcctcctgggctcaagcaatcctcctgcctcaggctcatgagtagctggaactcagaatttctacttcttgggtcagtttttctggtttctgtatttctagaaatttttccatttcttctagcctatccaatttgttggtatgcagttattcatggttttctcatacaatcctttttaatttctataaagtcagtagtaatgtctactctttcatttatgatttaataatttgagtcttttttcttagtcaatctagttaaaggtttgtcagagttttttaaaatcttttcgaagaacctagtttggttttcaataatttttttccatagcttttctgtcctctatcatgtttatctctggtctggttattatttccttccctccacgaactttgggtttagcctgctcttctttctcaaggtgtacgctttgattactgctttcagatcttcttttttaatgtaagattgtacagctataaactgccctctgagcactgcttttgctacatcccttgagttttggaacgctgtgttttcattctcactcatctcaagatattttctaatttcccttgtaatttcttctataagccattggttgtacaagactctgttatttaatttctacatatctgtgtattttccaattttccttctattattgatttccagattcattccattatggttagggaagacacactgtatgatttcaatcttttttaaatgtataaaacttgttttgtgatcaaacatatggtctatctgtgagactgttccatgtgcacttgagaagaatgtgtattcttttgttgttgagtgtactgtacatatctgctaggtgcagtgggttcatggtactgttcatcctctgcttctttgttaatcttcttcctagttgtgctattcattattgaaagtgaattacttaagtctcaaatgattaatgtacaactgtctattcctctctccaagtctttcaatttttgctatatatattttaaggattctgttgttaggtacatatgtggttataattgctacatcttcctgaaagattaatattttatatttatcaatatataataattctgtctcttggatcccttttggacttaaaacctggtttttttggataataaaacagctattatagctctcttctggtgtggaatatctttttccatcctttcaacctctatgtagttactttcatcagttttctttattcttcatatggctttcaattaccatctagcatcttatttcagcctggaggactcccgttagcatttcttgtagggcagatctattagtaacaaactcctttagcttttgcttatctggaaatatcttaatgtccccttgagtgcccctattctttaacagttttgacaaatacagaattcttgcttgacttttttttctttcgacactttaaatattgttagcccacagctttctggcttccatagtttctgatgataaaacagttgtaaatcttattgaggagtgcttgtatgtgatgagtcacttatcttttgctgctttgaagattctgtctttgacttctgacaattatactataatgtgtctcagtgtatatctctttgacattatcctccctgaatttattgagtttcttggacgtatagatgcgtatcttccaccaaatttcggaagtttgggccattatttctgcaaatattcttcctgccccttttatttctcctttccttctggaattagcaaaatgtgaatgtttttctgcttgatggatgtcccacccatctcttaggctctacttacttttcttcactcttttttctttctctttcttagactcaataaattcaattgtcctatcttctttcttccacctgctcacttcggctcttgaatccctctggtaaatgttttatttcagttattgtacttcttagctccagaatttctatttggttctttccataatttctagctcttcattgacattctcaatttgttcatacattattttcctaatttccttcatttctttggccatggtttcctttatgtctttgagcatatttcagataatggatttaaaatctttagtaaaatctttagtaaatccaatgtccaggcttcctcaagaatgggttctatttattcttttttgttttaatgggtaatacttttttctttgcatgccttgtaatttattgttgaaaactaaatattaaaatattagattataatgtggtaacttgggaaattagattctccccacttccctacgcttcactatttttgattaatcaaggcttagcttgtgttcagccagtgttttgaaagagatttccttggatgccaaagcttaaaaacaaaactaaaacaaaaaacaaaagcacttattcaagtctttgcagactggctctgtgctgggatatttctttaagacttagccataccattcacaactctgccttggcctttacttcctgcttgtactggacctagcaagcacacagtgataaagtttacagtcttcttaggtcgttcctgaacaagtgtcctgccctgggcatgcatgcggctttcaaaattcccttctatacactgaggctgattgtcctaatttcaaaacaaaaacaaaaataaaaacaaactctctcccaggctctttctcctaggtcaattgtatgtctcaccataatctattgcccaaagaagcttgctcaaaagcaagtttctttcatttgccttatactgtgttcaatcaatgcccactaattttcctccctgactgggttctaaattaggtaaaacagatatataagcacctgcatcagcccttcaaatagctctcaggtaggttgatcagacaaatgaataatttgcaaataaggtctgctctgttccctctggaaccagggatctgggtcccacactgggaactcggactgctatcttcaagactgttgccaagctggggaatgggtgaggcacaggcaagtaaaaaacccacaaagcattctttccacctttcagttgcatttttcttgtctagcattcctttggttgctataaacctttgacgtttccagagttctgacaaagttggatctgatagtttaggcttgtttttcaatgtttttttggagaggcaggcttttggagctgcctgctccaacattttgctgatagtactctaagtagttatttttaaagacctaaaaattgatagcatagccagatcaaaatttactaatgtaacatttattatttttgtaccattttatctgaaaaaagcctacagtgacttatttacagaaatttctactgagctccatgagctggagtgttaaactgctaaaactgcatataattgagtcacataatatagtaacaatgcatacaatttcttagatatattttaatactttgactactattatcgtttgtttactggcaagtgctagatgataacaaaatattaggaaaattgaaacagccctttattcttaaatagatttttcctctagatacatgattgtagttttaaaagatatatacaataggaacacattccactggtaaaattattttgagtgactattatgaaaataaaaatataaatatttcagggtggtatttcacaaagaggatagtattcaaccaaaaccagcctgatttttttaggtgcttcaccatgcttaagaaatattgttaagcagaatccaatagttaaaacattagagtctacatctattagagctccaaattgaaatgctataagcaactgtttttgtaaacaaactgacagaattcaaaaggcacacatatttggtatccgctaaagtcaatcaaaattatagcagttataaagaaaatatattctaaagaaattatcaataaaatttacatatatcattctaaaacatttctcaatttttactgacagaagagggaaaaaacagaaccctgcaacaacttaatctgtagaatcaacaattcagtcaattgctaaattaatgagttcaagaaaaaataacagtcccaggcaaatcatcaattatggctagttccctcttaggctttcgtaactctattatacattttaacatagcactgtcagtttactaaaaccataatataaatccatattcggatttatgaaatatcactaggtcataaaattaatttagtgagtgggtcaaggccaacatttaacataatagtatagaacagaatagataatatccatgtgcattgcacataaggatgtgtattgtttcataaaacttaatttctattttatgtatatatgaaagccattctctttctactatacccataacactattccatcagaggaaagagtctattatgaaatcagacatacccagctatagcggtcttaagtacagaaaaatattctctacactgcaatgagatcctatgtaattacttaagaagaaaactacctaaggggaaaaaaatttgttttgctacttttatcagaatattacctcacgtgtaactaattcataattcagaaaccataaatatccgaaggaaacatctaagtaacaggctccaaaatacctcacattctagagaagatttacataattactctcaaagttgtaaatataagataaattcataatacttgattagcatattaaatgttgctccttctctacttcaaccatgactacgatcttattctttttcacaaaaattactaggtataccctaagaagtctgctaaactactacctatttgtgttatatcagaattaaatatgaaatagatttaatccagttcttaatacatacacctttttaaaatgtttcattgtgaaaaataaattgctgagaaatttccatcaaagtaaataaaatcatgctatatacacaaaatatatatttcttcataaaagattaatttaatatgtttaagaacttcatgaaatgctttgctagtaaataatcctgtacatagcagaaatgaatcaagaaaaatattaaaacaaataagactttttgcacaatatgcctttgcaaacaaaataggctcccttataagttggtaacattcttaatatataagttgtactgacacacccagtactcactatttaggatagagtcttcccaaatttcttttcataccaagctttcagttaattcatacataaggtttaaatttaaggatattcatctgttgaataaataatccactccgagccaagaaaccttaaatgccatttccaaaggaagtataataaacagaaggtatgcataatactatttttaacccagttattgtaccaaatagaggtaattaggcctttgttctaacttttataatcttcaatttggacgtccatttatcccttaaacattcagatatttaagcatgtatgtcatctagtataataaaaggggaattaaaatgttaatttttaaaacctcatgctgaccaaaactacgcagttgcccaaagcaaaatgtggtaaaaaatttaagtaacaaaagcataaatttataaaatggctggtcacagaagttcaggctctcactataaaacaaagcagttaatttactgattataaccatggcactctagttaactaatctaaacaaatattcattaataggtaaaaaagatgattcacttgagtctctgggaactatttttaacgtaaccatttaaaatgttgttgctagaaaacatttttaattaattcaagtaaaatcactttataaatgctaaaatttacctgcttgagtccttcatcagtgagtttgtcctggttgcctacatgcactttctgaagtaaaggacagtgagaggcaaccgcaataatagaggtgtcagaaagctgtttacacctgtaggctgtatacctaagaagtccaggacatttaaatgctaaaacacatacgccattatcagacatactgcgacaatcagaaatgttgatttcaattatattctgacttcttgatgcaattttttccaacaattcatcagtgacctgtaagagaaaaagcaataaatttaaacttttgctaaaaataaaaacgtattttccattttttaattaaatgttccacaataaacaatatactaattagattatagcatgaacgatataatcaaaagagaaaccgtcttaacattgaagcataacaagaatttggtataataataatattgtaattggtctttgtcctgaattcttgccacatatttcccaaaactcttggaatttcctaagcaatagaatttctttagttattcataacaagccctttagaccatatctgagttcatactaatgaagtgacttagagtggggcgcctagatggcttcagaatgggggctggttaccagaaaaactaaacccttgattagagggtgataactttcaacactacttacaggagaggaaggaagctggagattgggttataaaaactcaaatgacagagattcagatggtaaacaacatcaaagtgctgagaaggtggtatatcccataccttgccttctgcatctcttccagtgggctggccctgagctatatcttttataataaacccataaatatagtaagtattttccagagttcagtgaatagttgtggctaattatcaaaactgagaaagaaattaagggaactcacaagtttataattggtcagtgagaagttcaggtggcttctgggacttgcaactgatatctgaagtgtgggtagtcttgtgggactgagcccttaaactcagtgatacctctgggagttagttgaactgaattgttgtacatccagttagtgttagaaaattgttagtgtggaaaaactccacatatttgatgtcagaagtggtatcagaaaacaccaacaaaggatatgtgttcgtctcattaaaagcctaaaaatctatccttagtgggaaaattcaaattcagcaaaaactcaccacaaataaaactatactgagattttcaatgtttcactttccatttgtaacccatgaaatagtatacatcagtaataatgttatatgaaaattcacttttacacttgatatcagatgataccacagcgtgtaagtttttaatcttttactgtttctatgagaaacaatacctcgcatataattcataggttggaaaatacaccattttgcatatcagaacaccaaagactatataggaacgtccacatcaaaaagtttttctcagacgactcaattcatctggtgaaaaactcagatggccatctgaatttttgttttaaaaccagcctctacatattctgtgcccaatcaccacatttccaaaatacaaaacaaagttaatgttattcaagtcctttcagtaaaaataatggagacagaaaatgcaaatgaaatttagaatagaaggaaagaactacactgttaagcagcacttggagtaacagccaaagataaaactatcttcgtttatgcttgttggaaacagcataaacacagttctcggaaaagttataactctgacatacctctccttttattttttactttttcatctccacaccttactaccagtagcgggctgggtggggagggggtttgggtgggggaggaagctattattagcctgagttcataataaataactcaaacattcaagagtaatgatgtaacaagctgatagattgctttacacatatctgctctccattctactgcccacaactaactccctcaccattctccttggatataaaggtcatgaacccaagcaagtaaataacaaattatcttaatagttttaacctcttaccaatgaaggagaaaaacagaaagggaacaacttatacacaaatcctcgtgagcttgcttaacttggttaaagtgtgtgttatatacacacaaacacatacactaccagtgtgctggagttggcttgtagcacctcacaagagtttatagtgtgcccctcttttcaaatctgcattcaatggcataacgtgtagcttgacactggtcatggtgggagtatttatgtaatagaaattggcaaatattacaaatcagggcttttttttaaagacagttgctaaacatttatcagcacactagtagtaatacaccatggcagaatttagaacaggtttagtacttcgataaaatgctattcttattgacatttttacatatttctaatgccaaataccatcaagttttaaaaatggaatctaacaagtcaaaaaaactgtttgcaacaaacactacaaactcttttttcctaatttatgcccctatataaacacattaggcagctaagcaacaggaagagtagaaagtccaccaaaagaaaagttaaagaaaaaaaaaaggttatcttagcctattttacttccatttcttcatctgtaaaggagaaaaaataatagtatatactcacagagttgttgggtggatcaaatgaactagtatgcataaagcccttagaacagtacacaacaacagaggcattgctacagaaatgtttgccatcattttctactattaaactatttgtagtatgatcccccacagaaagaagtttaataactttttgaaaaggtaatgaaaaaagacaaaaagacctaaaaagcaaccctaaattaccaatctacatgaaaaactatcttgtttactatgagaatctagctttaccttgaaatcacatacacaaaaaactacagaagcacaaaattgtagattacagtgatttgaactatcttaaaaaacaagaagacagtaaagatttctgaagaggaataaagatattttttgagtaggtcatatgagtgttacttagaattggattccatacctgctgacgactactaagatccagctgcttccaaaactggaagtctaaacaaaggtcacgccagtacttgcaaaccaatgatgcggaaaggcaacgctcatccagtgacaaattggaaaatatctgtgaataaaaaacggtaccatataatatgtgctaaacattttcaaggcacaggaaaaggtttttattagttagaaaaagttaactttgtaaaaagaaaaccttcttgaataaaagaggccattattgtaagtcaccgtaagagatcaccttaaagagaaactatgatacaggagctaaaaacggactgatgttatattttctgtaagaagaggaggggaagagaacaggcatgtactgacacgtgttcatgcatatctttgtgtttgcttatatttaaaaaaaaaagaattgaaagcattaaccaaaaactaataaaaaaaaaactgtttacctttctgggaagggaaaaaagactagggaagaaagagtgataaacttgagattattctgaagttttacagtttgaccttggagccacgtgaacttttcatatgtgatttaagaaaaaaagaaaaacaaaagtaaatcataagaaaggtactttacctttatggtatcttttccaaaatattcataacaccaatctaataataaaatatatatactaaatgtgggacattctacaaaatactggatcaaaactcctcaaaaaattcaaggtcatgaaaaacaacaaaaaaagaaagcaattatcacaattcagaggagactaagaaagaatgacaactaatgttatccagttagatcctgggacagaaaaagacattaatggaaaaactggtgaaaccacataaagactggagtttaactaatagtaatgtacaatgctgatttcatagttttggcaaatgtaccacagtgtcagaagaaaataaaatcaggggaagtaaacaagtatgaaagaaaaataagtctcaggaccccaaaatcactaagccaaagacaaaagtcaaggcgggaactgtatcaggcaagcctgcctcccattttattcctaaataagatagctacaaggatttaaaaaaaaaaaaaaaagctacatacttccctcacaatttgaccaaaaggaaattctctgtggacctcaagatcttgaccctaaagcagttctgctgaatttcaccctgaccatgtaaattgatagcttctcttcacagatatgggacaaatgacagacagaactccatcatccctctgctcacctaagacaaatgcatatctgattgcttcctctgccatattgtttatgtaaaaatgcaggttcactgagtcagactaaggcagaagtgattattcctctacactccctcaggtgtaaattgagtattcagtgaaaggctgataaaagacccaaaagaatgcaaccttttatcttttacctagctataacccagtagccctgacttcgagtctgtccctcctttctggaccgaaccaatgtatatcttatgtctcatgtctccctaaaatgtacaaaactaggctgtgcccaaccaccttgggcacatgttctcaggatctcctgagggctgtgtcacaggccacttatcactcatatgtggctcagagtaaatctcttcaaatattttacagagtttgactgctttcgtcaacactggataacgaatataggggaaatctctgtactatcattgcaatttttctataaatctgaatgtattccatgtcaaaacaccatatattttaaatatataatataaaaataaaattattccaaaataaaatctattctaaaaaataatttttaaaagttacatcataaaaagatggttagggtcaggatgaaggccaatacaaatcttggaaaattaaaagctttatcaacaaataccatgtgtgggccacactgagatccagaattgaaccaattctaagaagatacttttcagacaatcaaataaaactgaatataaaagatattaatttaaaggaattattaaataagattaaacactgaaacaaatgtgacctatacatttaagaaagattaataaaaacaagtaagataattatttacccagttattccagttcagggttgcaggtgaccagaggtcagggcacaaggtaggaaccagcaatggacaggacaccaatgcaccacagggcacatgtacactcactcataccgggaccatctagacacatgcacaccttatacaaaacctaatgtacacagctttgggatgtgggaggaaaccagaatacccagagaaaatatgtgcaggcatggggagaacatgcaaactctacatagacagtgggcccagctacgaattgttttgttttgttttttttctcattaacattataacacaatgatgttgaactaaaggctattagtcaaggatttgttgtaatacatgatttcaattataattattacctaaaatgacttacctctatatggacaaaagttgtaaacatataagctagaatctctactatgtttaaatcttgggcctcgggaaaacaactgcctgttaccttcacaaccagtttttcctccaacaagtctagtgagaagtatagaatatcataaaagtggcagggcatggtggctcatgcctgtaatcccaacactttgggaggccgaggcaggtggatcatgaggtcacgagtacaagaccagcctggccaatatggtgaaatcccatctctactaaaaatacaaaaattagacagacatggtggcgcatgcctgtagtcccagttactcaggaggctgaggcaggagaatcatttgaacctggaaggcgaaggttgcagtaagccaagattgcaccactgcactccagcccgtgcaacagagcaagactccttctcggaaaaaaaaaaaaaaaatcatgaaagtcactagcgaatttgtctcccatgccagcaaacatgtattaagcccactacagccttttacttgcaggcattacaactaaaatatctggacaatatattaaaagcaattgcctcaaaactctaaaaagttagtaacaaatgaattgtggaagggtgccaaaatttgaagaatggccaataacaaagatgagtttcctgggtttttttttctttaatcccctagtatggaattcagggtggtccctgtacagaaatgcacaggaggtaaaaatcaacaaaaattcagagaaaaagctatctttctggacaaaggaccaggaaaatgggcctctgcaagacagagaatgtgagaagacttgatttttggttttcctttcttccccttttctcttttctccctactggctatgtcccaaatgctacgtcagtagcagagctgcaatatagaccccaaaagtaaacccaccattctggtcagaagaattggggaagagaactctgtggtccaacaagtaaacaaagaattcccactactgtttcttaattttatcataaaagcagccccagtcatgcaaaactacacagcagcacaggtggctgtatctctgagagaaactccatctttctagccagataaccaaataaagttttattggcacacaaaacataaatgaatgtatacaactatgtgccaataaaacacgatttacaaaaactggcagtggatttggcctgtgaagggctacagtttgctggcccattcacaagaaaaaaggaaatgaaaagaaactgcccatgagaaaacccagacattggacttactagacaaagacaataaatcaacaatttaagacatgctcacagagctaaagaaaaccgtggacaaagaactaaaggaaattatgagaaccaaatagaaatgtctcaccaaatagagaatattaataaaaagtagaaattatgaaaataaatcaaataagaattatagaactaaattatacagtaatgacattttaaaattcactacagagattaaacagattagagcaagtggaagtgttatataaataagccaaagatgacctctgtgtattggttcctaggttatttcttcactgcaggacgagactcattagctcaagagcccactagtaccaaactcaaatttttacacatcccatcatgctgctgagtgacatcacctagacaggtaagcctgctctccaattctcctgttccccaggggttgccttgccctcctccccttctgtatggcagtctacctcgctgtaagcctctgcacagcttcatgctgtaaaagaagtttcctctcatataatcctgtccaagtgccaccaaatgaagcttgttgtgtgttaccacttcttataatcatatctctttcttgagaaacatcaaaatcccttgaacctctacaagaagaaagaatcagcaaacctaaagataggtaaattaaaattactgagtctgtggactgaaggaaaatgaacatacatgtggaaccccaccaaacatactaatatacatataattggaggcacagaaggaaaagagagtgaaagaggcctaaatatttgaagaaataatggctaaaactttccaaatctgatgaaaggcatgaatctagctcataaactcaatgaattccaagcaggataaatgcaaaaggattcatatcaagatgcatcataatcaaattgttgaaagacaaaaaccgagagaaccctgaaagcagcaagaaaaatgcaactcgtgaaaaggacactcaatacaatcaacaactgatttttcactggaaaccatggagaccagaaggcagtgggataacatattcaaaatgctgaaaggaaactgtcaaccaagaatcctctatctggtaaaacaaccctttaaaaataaaggcaaaattaagatatttccagataaacaaaaactgaggaagtttgtcactggtaaacttcccctaaaagaaatactataaagagtccatcaggctgaaatgtaaggggatcagacagtggcttaaaatcacatatgaactaaaggataccagtaattgttggtatttacataggtaaatataaaagtgcatattactgtgtctttggtttgcaatgcctcctctttgctatatgatttaaaagactacataaaacagtaattatgaatctatattgattggcacaaaattcataaagctgtaacttgtgacaataacaacaaatacaggagcaaagtttttatataccactgaaactaaactggtattaattcaaactaaattgttataatatatagtgttaattataacccccagggtaaatactaagaaatacacacataattatttactatattttatttatatatataattctcatatatacatattctcacattacataaatataacatatctaaatatattatattaatataaatataatatatatctaaatatattaatataaatataatatatatctaaatatattaatataaatataatatatatctaaatatattaaatttttattaatatatatctaaatataatatatctaaatatatattaatataaatatatatctaaatatattaatatatttagatatgttatatttatttatataatgtgagaattatatgtatatatgagaaggggatcaaaatggtacactagaaaatatctgacacaaagaacagcatcagaggaattgacaaacaaaaaatatataagacatagagaaaacaaataataaaatagtaaatgtatttccttatcactaattacactaaatgtaaatgggctaaactttccagttaagacacataaggccagggccaggcacagtggttcacacctgcaatcccagcacttttgggaggctgtgttgagtggatcacttgagcccaggagttcaagaccagcctgggcaacatggcaagaccctgtctccacaaaaaaaatgacaaaattagccagccatagtggtatgcacctatggtctcagctacatgggaggctgaggttggagaatagcttgagcccaggaggtcgaggctgcagtgagttgtgatcgtgccactgcattccagcctggacaacagactgagaccctgtctcaaaaagaaagacacaatgaataacaggataaaatgtaaaaacacaatccaattatatactgtttacaagagactcaatttagatccaaaaatatacacagattgagagtaaaagcatggaacaatacatatagcaaaaactgacagaattgaaaggaaaaaaaccaaaaagagttccgcattaatgcttggagactacaacgtacaactttcaataatggatagaacaaccagacaagagatgaacaagtaaactgaacacttgaacaagacttaaacatggcctatcagatatctctagaacactacacaaaatagaatacacattcttctgaagtgcataaaaacattctcaaagaccaaagtctaaaatactacactacaagtcaagtctcaacaaatttgaaaatattaagctcatacaaagtatcttttccaatgacaatgaaaggaaattagacatcagtaacagaggccaggaacagcagctcaggcctataattccagcattttgggaggccgagggaggcagatcacttgagcccaggggtttaagaccagcctgggcaacatggcaaaactcccatctctaccaaaaaatacaaaaattagccgggcgtggtggcatgtgcacctttaatccaaggtactagagaggctgaggtgggaggattgcttgagcccagaaggcagaagttgcagtgagccatgatcacaccactgcactccagcctgggtgatacagtgagactctgtttcaaaaaatgaaagaaaagagaagaggagaagggaggtgaggaaagaggaggggaaatcactaacaggaggaaatctggaaatttcacaaatacatgaaaatttaacaatcaacaagtaagaagaactcataaagaaaactagaaaataatttgaaattaatgaaaacaaacacatatagcaaaatctatgggatacagaaacaagtaactacatttaaaaagaagaaagatcttgaattggcaacctaaacttctacctcaagaaactataaaaagaaaactcaatacaaactaagcagaaacaagggggaaaaaatacagctaatacaaatgaaatatagactagaaaaataatagatgatcaacaaaaccaaaagtttattctttaaaatgatgaggccgagcacaatggttgacacctataatcccagcactttgggaagccaaagtgggaggactgcttgaagccaggagtttgagaccagcctggaaaacatagcaagaccctgtctctacaaaaattatttaagaaattaaccaggcatgcgccagcatgcctgtgcacccagctactcaggaggctgacaagagggaaagtcacttgagcccaggagtttaaggctgcacttccatttacatagctataagctatgatcacaccactgcactcaagcctgggtgacagagaccctgcacacacacacacacacacacacacacaaaattggctagactaagaataaagagagaagactcaaattttaaaatcatgtataaaaatgggaacattaatatcaaccttacaaaaagtacacaattataagagaatactataattgtatgctaccaaattgatgaaatagatgacaaattcctagaatataaactataaaaactgactcaaaggaaatagaaaatctgagtagatgtacagcacgtaaaaagatggaatatgtaataaaaaacaaaaaacttacaacaaagaaaagacaaggaccagatggcctcaccagtaatatgcttcaataagaatgaacaccaatctatcttaaattcttccaaaaatgagaggatgggatactacttcccaactcatgctataaggccagcatatcctgataccaaagccaggcaaagaaatctcaaaaaactacagaccaatgtcccttatgaataccgatgtgaaaatcttcaataaaatataaggaaactaaatccacagtatagtagaagggttatacaccatgaccaagtaggatttatcccaggaatgcaaggatggttcaacatatgaaaaaaacccatgtaacacaccatattaatagaataaaggtaaaaagcaaaaacaaaacacatgatcatctcaactgattcaggaaaaagcactggacaaaatctaataccctttcttgattaaaacattcagaaatataggaataaaagaacacttcctcaacctgagaaagagcatctaccaataacccctagttatcattatacttaatggtaaaagtctaaaagtttttccccaaaatcagaaacaaaacaaggatttctgcatcatgacttctatgcaacattgtactggagattctggctagggcaattagacatggaatataaacaaaaggcatccagattggggagctggaattaaaacatcctctattcacagatgtcatggtcttatatagagaaaatcccagagaataaacacaaaaattaattttagagctaataagcaaatatttttatatactagcaatgaatcatctgaagatgaaattaagaaagcacttccatttataatagcatcaaaaagaataaaactttttttacagctctcatttctttattgagatttccaatttgttgggtcaatgtcatcatattctcctgtaattatttaaataatgtttcctttcttttaccatgtttataatagcagtttgaagtctttgctaagtctaatatctaggctcactcacagtcagtttctattaactgctttctttttccctcagcatgggtcacatttttctgtctctttacgtgtcttaaaatttgttgttaaaaactggacattttggataacatagccagtgtatattctttttttttttttttttttgagacagagtctcactctgttgccaggctggagtgcagcggtgtgatctcggctcactgcaacctccacccacgggttcaagctgggattacaggcgtgagccaccgcacctggccaccagtgtagaattttatatttctgagccttttaacatgtctggccctaaactgtggaatctgtgtcctgggcagtgtgactacatctgttcagattttaattcacatatatatgttttagcctggctttctagagaagtcattctgtgtctgaatatcttagttttcagctatgtacatgccaaagatatgctcaaacagcttgagcctgctctttaatctgtatctgggttaagaagggcacattcaaagcttaaagaattctcatctgccttggcccttgctctcagttagacaacctcaggtctcccctacacatgtgcatagtttcacgttatgccaggatatgtgaagaggttatccctttatggttctctcatttccagggtctgccttttaatttatagctactcttccactcaccccaactggcactacaaccttaaactagcaaatacatggtttttccttgttttcccctaccaagttcagtacattttatcgacaaaggtttttactcattgccccaaattgaatcagctgtctgacagcgaagctgctggttttccaaactacaattcttgccaaaagtgctgggacaggaggtcacagtagaagcccacgcgagaatgctgtagacttgcactattcttacctgaagatctaacagttttcctaagaataaatgtttctcaatgattttctttgcttttggttgatttccagagttcaaatagttttgggcaattctgccatttttatacttgtgtgtggaaaggattcaccaaactcttcatgcagccacaggtgaaagtacatttcttgcggatatttttatgcttgtcctcctcattttataaatgagaaaataaaaacttagatggcctagatcattttttaaggttaaaggactatgtggtcttaaagggctaatttgtcagttaacaatcaacatgtagggcatggtcactgcaaccaagtagcatcttgtttgaaacctgcctgactttagctattatcttttatataaaagtgatatggctgttataaaccacaagtcattgactaaatccagatttgtttatccaagtgaagaaatttaagatgtgggtaataagcataaaataggatattttgccaaaggcaaacaacttgttaaagaaactattatattaaaatgcatttttgactgctttaaagcaggtaatattaacctatataaaagagaaacatccttgttgatattgagccaaaaattagcctatgatgcaacatatagtttagtttctctcctctgccataaaaaaaaaaaaatgggcaagtatggtagctttcccaaaaaacatcctttaaattcttaaacatcctcacatttctctcccaaattctacctgcctcgtttttgttttttgtttttttgttttgttttgttttgtttttacagctatagtaacttcctagcataaaagatgaagcaaaagcaatacaattataatagctattgactccctaccaggagaacagggcataatttctaagaatgttttccaatagtgatgatagacttgtgcctctctacgcaacccttctaatattagaaaagaaaaattgtcatagctccataagtcttcccttctccaagtcaaacaactccagtccttaccagcagagccagaatcctttcaccaccacatggctctaccgtggctccaacagcaactccagtcagaatatggacattccttagaaatatctcttcgtggtgtggcgtattcaccctgagtctcagcacagactctaaacacctgatgatacattcgttcgtaagtatttactgagcgctactatatgccagacactgcacttaaaggaggagacagagcaatgaacaagattacgaatccagagtcgctgcacccaaaaactggggttggcagacactgaacaatcgctaattcaattcatcccagacagtacagctcacttcgtgctgaataccactaggaccatcagactcagacagagaatctttattagaattttctaatacaaggaatggaaatctacataacatgtccaaatacacacaatagggcaagcccatggtaattcccatatgtcctttagacaaagttttcaacaatcctcaggaaaaaatatgaaagagaacaacgcggtataggataagtttattttattctattagagtttctctttattatgagatcatgtcccttttttttctcggcattaaaatgttttttacctcatgaaataatttgtaagtagaaggtacctggctttgttttggttcattttgaaacagtcttatttgccaaataagaagacagcaatcaagtttctataccaaatatttgttgatattttatttatccatatcacccagtgatttaaaggactcaagaaagttccctttgtcctaaaatgcacctctgcacacaaagagtaggcaattactcttccaacaagtagacctccataagaattagatcattacattttgacacaaggaaatgtaagttttcccaccctcttgctgtatcactcacaagaacaataatatcactgtaaaacagacccaaacacacagtactgtaaatatgcaaaaagtctagtcaaagaaactatattggtgacaataacaattgtaattaatgacagttacttcagtaacggtaaaagtagccaaattcttatcaaggttatttatggctagtctctagtatcatccacaatgaaaatggtttatatttattaagctccaaatagggtagggtgggagaagagagaaaaggagggaaaaagttaataataacttaataaaaactctattatgtaactaaagtttgtcactagcattgacaaaactgcaaaatattcttggtagttgaaaatgacacaaacttcatgcaggacacccatctcccaacaaaaaatacatctgtgcttacctctggtaatctgtatgcttttatgcaagggttaaaatgtagaagggcattacaacatagcataaacaaagaggtttttaagtcaggtggtcttaaattccctcattcaagacctagatctaccctttactttctgtatgtgaccttgcacaagtcattcaaccacttcaagccccactagactgtcagctccacaggagcaaagaccacttctgcctgactcactactataaaccgtggcccacagcacggagaaatcagtttcttcctgtataaaataaagatattaacagtatttatctcgaagcgttaactagataaatgggatattatatatataaagtctggcgcagtgcctgattatggtaaatgctcagtaagttaaccgtttgacattaactaccagccatcaaacatgaaagtaatgtttaaagactttcaaacaccaacatgcaaagcctttacccactaagtataaattcctcgattaaaaaatttttttttccacagaatacctgcgaagtttctaaaccactgggttgggattctaataatagctgaaccctgaatggtgggttatagagtcaagctattaaaagacattcagtagactccaagtgctcctacttcaaaaaataggccataggcagaggccccactggcttcccagtctccccttgggacgtccctaggctgccagggaacccccctcctccgcgcttagggggaggagagagaaagcctcggaggcgggggccgggggtgggggaaagcgagcatccctgcgcctctcgcccagacccaccttgagcaggatggacggcggcagctggttgatgtctggggtttcggggggcggctccctgtgacagtcgcaggggttttcgggggactcccgacagtccgcgtcgccacattcatgctgctgctgggcggacaagggggcggtgcccccggctcggacagcgtccccgccagcttcggtgggggcaccttcggaggtgggagaagagggcggagggcagagcggctgcgggggctgctccggggcctggcagcagccggcgtcggggggccggggcggcgaagcgcctccccccgcaggccctcccccgccaccgccgccgccgccgccgccgcagcccccgccgccgcagcggggctgcttgcagggggtgcaggcggggaccccggcccccttccgcttgcacaccatttcggggggcgtagggagctcggccggtgacggtgtcggcccccggaagagctgcacggcggcgggcggccccaggaagcgcaccggccccaagctggccaggaagagacttcggccctgctgctcccaggcggcggccgcagccagccccaactctttgcagcaggaggcgggcgacgaagccgaggcggcagcggcggcggcggcggcggccgaggatagcaggaagcggcgggcagcagcggcgcagtcctcggcggccagggccgcgtagcgccgcgccaggtgctgagaggaggaggcggcagcgtaggccccgtcccgcggcggcggcgagagcggcggctcctcctctgggccggcgggggcgggcgcgccgggactgtgcacgatgaagcagagcatgcagggcccgcggaagaagcagtcccggctccggggcgccgccggctgagggggcaccttggctggggtccggcggggcagcctgaggagagggcgccggcggcggcaccaactgcaacagcgaggcctcttctggctcgggcggttacgcggctccttcgagagaaggtggcccatatagaaggccccgaggagggggaccgggacgggagggagggagacccagagaggcgggctcccggcagcggggcaggccgctcgctggctcggcccccggaggggtcgcccttcctgcgcacacacacgcacacacgggcacacacgcgacggtggggggtgggcgtcagctgcgggccgccggagtgcccgacgggggctacatgctttgcccagggaagccgggagaacgatgggcgcgagctttggggacgcgagggagggagcgagcgagcctgccggctaggcgaccagtccgggcccggccagccggctcagtcagtcagcggagcggccggggaaaggccgggtcccgctcggaccattttaactgcggatccgccgccggcgcgcgcacccgcgactctgctcggagccgcaggagcgcgcggcccgttccggcagggggcggagccagttgcggtggcgcgctcgtggcggggacgccggcacccggctgctcacccgggacggccgtcacaccggcactacgggaagaagccggccggctagggcacggagctctgggcttgcggggtgcggcgcacgcccctccctcccaccgcctaaggtttttccgaagctgctgggcgtgcgccgcgtttctgaggcgggaggagacacttccgagccagctgtgtgacatccgtttacacagccgcgctgacgtctcgaggtgtaagttcaagagctgccattggccgggagccgctgggctcttcccctcaccttccacccctgtcaccacccctgactcggaaaccgaggccacttcgaagccgcgaggcgggttccgccggaagggccagtgtgggcgctgaccgcgcttcgggcagagtggcagatgcggcccctgggtgatgcgcaccgaagtcatgtgaggggttgattggttgtgcggcaccactgtttacccacttgtgttttcttaattgttgcgtactactgcctttccacaactttatttcagaatgaaagcatatatcaaattacctgtgcacagcagaaagataacagcttccccacccagtgagccattcaacacccaggctacaaactgtagatcactttattgtctacaccctcggaatcctgtctagccgtctgttgtatattttaaacatgacggtgcagtgcctgctatatgacaaacgttggtgatccagatgagaaagaggaaacagctatgcaggcagtcctttagaaggtttgactatatcgaggctaaagagctagggcagctgctagagcggtacctggtgcggagaggttagctttcacaagcgaaaaattagaggaggcaaataccatgggaatgagccactctagtgagagaaataagaggagaaggtggaatggagagtgctttaggaaggatactttcttcattgtgattacagagaatgaggaaaggtagataaaggacggatacagagaggtggatgtttctagcaggaaggtgaaagagttcctttctgttggtttctgttttgcttcagatagagcttggttacctgctgaagggtggaagagaagtggcaggtgtttaaaaaaaaatctgctaaggataacttgagagagctgactgaggaagaagtattgcaatattcaaggcccagtggcttggagaagaccactgttggaacctacattgctattcccactatagtggccagccccacccagcctgctctcaaacatgctgtcaaacaattgttaattctggcctttttgtcagaaatgaccaatcttaagtctgtcacattcagggatcctttcagagcctaatgacagttatgtggaattctagaagcaaatatttgtcaaaagatttcacagacatacacgctattcactatcaaatgcat

SEQ ID NO: 199 - DNA, 40971 bp, Homo sapiens
  source 1..40971: mol_type = genomic DNA
actgtgcagttcgttttttttttttttctgagacagggtctcgctctgtcacccaggctggagtgcagtggtgcaatcacggctcactgcaacagtgacctcccaggctcaagcgatccttctgcctcagcctccccctaagtagctgggaccacagacaggtgtgtgccgccatgcccggctaatatttgtactttttgtagagacaaggtctgactacgttgcccaggctgctctcaaactcctgggcacaagtgttgtttctgcctcgatctcccaaagtgctgggattacaagcatgagccaccgcccccagcttgaactatgcactttattttacttttttttcttcaaaaaaatcctccgctggcaaattatgcactttattttttatttatttatttatttatttatttatttatttatttgagacagagtctcgctctgtcacccaggctggagtgcagtggcgcgatctcggctcactgcaagctccgcctcccgggttcaggccattctcctgcctcagcctcccgagcagctgggactacaggcgcccgccaccacgcccagctaatatttttgtattttcagtagagacggggtttcaccgtgttcgccagggtggtcttgatctcctgacctcgtgatccgcccgcctcggcctcccaaagtgctgggatgacaggcgtgagccaccgcgcctggccaaattatgcactttaaaatggttaagatggtccaggcctggtggctcacgcctgtcatcccagcactttgggaggccgaggcgggtggatcacttgaggtcaggagttcgagaccagcctggtcaacatggcgaaaccccgtctctactgaaaatattttaaaaattagctgggcgtggtggtgggtgcctgtaatcccagctactccggaggctgaggcaggagaatcgcttgaacccaggaggcggaggtagcagtgagctgagatcacactactgccctccagcctgggcgacagagcaagattctatctcaaaaaataataataaaataaaatgaacaatgctgaggctgtttccacagccctgagggaaagcctaagctgactcggccctgcctgccttcagccagccaccacttttgctgtctgagctgccaccagaccacagggaggcttttgcagtgtgtagcctgcacaaccgtgccagtgtacctgcactgctccctgccaggcccatcctgacctacgcagcctcctctttcacctttggcctccccagcccaaggctgtctcagctgtcacctcctgatgccccctggggagtgtctgccccccgctttgggtcttgtgtctccatccacacacctctgtttcagacaacccgcctccccaagcacggcacccgcccccaaccatcggaagtgaacaaagctaccagcctcggacccaaggaaggggttgtaggcaagaggtcaaagtatccgtgctggaaggaccacacagccgcctggctttctaaatcaagtccattttatttgaaattttccacatgccacacatgtacatgaaaattcccatccagaatgtagtttgctacagtgaacaccaatgtcaggagcaggcatcaccgtgagacgccacgggggcaggtcagcgggacggggacagggaggttggtcatcgaaaggcaggtgatgcatgtcgtgtcatttagcacctggtcatgagatacggcgagacccccaggtccagggaaaggtctccccttaaaaccacgtggagctctgctgtctctgggcagtctcacgtggacagacaatgctcagaaggtggcgaaggggctggagggagataccaccgacggctgcaggggaggggcacgcacacacacaggcacgcacatgcttgcccatgaacaccccccgggcacacacacacccttgcacactccccaccctccctccaccccagacacatcagcacagcggtccaggctctggctcactccccgggaggcttctgtggccagggttcccatggcgggtctggtggcaacagcttggagaaaagcctcccgggaccaaccctcattcccaggtccactgatctggggtaggagtagccaagtgttctgacaggcggttttcccgtaaaccgaccccttcagcgtttctgctttttgttgtttgttttctgagacagggtattgctccgtggcccagagtggagggcaatggtgcgatcttggctcactgcaacatccaactcctgggctcaagcaatcctcctgcctcagcctcctgagtagctgggaccacaggcacatgtacaatgcccagctaacttttttttttattttatgtagcgatacagtctcactatgttgcccaggctggtctcgaactcctgggctcaagcgatcctcctgccccagcctcccaaagtgctgggatgacaggcgtgaaccaccacgcccggcccctcccatgtttctcaaaggagctttagagagcagaggagcccgagtcactgccaccactgggttcctcagtgtctgtggggtttgtgttcatcatgcccagtagatctagaaacttcttttgttttttttttttttgagacggagtctcactctgtcgcccaggctggaatgcagtggtgcgatctcagctcactgcaagctccgcctcccaggttcatgccattctcctgcctcagcctcctgagtggctgggaccacaggcgcccgccaccacacccgactacttttttgtatttttagtagagacggggtttcactgtgttagccaggacggtctcgatctcctgacctcatgatccgcctgcctcagcctcctaaagtgctgggattacaggcgtgagccactgcgcccggccagatctagaaacttctaacttgaatcccacacccccaagtgcaaatgagacccatgaccatcacaaagaccccccagcgtcgtggtcaaggctaccaggaactggcagcagcgctctgcccacgtccacaggaagtggccgacgtctcctctgcctttggtttagtggccccacacttcatcacctcactttgtccatgaatttcacacgttttcttacaagagctctgtaatgcgccaggcacggtggctcacacctgttatcctagcactttgggaggccgaggcaggagaatcacttgaggtcaggagttcaaggccagcctgaccaacatggtgcaaccccatctctgcaaaaatacaaaaattagccggtcatgatggcaggtgcctgtaatcccagctactcaggaggctgatgtgggagaatcgcttgaacctgtgaggtggaggttgtagtgagtgagctgagatcgtgccactgcactccagcctgggggacaaagcaagactccctctcaaaaaaaaaaaaaaggctctgtaattttcagatcctaaaaggagcagataacaggggaagaggaggtgggaggctgccacagcgctgcctgctgggggatcaaggtccccgcatccaggcctccagcaccctccatccctgcaggagcactgctggcaccgccaaggccggagcactggtctggagcttcattggccggcaggggcccagccctcagctgttggagccctacggctctaggtctggcccctccacaagccctccaggcccacgcctgagcccagccccggtcccctgggtccaacggcctgtggctctgggtccggacccagggtgtggttgagggagggcgctgctgagctggcaggcaacccttgtgtgtttgcagcgcaagaggagctcagcccgtcctggctgccgtcctgggtcgaagcagcaagtgtcttcccgccctgtgcacagacaggtcccaggagggcctcttggagaagaaaccgctcaggcccatgtcctggcagggcctctgggggcagcagatggcaaggatagagcccgccccctctgctgcagaaggaagcggccctcacccagcccccctgggctggacgggccgttgaaaacaagaaaagccttccatagcagaaaggagtactcaaggcccagaaaggcagctttgctctgggtcatcaggctcaagtgcctgctctgggccaccttcggaagcctggtggagccgagtgttgcctggtgacgtggagcaggaggcggggcggaggctgcgggacacggggctgcagggccgggaagggggtcaggagaataaatagcagctaggtgtggggtgagctgggagcacaggcaggagggggcagccagagaggttggggctctcccttttaaagaacaaagggatacataccctttcccctcctccctccctccaaccccacagtctctccctcacatacacacacggaagacgtgactcacacacacatgcacacacagggcacaggtacacgaaggcacacgtgcacacacagggcacaggtacacgcaggcacatgtacacacaggcacacgtgcacgcaggcacacgcatgcaggcacatgtgcacacacagggcacaggtacccgcaggcacacgtgcacgcaggcacacgcacgcaggcacggggacaagtgctgaccacgctcctccagcaggcagcatatggtctgctgcttaacagccgagctctgccaattggggaccattagggtgggttcttttcccagcatcaaatgctgcagaatataaattgcaactaacgctggtgccaaaatagcacttagagaaaataagcacgttattaacatctggtgaagcccatctcgggggtagcagcagcggaaattcttgctctaagtcagaggatggttgcaggggacactaaaaatacaaggtccactgtttcaggggtgctttccaaggcactgcaccccagcctcaggaacagcccttcccccagtcctgtctatgagtataaattatgctgctggttaaaaccgcttgctcatgagaacaggacacccaggcgcgatcgtacacacgctaggatgcattcctggagcagacgcaattctctagcccgagtggggaatgttctggaggaaggagtggggcggagctgcggtgcccagagacacaggccccctgagggtccgggaacctcccaggccactcgcccctgcctggtcggagagcaagaagtggtcagtcccaggaggcaccacaccacccgatctgatcgccgcgcctggtggtctccaggtgccattttaaagctctaaagaaatgcccaggaactgtgggtggggggggtgctcccaccacctctgagaccctcatctacagcccctgccccctggggccgtgggcagctggtcctgcggcctgcagactaggagacggggcctaggggtgtggctctcacaggccatgacaggagggccaggaggcctctgggaggcgaaggcttggtctggtgtgggtcccaccatcgggcactgctggaatcagcctgcagaagggtccctctggccaggaggcaaaggttctgcactgggtgcagcctggggctgggagaggacccgtgggcttcagagaggaggcgatgaccccatacatacaagaaagtcagggtgaagtgggaggagacctcaaaccccagatccacctgtgccagtgagcagaggcgccagggtggggtcaagactgccaggtggagagctgggaggcagcctgcacaggagggctgtacctccccacagctctgaccccagttctccaaaggcctcctggacaaggagcttggcccccagagcaaggagctgctgaaaaccatccccactcaggggcagggccggtgattggaggcctggggatggtgtaccccattttttaacagcaaagcaaatgtgagacaccaccccacaggacggggcatctgtcacacggaaacccaggaggaggaaggcgggctggacaaggggcccttcaccaagagcggccagggcggcggtccaggctagcagggcccaactacagccccctttggaagccactggcccagggacagctctaggagcgcctggaggtggaggacggcagaagcggccaccgtggcacatggggtgaggactcagatgccaggaggatgtcctcatttttggaataactttgtttttttctctttctttttcagagatggggtatccctgtgttgcccaggctgatctcaaactcctgggctcaagtgatcctcccaaagtgtgttgaatatatatatatatatatatatttttttttttttttttttttttttttttttttgaggcggagtctcaccctgttgtccaggctggagtgcaatggtgtgatctcggctcactgcaacctccgcctcccaggttcaaacgattctcctgcctcagcctcctgagtagctaggattacaggcgcccgccaccacgcccagctaatttttgtatttttagtagagatggggtttcaccatgttggccaggctggtcttgaactcctgacctcgtgatccacccacctcagcctcccaaagtgccgggattacaggcgtgagccatcgcgcccagctgagtatttttaaagtcttaaatgaagtcatttgaaatggggtcatgtgattgctactccagccttaagaatcctttctgggttttaatgtttcgcgttattctaacaaagccgaatgtgtatcgatttccccaggaacgcgcatggaccttcccagggaagctgaaggccgtggggtgggtgggagggggaggaggcctctctcgttagaaacgggccctgctggttgggctgaaaagtcacaggagaggctccaaccagcagtcccaacctcaggggacctctctggggccacaggcatcatctggctagaaaagccccagagacatgagtgggctcaagtgtgtcctaatgggatggagagtcccaagtctgcagccactaaactggcaggcccttccccatgtcacacttgaccatgcaaggggacactcagatacacggtgaccagcccggccgactggacttcagggggacagcatgtggccgcccatccacggggccccggtggcaggtgaccacaaacacaacagccaagggacacgcttcccggtcggaagtggcagggggttcgggccctccaggcccgtggacagggcccccagggattgcggctcagtatacaaaccccccagccaggccccaagggtcagcctggttcagccagccccccacatcgaccgtcccccgagccccctcatgtcacccagaacgcatcccctcgacctaaacttcacagagcaacagtccccatgagagagccgtggagacgccgggagccccaggagccaggtggggcgtggctggccgggagagaggcccccttcctcttgtgacaaaccaagggtccctggcgtcccaggctcctgcagcttctcgaggtgactgagaccgatgggcggcggctccgcctctcaccaccacaggttcggcggttcctcggccactctgctcttaaataaggtgatctcatccaggtgcaccagggggacgtcccggatgacgtcggtcaggccctcgtggagcagagggaagatgacgacgtttaacgcgggccgctcggcctggaagctgaaccagagacaggcggtcagcggattacatgggtggccacggagggggcggagcctgctggggaagcccaggaggcactcacacctgcctccccgtcccgggctcacctggggctcccagacagaccatgcctgccagagtcaccctctaagtgcctcaagggccctgtacgtggcagacagagctggggaggagcacggcagccgggaacaggccacacgcttctctccaggctcagggggcacccgctccatgccagccacgaggatcagaggccccggaggccaaccctgctctgcagacgtgctgctgggccccagggcagcagagggaccccactgcaggagtggcagatccgaggcccctggcccacggaagccccacggccaggacagagagaagggacaggtgcccacaccccacagccgcaggtgggccacctcaagggggtgcgactgccaagtcagtgaggcagcagcagtcgctgggaggagcagatacccaggtggccactcaggaaaagcacacgtttgaccgcatgacaaatggcaggtaggcgacccccccccaatgcccccacccccaggcgaccagcccccgccacgctgtgcacgaaaactcatgcacaattgccacggggtgcccaccgagtgccagacgctgcattgagctcgacagacatgacctcattttgccttccccacaaccctacaaccaaccacagtcccccagcgggccatgaagcagaacagggacccctccacagtcagagcaggccaccagcacagccctactggccctcctaggccaaaatgcaatgcaagtgcatttgtggcttgcccctgtaatcccaacacctgggaggctgaggtgggaggattgtttgaggccaggagtcccagaacagcctgggcaacatagggagactttgtctctataaaaaattttaaaaaatgagtcaggcatggtggtgcatgcctgtcacctcagctacttgggaggctgaggcaggaggaccacttgagcccaggaggtagaggcggcagtgagctaagatcacgccactgtactccagcctgggcaacacagtaagaccctgtctcaaaaaaaaaaaagaaaaagaagaagaaaagaaaatacaaagacgacccaagtgccagcccgggagctccaggcagaaggaaaaacatagcagtgccccagagaggaagacaaaaacatccaggacgggcgcagtgactcacacctataaccccagcactttgggaggcagaggcagatggatcacctgaggtcaggggtttgagaccagcctggccaacatggtgaaaccccgtctctactaaaaatacaaaaattagcaaggcaggatggcgggtgcctgtagtcccagctactcaggaggctgaggcaggagaatcccttgaacccaggaggtggagtttccagtgagccgagatcgtgccactgcactccagcctgggcaacagagcgagactccatctcaaaaaaagaaaaaaaaaatcgaggctgagcgcagtggctcatgcctgtaatcccagcactttgggaggccgaggtgggcagatcacctgaggtcgggagttcgagaccagcctgaccaacatggagaaaccccatctctactaataatacaaaattagccgggcatggtggtgcatgcctgtaatcccagctacttggaaggctgaggcaggagaatcacttgaacctgggaggcggaggttgcagtgagccgagattgcgccactgcactccagcctgggcaacaagagcaaaactccgtctcaaaaaaaagacaaaaaaaaaatccagaaacttctgcccagagtctcagtgggtgcaaggcagggagttacccacgacaaagaacctcaccgtttgccaacactaagtcaagtccccccggccacagcggccacttaaagggaagaggacgacggggtccagcctctcgctgtgaccctgcctgaggtggtgctggactcacgacacacagagtcaatagcagaaaggcactcacaaaagcagaggtttcggcaataaagacgccatcacacacctctttccacacagtaatctcgtgggcagcaatgtccatgaccgtgaacaccacgggtcatgtggcagacgcatcctggcctgtgaaaccgtcatgccatgtacttgatttgcatcaaactccaccccctctggctccagctcgtgaggctgttaaggagctgctgtcggctggccgtggtggctcacgcctgtaatcccagcactttgggaggccaaggcgggtggatcacgaggtcaggagatcaagaccatcctggctaacacggtgaaaccccgtctctactaaaaatacaaaaaaaaaattagccgggcgtggtggtgggcgcctgtagtcccagctattcggaaggctgcggcaggagaatggcatgaacctggaaggtgagcttgcagtgagcagagattgcgccactgcactccagcctgggcgacagagggagactctgtctcaaaaaaaaaaaaaaaaaagagctgctgtcgggacatggaaggtgatttttctttttttttcgagacagggtcttgctctatctcccagactggagtgcagtggcacaatcatagctcactgaagccagtagctgggaccacaggcacacatcaccacactgaccagctaatttttttttttttttttgagacgcagtcttactctgtcgccccggctggagtgcaatcgcgtgatcttggctcaatgcaacctccgcctcccgagcttaaacgattttcccgtctcagcctcccaagcagccaggattacaggtgcccgccaccatgcctggctaatttttgtatctttagtagagacagggtgtcaccatgttgaccaggctggtctcgaactcctgacctcaagtgatccacccgcctcagcctcccaaagtgctgggattacaggtgtgagccaccatacccggccattattttttattttttattttttgtagagacaggatctcaccatgttgcccagcctggtctcaaactcctgggctcaaacaatcctccccccttggcctcccaaagcactgcgatgacaggtgtgagccatggcacccagccaggattcgtttctcgccacaagcaaggaatgaagcaggggggcctgctcttccacacaccctgagggggtcacaggctgcatctgtctctgcggccaggaaggagcagcctgctttggatgtccctgggtgatgtgagaaggtgccactctagagtagtgtgtggaggggacacctggggcagagggggagtctctgtggattgggacagaaaggccagcccttcttggcagtcagagggcactcctgtgcggcttcatagtctgctacgtacataatgaggctcaaaaagactgagtttgggaaaagttaagatcctcctatagttcctcaatgtgatgactgggtgttcacactcattggcgagatgtgcctctctcaaaccttgttcagatgctgcagacacattacccatcagatgtgcaaaaaaaataaataaataaaaaagggaggccaggcgcagtggctcacgcctgtaatcccagcactctgggaagctgaggtgggaagatcacttgagtccaggagttcaagaccaccccgggggctaggcatggtggctcacacctataatcccagtactttgggaggccgaggcgggcagatcatctgaggtcgggagttcgagaccagcctgaccaacatggagaaaccctgtctctactaaaaattcaaaattagccgggtgtggccgggcgcggtggctcaagcctctaatcccagaactttgggaggctgaggtgggcggattacctgagaggtcaggagttcgagaccagcctggtcaacatggtgaaaccccatctctactaaaaaaaacacaaaaaaattagccgggcgtggtggcacacgcctgtaatcccagctactcaggaggctgaggcaggagaattgcttgagcccaggaagcggaggttgcagtgagccgagattgtgccactgcactccagcctggccaacagagcaagactctgtctcaaaaaaataaataaataaataaataaataaataaataaataaaaatttagctgggcgtgctggcgcatgcctgtaatcccagctactcgggaggctgaggcagaattgcttgaacctggaaggcagaggttgcagtgaaccgagatggtaccattgcactccagcctgggcaaaaagagcaaaactccatctcaaaaaaaaaaaaaaaaaatgagctggttgtggtggcacatgcctctaatcccagctactccagaggcagaggcaggagaatctattgaacctgggaggtggaggctgcagtgagccaagatcgtgccactgcactccagcctgggaaacgagcgaaactctgtttcaaaaaaaaacaaaaaacaacaacaaagaaaacaaagccagcctgggcaacatagggagactccatctctataaaaaaatgtaaaaattagccgggagtggtggcgtgcacctgtagtcccaggtactgaggaggctgaagcaggaggatcacttgagtctgggaggtcaaggctgcagtgagctgtgattgcaccattgcactccagcctgggcaacagagagagaccctgtctctaaaaaaagaaaaagaaagaaaaagaagagacggcggccgatacccagtcgtgtgtgaaggtgagtctgtcagagacaggagggtgatggccatcaaaaaaggcagcgcggtcaccagcaacaggtcaccggcgacaggtcagcagccacgacaccggccggccctgcaggctgagacacagagagacggttgagaccccaggccacccagggagaggacgggtgagccgcacaacagcccggggccaggtcctccctctggctccataaatcctccaggcaggaaaaaagacgagaaagagaaaagcgtcaggaaaagcgagagcaaaccgctgctcctcctcctccttccgcgcccagggcgcaaagcagggggcggggcctgcggccggttcccgggagccccagcgccacctgctgggccttgggcgcagctgcaaaggccagagctgcagggctgacactgacccctaggcccacacaggtgccctgggctggaaagcccagggaaggccggtcagaccctgtctgcaggtcagctgggacctgcggctcgggccacactgccgtgaccggggccggcgtggagccaggcacaggcactgatgccacgaggaagctgtggtacaggtgtccgtggacggggcctctcccacctggctttggggtggtatctgactgccagcagggtgggaagagaaaggctttcagcagccctgggggaatccagcttatgtgagcacagaggtccctgcaatgctgtgaccctctcatctgcagaagatcctgacacagcctgcccagcacagagcctggaggtccccacagaggtcccctcagccctggatggccctgcacagtccccgacacggcccctctcctcttccaggcgtgaactcccatccctccagcactcactccctgcctcattgctcagggcagctctcgaagactgtttctccatctgtaagctggggctgatagcactgacctcacagggcttctgtgaggcttgaacaagaggcaagatgcagtgcctggagcagagagaggcaccatgggggccccaggcaggcgccctggaggggcacacacgggaggcacactgcgaacacggacgcctcaacacccgcatcccactcggttggcagcaagtgcgccgtgggtcccaccacaggcctgggtgctgcaccaggtgcgggacatcggagggggaggggtgggtggggtcacagagggactggcacagagggatgggcacggcttctgccgaggaagtcctgaggctgctctccaacaccacgcagcaagcatgggtgatcaagggctctcccaggcacctgcgtgtaaccagcgccctctggggccacctgcgagctcagcgccgggctcagcttgtgcctgaggacacaaaacaccaaagagctgtggagcaccagccttcaaaaaacgcaccgtccaaccggggaacgcaaagagcttactgcatccaccttagatcatcagacttgcctaaaaaccacgaaggtgcaggtcaccccaggaggccagagggcaagctcccggcctgcaaggggcggcatggagccggccacaggcagcaggtgaatggaggagagcagctcagagcaggggctggcatccggtgccacgtccaaccgacccgcctgtagcgccatgcagagaggattctgaggaccagaaggaaaagcaggctcatcggagcaggaggccttcgagggtggggcggggggctgccccgtcatgagcacagccgtcctgaactgcttggggatcgtggacgttctccgctgcagcaaggaaacagacaactcccagagccggcccccatcgccacaggaagtcgccccagccctgcggagctgagaccgtcccgcatgggatgggtctgagggccccagactcacaggcaacagaagagaggcaacgcccactcccaagtcccttcaacaaaacacccacgcaggaggtggcagctctaggtgcacagtcgcagcctcccactggctggagggcctgtgagtggagcccagccgcaagcgcaagcgtatggggggcgaaggcccgaggctcttcccacatctgacaggacagagctagggcggagctgcctgcatccgccacacctgagaaaacccagctttagcctctcggtaccacagcctcacagagcacagtgcaccccttcccccaacagctaccgcctgttcccaagcccactcgactaagccctttggagcctgtgacccactcagccctcctaaaatggggtacatcagcaggtgtcacatccagctcacagcacaaggatgctaagatgtggggaagcagagccaaggggctgagctggaacattccagctgccacccaggctgcccccctggttccaccgcaggcgaagtcaagatccaaagcaaagtcgaggacacagtgaccgtgtttttaaaaccgccatgaaccagggcggaccacgacacccagatgagagccgtgaggacagcactgagaataatcacttagggctttatttactgacacaagaggactccacggtgtagtgttacatttttaaaaatcagattacaaaacaatatgagaaccctatctccagttcattctccagggaaagttggcagcattcactgttgggaaaccttcacttaaaaataggttgatgttggccaggcgttgtggctcacgcctgtaatcccagcactttgggaggctgaggtaagcggatcacctgaggtcaggagttagagaccagcctgggcaacatgatgaaaccccgtctctactaaaaatacaaaaattaggccgggcgcggtggctcacgcctgtaatcccagcactttgggaggccgaggtgggcagatcatgaggtcaggagatcgagaccatcctggccaacacagtgaaaccccgtctctactaaaaaaaaaaaaaatacaaaaaattagccaggtgtggtggcgggcgcctgtagtcccagctacttgggaggttgaggcaggagaatgtcgtgaacccgggaggcagagcttgcagcgagccgagatcacgccactgcactccagcctgggcgacagagcgagactctgtctcaaaaaagaaaaaaagaaaaatacaaaaattagccaggtatagtggtgcacacttgtaatcccagctgctcaggaggctgaggttgcaacccagaaagcagaggttgcagtgagctgagatcccgccactgcactccagcctggacgacagagtgagactctgtctcaaacaaacaaacaagaaaaaagattgatgcatagtctaaatttttaaaaagtactctataaacacaagttgtttttacaaccagagagggggaaaccccaaccaggattattcctgagacagccagcggccgaccgcaaggacaacagactaccccagagtctggcaagcagggttgtcggcgcccagtggctcgagacgtcctggctgatggctcttctcgcaactctgtgaacagctggggcctccttcctgtcacctctccccacctgcagggacacgaacactcagggcgttcatgtcctgctgcccccttggccgggcgcacgcctctctcaggagccctgatcactccagcagtcagcccgtcctcctgagaggtcttgaaatgcgtcactccccacatcgcctaccaagctccagctctctccaggaatcgcctcctcctaatttgtgttcaattctaggtgctcacctgacttcctgcgcagcagcagagcatcaaactccaggatgccctgtcacgaggggaagcggagatgctagctagctaagggaagaggggccagactatgtgggccttccagaaagggcctgacagcaggtggcgagggagagggagaaggaaaggttctctgttcaatctaccgcctttacccacaactgcccaagtaagcactgcttctagatccaaacaacgggcagagatgtgaaaaatccagagttaaagatggttgcaggctgggtgcggtggctcatgcctgtaatcccagcactttgggaggccgaggcaggcggatcacctgaggtcgggagttcgagaccagcctgaccaacatggtgaaaccctatctttactaaaatacaaaatacatgctggtggcgcaggcctgtaatcccagctactcaggaagccaaggcaggagaatcgcttgaacccggaaggcgaaggtcgcagtgagccgagatttcgccactacactccagcctgggcaacacagtgagactccgtctcaaaagtaataataataataagaagaagacttttgtacttgtgggagaggagagcttgaactatctagaaaatttaccatgtggctagggaatgctcaaggagcagaggctgggccgtgggagaccaaaccccttgctttcaccctgtcactgcctggtgctcgtcaattccaagaaaccactggtaggcactcggtgaaggctggggaccaggtcacgggatgctggtgatttctgcggcccctgaagctgtacgcaacccacatcactcacctgcggagaagcgactgctgcaggctcttgcaggtggcgagggactccccggtgaacaggtggcacatgacaacctgcaggcagcgagccatgaaggccagcacggcatcgggctggagggtgccgctgcgagagaccaggcacaggcgctgcagcgaggggcactggctcagcgcctggaagaactgggcgttggcgctgaagtagggctgctccagcctgcggggagagagggcagctgtgaggtccgagggaggggctcgcaggccaggccagctgggcgtctggaggtgctgccagtggaagcttcctggcctggggcccagcccagctgttcccgccacctcccaccaataccactatcccttggagtactgggtgccgactcaggcccccagggtcccccttggagatctgatttggaggcgacccggtgggcctgatgcaagcagccagccagtgtctacagagcccggcttcaagtcaccagccgaggccatcagcatctgtgtccgcagcctgcctggtgcaccccaatgacccccaggcaccctatcttcctcaaacgctggtgtgctgggcagcggatgcaaagaggaccccacacatggcccctgcccttgggaagctcagctggacagggaggcagataaggactgaacaccatgagagagggcggtaatccgggaggctggtgtgggggagggagagggcgagaatctgggaggcagggggtaaggtgggcaggaacttcagccagatgggggccacttcagccacgacagatgggaggacagcgctggatggctgcagggccaaaggaggaggccgaggggagtggggccaagctaagaggttggcagccagggcaggggggaggcccaagtccgcaccaaggctacagtgacagagaccaagacgggagaacccaggggaaaggggaggacttgggaaagggaagtaggggacgacattctagatccttcctggggagtctgtccatgcagacagaaagcagaaggacaggccatgtctcgaagtacagtggcagatgtggggatgtggcgctgctgaggacaggcccggggggcccttggagaaccaggctgtgggactgggcaagacctggactgtggcaggttgtggggtgcagcgagcccctgagataagaatcaagagggagcagagaggctggaggggaactcacgtgacttcaggggctgccaggaactcccggggtggggggaggagccgctggagggacgggctgaggcgaatggggaggggctagtgtggactgagctgcgacgcccccccacacacacactatgcaggagtcctcaccttgggacctgagggtgtggccttatttggaggcaggtttgttgcggatgcaagggagttaagaggaggatgcatcctgcatgatggggactctaaatctaatgactggttccttataaggccaggtgaaggcacagagatacccagacacagacagaaggcggccaggtcacaacagaggcagagactggggccacgtgtccaccagccaagcagtgccaggcgtggctggcaggcgcccgagttcctcctcaccatcctcagaaggaatgaaccatccctgcccatagcctgatttggggcctctgggctccagaatcgtgagacaataaatgcctgttgcatgaagccactcagtttgtgatcaattgtcctggcagccccaggatcctagcacagatgctgagggcagccacagcagaaggcgccacaggcatggagattcttccctggtaggtgacacaaaaagaccaagtcacggcgggcatggtggctcacacttataatcccagcccttcaggaggccaaggcaggaggatcacttgagcccaggagtttgagaagagcctgggcgacatagtgagagcccagctctacaaaaagtacaaaaattatccagccatggtggcacgcacctgtactcccagctactcgggaagctgaggtgggaggatcgcttgagcccaggacttcgaggctgcagtgagctaggatcgtgccactgcactccaagctggatgacagagcaagacagtctcgatctgttgcccaggctggagtgcagtggcgtgatctcagctcattgcaagctcccgggttcacgccattctcctgcctcagcctcccgagtagctgggactacaggcgcctgccaccgcacccagctaattttttgtatttttagtagagatggggtttcaccgtgttagccaggatggtctcaatctcctgaccacttgctccacccgcctcagcctcccaaagtgctgggattacaggcgtgggccactgcacctggccaaaattttttttttaaaagaataaaggaagtgtggctcatgagagactggttatttacttttgtgtgtgtgtgcgtgcgtgcgtgcgtgcgtgtgtgtgtgtggagacaggggtctcactatgttgcccaggctggtctccaactcctgagctcaagcaatcctcctgcctcagcctcccaaagtgctaggattataggcgtgagccaccatgcctggtagttaattttcttttaattgatttaagcagaaattctcagccaggtgcggtggctcacgtctataatcccagcaccttgggaggctgaggcaggcggatcacctgaggtcaggagttcgacactggccaacatggcaaaaccctgtcactactaaaaatacaaaaattagccaggcaggccgggcacggtggctcatgcctgtaatcccagcactttgggaggccgaagagggcagatcacctgaaatcgggagtttgagaccagcctgaccaacatggaaaaaccccatctctactaaaaatacaaaattagctggtcgtggtggcacacacctgtaatcccagctactcgggaggctgaggcaggaaaatcgtttctacctgggaggcagaggttgcggtgagccaagatggcaccattgcactccagcctgggcaacaagagtgaaactccatctcaaaaaaaaaaaaaaaaattagctgggcgtggcggggcatgcccattatcccagctactggggaggcgaaggcaggagaattgcttggaggcagaggatgcagtgagctgagatcacaccactgcactccagcctaggtgacagagcgagactctgtctcacacaaaaaaataaataaataaaattaaataaataataaaataaaacatccaaattgtctttatttttctatatttgttttgttaagctattcagattgtttttatttaaagatagtaataaaatgttttcattacgtatattttaaataccacctctccctaaaaaaatcctaaagtaaacaaccctttgcagaccggaaggtgggaaacgggaaggggtaaaaaagacggtgcaggcgccgcacctgctgagctgcaaagtcacctctggatttctctccaaagcaaaagcaggaggctccagacagcaggagatggaaacggggcgttgggcaaggacggtgccgtcgtgtggtcactaggtggcgatgcggctccgtgctacccgccccagatcgccccgagcctctggggttaaaaaccaagtctgcagagcgtggaaaaaaaaccttttttccacgagataaccacatccacattcttccgccccggaggaagtcacctgtcacaggtgttcaggatgtggcaggcccacgggagtgactggtcaggcagcgggcctggcacgtctaaagcttcctaggctcccacagcacgccgcctggggcacggcacccaggacggtggcagagctgacctgactcgagtgaccggcagcgtctgcagggaggatggggacgaggaaaaggctcccactgcgccgggcctcacctttgagtgaggatccagcctccccattctgctccctgagggggcacctgggtctcctggtgactctgtgggcatgaaaggtgctgagctcacagtgcgggggctcccatctggccacccactgcacgggccgtgagagcagcacccaggcctccgaggtgtccctagggtggctccggggcctggctctgaaaaggatggcccgcttctgcccagacgctgccctggtcacgctcacagcagcccgggtgactcagggtgacacgctcccccgccctccaccgcaagcagggcttagctggtctagggaaagaaggtgtcttttctgcccaatttgtaatccccttactactgaggtgtgtccaagtcccagccagagcgactccttcctgcaccaccccctccctgccaggagccccagcaagcacaaagctgggggtcacggtgtgggggctgccagtggcagcaggtggctggcgtgggattccaagctctgccaccaaagagactccggccgccccaggatgcggcctcggagcatcgtgccagcctccagggatcccagcgccgtttcctctgcacagctcctgcccacgggcaagcgagtgccacctgctccttccactgcagcgtccgggctcccttgccgcagaaggcaggaatccagaggaacggggccagctggcagcgtctgggaaccggcatttgttctgaacaggcagtacccagctcagagcagacgtggttctcaggggctgctgggcacaggctggagtttgtccacagagatggcattatgagcagggtcggtctctcaggctggcccacaaaacccacaaaacccacagaacccgcaggcctctccgcgccttctccatggccctgctcctgaggaaggcccttggccacggggattccgtcccagactccggaggccatcggggaccatgaaatcacgctgacctcgggaggccggagacaagcagccatgtgacctaggcaagttcatgcactctctgggccttactttcttcatccattaagtgggtacaactgtgtcgacactcagaggttgttgagaatatcaaaggggtcaagacctgtacacccatgaaaagcacctggcagaggtcacatgagcccaaaggtcccctccacccgcggtggctgccgtcacctctgcctcttgcttccggaacaccccctccctccggccagtgcctcccttgctgacagcctctgctcggtctcccttccacattcttcttcctcttcctggccaatccttgtcacgtgtgccccagcccaatccgtgggctcacctggatccataggtggctaaaggccacctatgagctgaggacgccaaagcaactctcccaggccagacctcagcctggactcagggcttggcttaggcccatcaactaggaggccacacttaacagactctccggaccgggcacagtggctcacacctgtgatcccagccctttgggcggcccaggcaagaggatcacttgagcccaggagttcaagaccagcccgggcaacacagcaagaccccgtctctacaaaaaatacaaaaaactagccaggcggccgggcacagtggcttacgcctgtaatcccaccactttgggaggccgaggtgggcggatcacctgaggtcaggagttcgagaccagcctggccaacatggtgaaaccccgtctctactaaaaatacaaaaaaaaaattagccgagtatggtggtgggcacctgtaatcccagctactctggaggctgagacaggagaatcgcttgaatccaggaggcagaggttgcagtgagctgagatcatgccattgtactcaagcctgggtgacagagtgagactctgtctcaaaaaaaaaaaaaaaaaaaaactagccgggcatggtcgcatgtgcctatagtcccagctactcgggaggctgaggtgggaggatcacctgagccagagaaggtcgaggctgcagtgagctgtgatcatgccactgcactccggtctgggagacagaatgagaccatttttaaaaaaaaaaagtgggaaagcccaaattttacatgcattttgcgtcaaatttctaaagcagggagattctgaaaagtcgcccgtctggttctcaaagcagtcgcccgtcctggttctccaggatgcctgggtcagagcatgaataaccaccccgctccccacgcacggagcctcgcagtggctcgagctgagaatcaaagcggccgatccagggcctggtgactccaccagacaggaaatacagaggcttctagcaatctgctctgccatttgaaagtcctgggtttgatcctgcgcttctcaacccaacactaacaggtctgcagtgggaggaggtcgagagggagggtggcgccaagctggctgcatggccgggggactccagggtgtgagcctccagctcggctgctcccgagcagacccggccacttcctgccatgccttctgcgggagaggggagatttacaaggggcgcccttatctctactctgcatggctccagggccaaggtcaagcaccggtgtttgcgagagactcagctccccctgagctcccacagcctcatctgggaaatgggaatgatcaaggctgcaatcgcagcagattatggcagggaggatgggctcagtgcatggctctcagcaaaggcacaaggtgaatgctaactattctggggacaatgacacgtgcccacgtgccccttaggctggagcatgacttcatgtacccgcaacccaccccaccagctaaggactcacagagacaccagctcactcatctaagccctgcctccactttctcccccacccagtccctggtagtactgaggctcaaggccttcactaccttttgggtaattttttttcttttttctttttacttttttttttttttttttgagaccgagtctcactctgtcacccatgctggagtgcagcggccagtggcgcgatctcggctcactgcaagatccgcctcccgggttcatgccattctcctgcctcagcctcctaagcagctgggactacaggcgcccaccaccacgcccagctaattttttgtatttttagtagagacgggtttcaccgtgttagccaggatggtctcgatctcctgaccttatgatccacccgcctcggcctcccaaagtgctgggattacaggcgtgagccacggcgcccggccgaggccattttgatttttactttaaaggctcgccacatggacaaaggccagggggcttcacacgctcagtcaactccaggtacagaccccacctattcagggctcttcgcgtgttctggcctccctggcaaagtgctgggattacaggcgtgagccgccacgcccggcccatttggggtaatttttcttttctttgcttttctttttgagagtctcactctgtcacccaggctggagtgcagtggtgtgatctggctcactgcaacctctgcctcccgggtaaagagcaattctcctgcctcagcctcctgagtagctgggactacaggtgcctgctcccacgccccgctaatttctgtatgtttttggtagaaacagagttttaccatgttggccagactggtttccaactcctgaccttagatgatccgcacaccttggcctcccaaactgctgggattacaggagtgagccaccatgcccaaacccattttgggtaatttttcaagatcagatttattggccaagattttcaaattcatctcaagttaacgaattcttattccttaaatactaggaacggacaagaacaccgttcactccacagcacaattcagcataaattcatgttgtgcttggctctggaaatgccatgggccctggacactgtctggtgtggagctctcccaggcctgttgttccacctcctccccgctctgggatgggtcctgctcctagtcccaaggaccatcacctcccaggagtctgtggtccccctcctgagccgacctctcctgtctcctccatcctgtgccctgaagtccatctgggatgcccagggaggctgctccctctcccgggtgaaacccctcggcactgttgcccaccttccttgtctgccccatcttccctactccctcccacctcccattgtgccctggaccctctgaaccgactgctctctgaaacgactgctctctgaaccgactgctctctgacatacttccaagtctctggggtttcttcacatggtacttactgacccagaaagcatctgccttgccaggcgtggtgacttatgccttgtaatcccagaacttcgggaggctgaggcaggtgaatcacctgaggtcaggagttcaagaccagcctggccaatactgcaaaaccccgtctctactaaaaatacaaaaaaattagccaggtgtggtggtgcacacctgtagtcccagctgctcgggaggctgaggtgggagaatcgcttgaacccaggaggcaggggttgcaatgaaccaagatcgcgccactgcactccagcctgggtgtgtagaatgagactctgtctcaaaaaaaaaaaaagaaaaaaaaaaaaaaagcaaagatggaggccaagggtggtggctcacacctgtaatcccagcaccagcactttgggaggccgagatggaggatcacttaagcccaggagttcaagaccagtctgggcaacatagtgagaccttgtctgtacacaattttaaaaatatatatatagccaggcatgatggcatatgcctgtagtcccagctacttgataggctgaggtaggaggattaattgagcccaggagattgaggatgaagtgagctatgatggcaccactgcactccagcttggatgacagagcgagaccctgtctcaaaaataaataaataaataaaatttaaattaaaaaaaaaaaaggaattgcattgcaaagtcaggtcagaaaggcctgggttcgaatcctgcctcccccacctactggctctgctgagtggcaacaatgatgcacctggcagggtcctgagacgatttcacaggatgactcatagtagggccaggcagtcactcaaacactatcaggaataaagacactaagctcagacatccgcctcctgcacccccagctcctctagatgccgctctccccagagccccgagaccgacgtggcacgctgcgaggccccgccccagcctctgcactcctggagggcaggccagccaccgaactccacgcgaacgccccagttccctccgccagcttccagcagaggcccgagaggtccccgcggccccctcacctgaggtccctcagccgcttgcagtgcttcaacatgtctgagagcgcgggcatgtacaccaccttccccatcatgcccaggttggccagcgacagggaccgcaactgctggcactgcaggccgatattgaccagcccggagcccgtaaggacgctgggcagctgtgcgagcgtcaggtgccgcaggaaggccagctggccgatggcggccacctccgagtccccgacactctgtgcgcggctgcagggtgggagcgagttgcggatggcgggctcgttgcggggcatggcggaggagaagttggacccaatcagctcgaggtgttccaggaagggcaggttcttcagcagagaccagaacacggaggagggctgggggcacgcctggcccgagaaggggctgggacaggactgcacgcccacacgcactttcttgccaaagccgcgcggcactgcgtgcatggccggctgggcgggcgcgcggtcggcgcgcggcgcggagtcagcgacagagcagacaggcagggagagggagcgcaggtgacgcagccgggccaggagctggcagaggtggcggcccaggccctccgagctgtggtggtgggcggccgagaggttcaggtggcgcaggttgcagcaggacgccaccagagtctccaggatgctgctgtcgatgtcgtcctccgccttgcggagcagcgagtctggggacaggcagtggacgcagccgctgaggttcaagctggccaggctccgcaggtccttcccgccgttgatgacctgctggatcagatggccgcctgacagggtacagcggctgaaactgaagtagaacgggttgttgaatttcatgtgctgcaggagggaagagccgttcagccaggacttgggcagctgcagggcatccagcacgacattgcgcgccatggagtccaggaggttcttggtggcgccgctctccgcgaagctgccagggacggagatgaggaaggcgtggaggttctgaggagtgcggtcgctaagcacagccaggtagagccgcaccacctcctggttgatgtagccgggggccaggcgcgcatagaagacccgcaggttctggtagtgcggcacgttgctctggcccaccataagctggcccgagaggatggcgccctcgcgcgtgcggtccagaatctcgaagtagagcagcagcttctctaggctggtgcagcagggcaccacgccgtaggagggagtgaacagcgtctgcttgagctcccgcacgcggctcagggtggccttgcactcgctgctcagctggctggcgtcgaagccggggctcacgtcgatggccagcgagcgcaggtgctgcagggccgagagcatcttggagaggcgcagggaagtgaggtggcagcccgagaggttcaccttcaccaggctgcggcagcgggccacgtgttccacggtggagccaggcagccagtagcagccagccatgctcagctgctggatctcccggccgatctccttcaccagctgcctcactttgtcctcgctcgcctgcgggacagaggcagggtggggagaggaaggaaagggctgaaggcacctacgggtctccaaccctcagtgcgcacactcccccttgcagcagctgctccaccgggagggaagctccccacctctcgctgcctacctgcccgcactctgacctggagccaagagtccccagctaagtgggactggtagaggggtgcagccacggtagaaaacggtttggcaggtgggcacggtggctcatgcctgtcatcccagcacttggggaagccaaggcagatggatcacctgaggtcaggagttcgagaccagcctggccaacatggtgaagcccgatctcaactgaaaatacaaaaactagtcaggcatggtggtgtgcgccttttatcccagctactccagaggcgaaggcagaagaatcgcttgaacctgggaggtggaggttgcaattagccaagatcttgccactacactccagcctgggcaacagaaagagactctgtctcaaaaagaaaaaaaaggccgggcccggtggctcacgcctggaatcccagcactttgggaggccaacgaaggcagatcacctgaggtcaggaggtcgagaccatcctggccaacatggtgaaacctcatctctactaaaaatacaaaaattagctgggtgtggtggcaggcacctgtaagccaagctactggggaggaggcaggagaatcgcttgaacctgggaggcagaggttgcagtgagccaagatggcaccattgcactccaacctggtgacagagcaagactccatctcaaaaaagaaaaaaaaaaaaaaacggtttggtggtggttcctcaaaaagctaaacatagggctaccacatgagccagcaacttcactcctagggacagacccaaaggaactgaaaactgagactcagcctccctactctgtgcctgttcactgcaacagattcacaagaagccacaggtacaaacagccccagtgtccatcaacaggtggatggatgaatcagatgccaactgtccacacggggaaatgtgatccagccacaaaggggaagggaggccgggcgcttcagcgcatgcctgtaatcccgcactttggaaggccaaggcagacagatcagttaatctcaagggatggagaccagcttgggaaacatagcgagaccccatatctaccaaaaagaaaaaatatattagccaggcgtagtggcgcacacctgtggtcccatctacttgggaggctgaggcaggaggatggcttgagcctgggaggtggacgttgcagtgagctatcatcgagccaccacgcccagcctgtttctgttttttgagacaaggtctcattctgttgtccaggctggagcacagtggtacaacaatagcttactgcagccttgatgtcccggggttcaagagatcctcccacctcagcctcctgagtagctggaactacagacatgtgccaccatgccatgctcatttttctcttttttttttttgtacagatggagtttcaccaagttgtccaggcgggtcttgaaatcctgagttcatgtgatccacctgcctcagcctcccaaaatgctggcattataggcatgagccaccagacccggccaaaaaattaaattaaaaaaatgctccaggccaggcacagtggctcatgcctgtaatcccagcactttgggaggctgaaatgggcggatcacgaggtcaggagtttgagaccagcctgatcaacatggtgaaacctcgtctctactagaaatacaaaaattagccagatgtggtggcaggcgcctgtaatcccagctactcagaaggctggggcaggaaaaacgcttgaacccaggaggtggaggttgcagtgagctgagatagtaccactgcactctagcctgggcaacagagtgagacctcgtttcaaaaaaaaaaaaaaatgctctggatgtacaccgagaggcactggctagaggcgccgagcccttcctctgcagagaacaaagcttcatggagaggaggcctggaggcctgataccagcgttgcagggagcacactcagctccctcatccactgaagaccctccagcagaaagagctaaagcttgccaggcacaatgggtcacacctgtaatcccagcactttgtgaggccgagttgggtggatcacttgaggtcaggagttcaagaccagcctggccaacatgatgaaaccctgcctctgctaaaaatacaaaaattagctgggcatggtggtgggcacctgtaatcccagctacttaggaggctgacccaggagaatcatttaaatctgggagacagaagttgcagtgagccgggatcgtgccactgcactccagcctggggattctcgtgcctcagcctcctaagtagctgggattacaggctcccaccaccatgcccagctaattttttgtattttttgtagagacagggtttcaccatgttggccaggctggtctcgaactactgacctcaggtgatccacccacctcagcctcccaaagtgctgggattacaggcgtgaaccaccgcacctggccttatttttatctttaagattcattaccaggccgggtgtggtggttcacgcctgtaatcccagcactttgggatgtcgaggcgggcagatcacgaggtcaggagatcgagaccatcctggctaacacagtgaaaccccgtctctactaaaaatacaaaaaaattagcccggcgtggtggcgggcgcctgtagtcccaggtactcgggaggctgaggcaggagaatggtgtgaacccgggaggcagagcttgcagtgagccgagatcatgccactgcactctagcctgggcaaaagaacgagactccatctcaaaaaaaaaaaaaaaaaaaaaaaaaaaaaaaaaaagaatggctaaaacttaaaaaactgacagtaccaagtgttgacaaggctgcagagcaattggaactcctgcaccctgctggggggtgcaaaatggtgccctcccactgcaccactggagagccacatatttaactttacaacaaacaagacccagcaattccactcctagcgatccacaagaaagcacatctccaacccctctcccccactcccaaggccctaggttccctcccagaaccatgtccacatacatctgcaccctcctccccaggcagcacaccacccatgcttttctgccccttgcttctgtccctcaatgcatcctgcagacggcgccagtcaggacttggagttcctgccacctttatatcagcacacagggttccactgcagggctgtgcccagtcctcaaagactgagatctagcttgtttctcatctcctgcccccacgcctgctcacctgatagtccttttgcagcaacacggtgtggatgaggctcttgtcaaggcacagggctgcaagcttccgacaggtacgccggacgttcagaatcagatctgtgctggggacgtgactcaggatgtgaaggaggatctcatcagagaaccctaggaggtggaccccgtctgccatcccggctgctgcagggtgcatgtcatcatcatcattggatatgtcctgaaaataagggggacaccattcccacaggatccccaaggatggctgtcagcctagcctgcagctaggcagagaagcaaagagaagcccttatccatgggaaagaaggtgtttttactaaaactctcaactgaatgacaaagaattcacgaaatccttcaaaactccattatagagctgtaagccagggtctcccttcaaaaatgaaagattacaaaaaaagatcatcatgtgtttatttcttttgttgtgagacagaagtttcactattgttgtccaggctggagtcaatggcgtgatctcggctcactgcaacctccgcctcccaggctcaagagattctcctgcctcagcctcccaagcagctgggactacagacgcatgccactttgtccagctaatttttttggttttttgtagagacggggtttccctatgttgctcaggctgatttcaaactcctgggcaagtgatcctcctgccttggcctcccaaagggtgttttgttataatagagacagggtcttgctatgctgcccaggctggtcttgaactcctgggctccagcctcccaaagggctgggatggcaggtgtgagccaccatgcccggcctcttttttttttctttttttttttagacaaggtcttgctttgtcacccagggtggagtgcagtggcgcaatctcggttcactgcaacctccgcctcccgggttgaagcagttctcctggctcagcctcccaagtacgtgggattacaggcgactgccaccacgcccacgcccggctaatttttgtatttttagtagagacggggtttcaccatgttggccaatcaggttgcaaattcctgacctcaagtgattcatccgcctcagtctcccaaagtgttgggattgcaggtgtgagccaccatgcccggctttttttttttttttcttttggagaaagagtctcactctgtggcccaggctggagtgcaatggtgcgatcttggttcactgcaacctccacctcgcaggttcaggagattttcgtgcctcagcctcctgagtacctgggattaaaggcatgtgccaccgtgcccagctaatttttgtgtttttagtaaagacggggttttgccctgttggtcaggctggtcttgaactcctggcttcgagtgatctgccctccacaacgctagcctttcaggcaagagccctgcacctggccatgcacacttccttttccattgctgtagttcatatctggcaaattacaaggtgttcttccctaatgtgggcctgagtcaaaatgcctgatgcctttttggtttatacgatgaagagggagaagagctggacctaatgagacatgaagtccccagatcggggacaaaggaaggcagaaggctttaccaaggggagcctctcagagcagctgatctctgtaaagaccacgccgaggagagagtgcccggaatcatctccactacatcatctttctggggactgtgtctacacgaccctctggctccagcctgctcctgcttcctgtacatatttgcctggatggaagctctgagttttgcaaagccaggctgctaccatggcaaccgtgaaggccatggaggaagagcctatctgcacaccccacacgggtatcggaggtttcctgggaactctgactgcgacagtcctttcaccctctccagacaggattcccatcctgctaagccctcgccaggccctagacaggtgtgctggaatgtgtcccacctttcttccctgggaacaaagaagtaccctccatcctccaaaagagaaagccacacggaaaccaaaggacatggcccgtaaggacccatgaggctcatgagggtcagaggttagacacttacttctaccttccctcctaatattttaataattagcagaacaaggccgggcatggtgacccacacctgtaatcccagcagtttgggaggccgaggcggggaaatcacaaggtcaagagatcgagaccagcctggccaacatggtgaaaccccgtctctactaaaaatacaaaaattaccggggcatggtggcaggcgcttgtagtcccagctactcaggaggctgaggcaggagaatcgcttgaaccccggaggcagagattgcagggagccaagatcacaccactgcactccagcctgggcaacagagcaagacactgtctcaaaagaaaattagcaagacaggctgggcacagtggctcacacctgtaatcccagcattttgggaggctgaggagggcagatcacgaggtcagttctcgagaccagcctggccaacatggtgaaaccctgtctctactaaaaatacaaaaattaggccagacgtggtggctcacgcctgtaatcccagcactttgggaggccaaggcaggcggatcacgaagtcagttctcgagactagcctggccaacatagtgaaaccccatctctactaaaaatacaaaaactagccaggcgtggtggcatatgcctatagtcccagctactcgggaggccaaggcagaagaatcacttgaaaccgggatgtggaggttgcagtgagctgagatcgcgccactgcactccagcctggtgacagagcaagactccatctcaaaaaaaaaaaaagaaagaaaaaaatacaaaaattatctgggcctggtggcgggcacctgtaatcccagctactcaggaggctgagcagaattacttgaacccaggaggcagaggttgcggtaagccgagatcgcaccattgcatccagcctgggcaacagagcgagactttgtctaaaaaaaaaaaaaaaaaaattagtgggacacagtggcatgtgcctgttgtcccagctactcaagaggctgaggtgggaggatcgcttcagctcaggaggttgaggctgcagtgagctaggatcttgccactgcactccagcctggatgacagagagagaccttgtctcaaaaaaaaaaaaagataaataaataaaaatcagattcctggaacccaccccagacttgtggggcccaatcccaaaagacagactcccaaatcagggacaacctttatcagaaccagagacaaacttgatcagaatcagagacaatctttatcagaaccagggacagtccttatcaaggaatgaactgtacccctcccaattcccagtttgcagatttatgaaagaatgccatcacagagctcacgtggtaagaatgagaacttagggcaaaacactattaaaaactccagcactgggccagacgctgtaatgctgtgctcacgcctgtaaaaccagcacattcagaggctgagatgggtggatcacctgaggtcaggagtttgagacaggcctcggcaacatgatgaaaccccatctccactaaaaatacaaaacttagccgggtgtggtggcacacgcctatagtcccagctactcaggaggctgaggcagaagaatcgcttgaacccgggaggtgaaggttgcagtgagccgagatcgcaccactgcactccagcctgggtgacagagtgagactctgtctcaaaaaaaaaaaaaaaaaatccagcatcatatagattccacagttacacgaccacactgaatttttcttaaaacctcatagaaattacaataattttttttaaaaagagagggagagacagcaggccaggaattaagttccagctctctccatccagccacagcaaattccacaacatcattttttccacatgctgtgctccaaataaaacagaaattttggacaggcgcggtggctcacgcccgtaatccccagcactttgggaggccaaagcgggtggatcacgaggtcaggagttcgagaccagcctggccaatatggtgaaaccccatgtctactaaaaacacaaaaattagccaggcgtggtggtgggctactgtccacagcaactatccagcaactcggggggctgaggcagaagaatcgcttgaacctgggaggtggagtttgcagtgagctcagattgtgccactgcactccagcctgggtgacagagtgagattccatctcaaaaaaaaaaaaaaaaaagagaagtttcatctcaggccagacccctgatgcaattgtggggccagcacccaacctggtggggcaggtatctgaggggtgatgcccagacaagacgagaaactggcccaggaagcagctcgaatgggcccccacccccactctccatctccggccagaggaccctaggaggcagctgctgggcgggcgagttgagtcatttccctggaacttagcttccggagacaactttgttaagttaaggcaccttgcaccaaaaaaggtggcaagctctggagaggaaacaaaaaccagggtgcaggaagggcgcggtagctcatgcgtgtaattccagcactttgggaggctgaggcaggcagatcacttgacgtcaggagttcgagactagcctggccaacatggtgaaaccccatctcgactaaaaatacaaaaattagctgggcgtggtggcaggcgcctgtaatgccatctactcaggaggctgaggcaaggagaattgcttgaaccgaggaggtggaggttgcagtgagccaagatcgcaccactgcactccagcctgggcgaaagagtaagactctgtctcaaaaaaaaaaaaaaaaaaagaaaagaaaaaaaaacccaagttgcagcctgggcaatgtggcaaaacctcgtctctacaaaaaaattaaaaaattagttgagccaggcacggtggctcacgcctgtaatcccagcactttgggaggccaaagcaggcagatcacgaggtcaggagttcgagaccagcctgaccaacacggtgaaaccccgtttccactaaaaatacaaaaattagccaggcatggtggcacgtgcctatagtcagtcccagctattcaagaggcagaagtgggaggatcacctgaacccgggaagtggtggcttcagtgagccatgatcgcgccactgcactccagcctgggcaacagagtgagatcctgtctccaaaaaaaaaaaaaaaaaaatctaggtaactggctggaggtcaaaggccaagtaatgcctcccacagggcctggactcctaagcccagaacctcccttccctccaccaccaggaaagggcagctgaggcttccagacaggtcccaaccaggcacctcattcctggggtctcctgaaattccaattctggtgtgagtggcaggccctggaatgtgcttaccaggcacactaggaaccaccggctataatgacaacttgaaagtggtttaaagagtttagttattcgctaaactctgtgttttatgtacttttcagaatatgtaacatttcacagttttttcaaaacccttcctttgtagagatggagttttgccatgttgcccaggctggtctcaaactcctgagctcaagtgatctgtgcctggcctagtttttttcaaaagtgaagcaaaagtaagatctgaaatcttggctgggcatggtggctcacgcctgtaatcccagcactctgggaagccaaggcaggtggattatgaagtcaggagatcgagaccatcctggctaacacggtgaaaccccgtctctactaaaaatacaaaaaaattagccaggggccgggcgcagtggctcacgcctgtaatctcagcactatgggaggccaaggtgggcggatcacctgaggtcagtagttcaagactggcctgaccaacatggagaaaccccgtctctactaaaaatacaaaaaaaaaatgtattttttttacaaaaatacaaatgcggacgtagtggcacgcgcctgtaatcccagctacttgggaggctgaggcaggagaatcgcttgaacctgggaagcagaggttgcagtgagccgagatcgtgccatggcactccagcctgggcaaaaaggtgaaactccgtctcaaaaaaaaaaaaatcagccaggtgtggtggtgggcgcctgtagtcccagctacttgagaggccgaggcagaagaatggtgtgaacctgagaggtggagcttgcagtgagccgagatcgcgccactgcactccaacctgggcgacagagcgagactccatctcaaaaaaaaaaaaaaggatctgaaatcttattacctgccaaaaaacatctcctacctagaaccctaacctgggctgggcgcaggggctcacacctgtaatcccagcaatttgggaggccagcctgagcaacacagtcacacctcatctctaaaaaaattttaaaaagagaaataaaaataaagaatgggccgggcacagtggctcacgcctgtaatctcagcactttgggaggccgaagagggtggatcacgaggtcaggagattgagaccatcctggctaacacggtgaaaccccgtctctagtaaaaaaaaaaaaaaaaccaaaaaattagctgggcgtggtggcgggcgcccgtagtcccagctactcgggaggctgaggcagaagaatggcatgaacccgggaggcggagcttgcaatgagccgagatcacgccactgcactccaccctgggcaacagagcgagactccgtctcaaaaaaaaaaaagaaaaagaaaaagaggcactgaaccatgtgaagtgttatttaaaaaaaaaaaaaaaaaaaaaaaaaagcagagtccagctgggtgctgtggctcacgcctgtaatcccaacactttgggaagccaaggcgggtggatcacctgaggtcaggagttcgagaacagcctggccaacatggcgaaaccctgtctctactgaaaatacaaaaattagccaggtgtggtgatgcacacgtgtaaccccagctacttggaaggctgagaaggggaatcgcttgagcaggggaggcggaggttgcagatcacaccgctgcactacagcctgggcgacagagcgagactctgtctcaaaaacaaagaacaaacaaacaaggaacagagggggctttaagctgtaattctgtaagaccaaggtaccaggaccccccttcttccctgaccccaagcacacacagctaactggaatcttcatttcaatcttatcaatctgcagttgagccacacaccgttccttgtcaatcaagaagccactggggtcatttctaggccgcattcacttcaaatgtagaagggcggtgagcacagcgacccccagccatctccagagaccctgccccatcactctgaggaagacacttgagcctctcactcttgctccctagaacccaggcaagctcctaaatctgcgaagtgcacccaacgatctgagacctgaaaggtgacagataccaacccaggtgcccatacagataggcaggaagcatcaacgggaagccactagtcagagtctagagtccccgctgcacccctttctgcagagacaatactttgcaccacattacagggacgcggcgggcttctccatcggacccagatttggggagtgttgggaaagaattccagggtacgtcgtaagtccctcaggtgaaatggcttttcctccatcacccaccccccacgtcattcagcaagcaggctccagggagaagtgggctggggctgaaactgagcatccagagatagaagatggagtgggacgtgggcacggagggggaatgtcccagggctgcaggggcccagccaaggaaccggggcactgagaaaggggtctcggaggagcctggaccctcaggggacggagagacggggacaactctggcgatcaggaatgcacgagcgaagggggagacagcttgtgccttccgagacagggtaggagtcttggggacaggatgcgggaaggacgggagcaggggcaaggccagggtcaggatgggaaggacggggcggggtaggggtcgggatagaaaggatgcaagggaacccgggtcgggatggaagaacccagggagaccgaggccgccgaggcagaagcagagcggagacagtcgcggacagtacctctccggagctggccatgtcgccggcgggtccgaaccgcggccgcgggatccgcaaccccgtgcctcccacctgcccggctagggatgctcgaagccggcgcgtccaccgctcaaccgagaccccggcaaggagcgggctctcgtcacttccggcgcccgcctacacgcacttccgttcgtccgcaggcgggccctaggcggccgccatgttgaatgtggctccgcccggggagctgctggagtacgagggagccaagaagggctccaaggacctctgcctcttctctgagctcgttcttaggcccctctgccgtctgcacgctcctttccagccacccggcctcccgatgccggcctagcacgttcctcgcgccaggcttttgcatctgcccttcccactgtctttcgtgtgcaaacgccacaggtcctgcgcaccgcacccctcatggaatagcgtcgcctcctctctaccttcacacacgccccgaaacttgcctctcatcctgtgtctctatagatttttgcaccatctgaccgacggtatctttttttttttatcctcctctaataaactgtaagcagggacaggatttcccaatacctgaaactatccctggaatgtgatagacactgactgaatacatatttgctaagtaaacatgaatgtatgcaccctcatacttaagcgtttgcgttttaaaataattagacccggccgggcttggtggctcatgccagtaaccccagcactttgggaggccgaggcgggcggatcgcctgaggtcaggagtttgagactagcccggccaacatggtaaaaccccgtctctactaaaaatacaaaaattgctgggcgtggtggcgcacgcctgtagtcccagctattcgggaggctgaggcaggagaagtgcttgaacccgggagacggaggttgcagtagctgagatctggccactgcactccagatggagcaacagagtgagactccgtctcaaaataaatacatacatacatacatacatacatacatacatacatacatacttagagccgacaggatggctcacgcctgtaattccagcatttcaggaggcccaagcgggaggatcccttgaggccagtcgttccagaccagcctgggcaacacagcaagaacccccaggccctctacaaaaaataaacatttcctggagactgagggggaggatcgcttgagcccaggagttccaggctgcagtgagctgagattgcgccactccactccagcctggatgacagagcaagactcttgtctcctcaacaaataaatacataaaaatattttactaataaaaatccctggggaaagttcattctctggaatcaaaagaactgggtttgaggccaagcacagtggctcacgcctgtaatcccagcactttgggaggctgaggcaggaggatcgcttgagcccaggagtttgagaccagcctgggcaacacagcaagacttctttctacaaaaaaataagacgaagaaagaaaaaaaaaaaaggccaggcgcagtggctcatgcctgtaatcccagcactttgggaggccgaggcaggtgaatcacctgaggtcaggagt

SEQ ID NO: 200 - DNA, 53565 bp, Homo sapiens
  source 1..53565: mol_type = genomic DNA
gtctccgccacccctagctaagattgctagtgttctgcttctggaaaagcagaagccgagctaggcgcggtgactcacgcctataatcccagcactttgggaagcctaggagggcagatcgcctgaggtcgggagttcgagaccaacctgaccaacatgtagaaacctggtctctactaaaaatataaaattagctgggtgtggtgctgcatgcctgtaatcccagctactcgggaggctgaggcaggagaatcacttgaacgtgggaggcggagtttgcggcgagctgagatagcgccattgtactccagcctgagcaacaagagtcaaactccgtctgaaaaaaaaaaagcagaggcccaggaagggaggcagggcactgggagtgccttctgtgtcccctagatggattctgtggccttctgtggagctgctgatgtgataaagtatggctttctctgtggcatgcttagttcaagcagacactaaactcctgggaatcaatggaagtctcactggataagaaacctaaatgccagcctgactctaccacttcctacacag[450 bp omitted]tacaggaaacaagttgcagtcccctacgttgggaaagctcagcagagctgacttcccgcaggccctgagcctccaggtccccgtggacagcctggggagggtctccagggccagcctggccatcccaccaggagatctgcagctgtgtggctcctccatgaggcccactttctatctgctaattgcacactctcacccccgtctcacccactctgaccagctcctttctgcagcccctggtgcagctcccttgcatgtggctgagcagcaaaaactgaggttgcagagggtctccttctgcctatgctgtatgcagccccactgtgtcccatgatcccaccacgacccacaacaggacatgcgcccggtccctaaacacagcactggctgccacaggccacaggccggcgtgcaaagaatgctatacagcccgtctctggagtctggagcagagggctaatggacatcacactccaaagcacatgaagaatattaattaaatgaaggttttatttcaaaattagtcttaagagtataagctgtttttgagggctgtagccagactacataatgagcggtgaaagcggctgccttcccctctcctgacaccagcaagggggaggcaccatcaccggccctgccccatcatgcatccaatgattactagcactagaagccaacggcaaaggaccccgcgcgcttgctcgtgtttaatccaggttaagctatacacgtttaaatacatgtcggaggttacatggtctcatgcagtccctgtgatggaatgactcttgctcagtgacctcctgcagcgaggctgctccaaagggcaaggttaggtagggcagagcactgcaacgagaagagaggaggggagagcggtcagaacacagttgcaggtggggacctccgagccctggatagccctagctgagagcagtcacaccagctcctgagtggtgacagcccccacttagtgcctagaataagggagagacaatggcaggtggttgctggttataataactaagcgtgtagtctccggggcctgagttcaaatcctggatccagccattactaactacatgaccttagggaaattaacttcacctttccatgcttgtttcttcatcaatacaatagaacgtacctgcgcctaccccgcagggttgttgagaggcatgtggcaagtgctgagtaaatattaatcacttgtacaaattcagtgacaactcagtggctcgtgaggggtaaagtccagccctccgactaccaaatttatataacctgtttctataatcctcctttgagaacctcctttgagaaatgtgctgctcttttaaaatctttgagtcacaaaccctttctgtggttttttgtgttttgttgttgttgttgttgttgttttgttttgtggtttgtttgtttgtttttttgagacagggtcttgctgtgtcacccaggctggatgcagtggtgtgatcacagcccccactgcagtctcagctcctgggttcaagtgatcctctcacctcagcctcctgagtagttgggactacaggcgcgcaccactacacctggctgattttttttttaattgagacgcggtctcaccatgttgcccaggctggacaagttatttttaatgtttactctaagttcctcctgctgaaatttaagattagtccttctgatccttatagaaacaatatatctcaggatttcttagctataggtcccacaaatatggtccctctgcaaccgtacatagttttgtgtgcatgcaggacaaaaaacaataaaataatagatctagacagtgagcaatcctcaaggactattaacatcacaaaaggaaagacaatcagacaatatatgtcaccccatggaagtctggaaacctataaccacctataatgtagtgcttatcaaaaaatcggaagctgtatctgatcaggcttccagttctatcagttcacaggcaataaagaagacaggagaacatattaaattacaccatggggatgaaattagcaaaaatccacaatgaggaaattctatggcacaaacaacctagtttctccaacaaatgcatttcaagaaatggaagagagaaagaaaaggggaacctatatacatcaaagagatgtaagagacatattattatctaattgcaacctactgatctttattggcccctgattcaaacaaataaactgaaaaatactttatgggaaaaacagggaatactgattggatagtcagtactaagaaactcttggctgggcacagtggctcattcctgtaatcccagcactttgggaggccaaggcgagtggatcacctgaagtcaggagtttgagaccaccctggccaacatggtgaaaccccgtctctactaaaaatacaaaaattagttgagcatggtggcaggcgcctgtaatcccagctacttaggaggctgaggcaggagaattgcttgaatccaggaggcggaggttgtagtgagctgagatcacgccattgcactccagactgggtgacagagcgagattccatctcaaaaaaaaaaaaaaagaaagaaactcttcatttgttttagttgtgaaatggtattatggctatgttttcctcaagagttcctatgttttagaaatgcataccgaaatagttatgcatgaaaactatgacagagatttgctttaaaataacatgggaggggagaagttgggtagaggcgtaaatgaaataagcctggccgggacttaataactgttgatgccagctcatcagtacctgagagtgtattatgccatttcctctactcttgtatgtacaaccagtttccataagacaaggttaaaaagttatgaaagggtgtagtcaattatgtctccagcttcctttcaagtgcttgaaaagtattaaattatcatcaggttttgtttttcccaactaaatactaagtagcccaaactctgcagaattttcacaataagtcctttgttggtttgttgctccaaggaaagtcactggtgactcgggggtgatggaatctcctcctgcggcctcctggcaacacccaaagggaaaacctattactccaaagcctttcaattgtccctgatttccctggcccctgcctggtctggtctggcatgggcaagctgggaaggttccctaactggagcaggagctccagagaaccccttctgctccaggaggcctggggctgctcttaccttttaaaatgtagtccgttagcaaagtaggcaccttctcattatcctccttcatggcaaagagaactaggaaaggagacagagagaggaactaagataccatctggtcagaggttcacttctagggccacatgacccaccagcccagagtgagagagaaatgattcaaaagaaccagacatttattgagtattgagcaaaagtctagaaggctctatcaggggtcagcatttcaggggcaagggctaaaaaactacctatccggtactatgttcactacctgggtgacaggtttagtttcagttgtaacccagaccttgagcccaggcattcaagaccagcctgggcaatatggcagaacctcatttctaattaaaaaaaaaaaagatagctgggtgtggtggcacacgcctgtagtccaaagtacttgagaggcatcacgcaatatgcccccgtaacaaacctgcacatggtgatagacgagaacacagcaagagccacagtgtttgtctctaggtagtggacctactggtgactttcttttcttttttatttttgagacaggatctcgccctgccacacaggctgaagtgcagtggcgtgttctcagctcactacagcctcaaactcctgggttcaagtaatcctccccctctcagcctcccaagtagctgagacttacaggcacgtgccactatgcccagctaattttttttttttttttagtaaagatgaggttttgccatgttgcccaggctggtcttgaactcctgggctcaagcaatcttccccacttggcctcccaaagtgacctgtgatcatgccactgcactccaacctgggcaacagagtgagactctgtctcaaaaacaagaaaaagaccatcctggacaacatagcaagactttgtctctataaaaaaaaaaaaaaaaaaaaaaaaaagaagaagaggaagaaaagaaaaataagagagagctatatgtacaagacatagttatcagtgaagaaaggttacagaacatttattaactttataattaaatgctaatgttcatagaaaaaaaatctagaacaataatacatgaaactgttaagtagttatctctgagtgtaagacaataggggatgttcttttctatgctgcatttctgtggggtctggcttttctcaatgagcatgtattacttttgtaagccaagaaaacactaaagatcaactggcactgatagctagggtcagaaggcagctgcaacagtgggattgccacttcatttcgatatccttgtcctcctttgattgattaccttgactagtttcaagacagggtaatgaaacttgaatccaagaattaggagtgagtgaggaagaaaatccaatggtggcgtgagtcagcagccaggtccagaaaaagagactcaacctgaggccattgaggggttggtttgtttctgttttatttcttctgtatctttagacatgtattcatctcagcttaagtggattctagggggtcctggtttcttctgggtttttttttttttttgagacggagtttcactcttgtcatccaggctggagtgcagtggtgcgatctcagctcactgcaacctccgcctcccgggttcaagcgattctcctgcctcagcctcccaagtagctgggattacaggcgtgcaccaccacatctggctaattttttgtatttttagtagagatgggggtttcaccatgttggccaggctggtctcaaactcctgacctcaggtgatccacccgcctcggcctcccaaagtgctgggattacaggcgtgagccaccatactcggcctgttttatttttttctgcatttttagacatgccttcatttcagcttagttgtcaagaacactttgcaactgagcataagcagactaaatgccacaccacgaagatcacgtaaaaatacaataattgctcttgccaatacgtatctaaattaatctccaaaatctaaaatttacaaggattggctagtcgcaggagctggtctttggcctatgtacttagttcaaagagtagaagagagaagaggcattgttcacaaattcatatgaggatctgccaaaaaagagaggcttcataacctacaggagaattggtattcagaaaagatggcaggttttttttctaaaagcaataaaatgttggaaggtagtatatccacatgatagaagagatagccataaaaagaacattaacaaagtgttaactaatgtgactaaaatcatgacacaaaattttacagccagtataatctcaactatatagaaaagatacaaaatattaagtctgaaaagcaccaaaatggtaaccatagtggagtagacaatgagttatttatttttctttgtttgcttttccttatttccaaagtagtctaaatgatggatatactctagctataatttttttaatgaacttaaaaaatgtaaacaaaaccactcaaaatagaaaaaagtctgtttcttaattaaaatgaaaagatttcacactgaattcctgaatgggtatctgcaacaaattaatagctatttatttttttgagctatgatagaatactttacatatatcaaccttcataatttgtccaaattactttccaaatgtaacttgtgtgaaaacacaaacatctataaatgtcagttcatctctattttctcccttaaaaaaaaagaaacttagtgcatatttatgcaaataaaggagtttacaatgagttaaggacaagtcactgtactttgattttaaaattcctgattctcaaggacacagtgtctattgatgcaggcatgatgtaggcaggatttctgtttgccagaacctcctgctttcactctccaaattgacaaaaaatgaaacgtttggtcaccttcagcaccaggccccagcaggtatccatcctcctcagctgaacagaagctcaacttcccctctccttgggtatccagtagccccgcactggccccttccctccagaacaggctgcagtgggcggggcctcgttagctgtcactctctgcagggcacggttgccaaggaaatggaatttccctcgtgatcctctgggcctgtcaccacatctcagcctaggatttttctcgtcctaagagggccaagctgacactgatggctaacaccatgtgccccccagccctttgggggtcgtactgtttgatgtatataaacagttactgtctacaaaaggctctttgttacacactgttttccctcatagttcagaatgtttattaatatttgacaatagagcaaagtggaggagaggaggcagtcacttcctggaaggaaagctggactctattttttccagtcagccttaccccacccaagaaaccttgcttctcattaaaaatacagccagacccagagaccaggcgccctgcttcaaggggcacaagtgccgaccaggcaacctcaagttgcagggagagagagaacagggaggcagaggatgccaagccttgggaactgcaggggaaaacaaaaagtcccctgcaccagcaccccaacctctttcaccagctcatttttttttcccccagcaggcctcttcccttatgggaaccaggagaaagaaaaaacagctctggttatcactgcagagtattttaattttacactgtgcgggaggatgtgacgcagtaatttggagggtattttggcccatgtaaacctgctttgaggagtctcgggcctgcggcacggaggtacaacgtacaggcaggaagggagaaaaaggagccactgatctggctgagaacaagaggaactcactgtttgtcagcatctgcaggtcttccactgagggaggagaggctttcttctcgtaaggaatgactgtgttcagatactgcaagacaaacagcatgcagggggcttgagacagaagacatgcttcctctgggttgagatttagcctttctctaagacacacactgcaaatctgaccttctctgaaacattcatggtcactggtacgtcactgtttcagaacttcttacccctctttagggaatgtctctttaaaagtaagactttcccacatttctctccatcccaacttctagattcttcctacactacaaacttctctgttatttaggaatcctggggagctttttctcctttagactgaaagcagagaataaatccaaggggattatattttcttattctttgcagtgcaatttgagaaggaattgtttgtcttttgtcaaaaaagatatgcaagagaacctcaaccccgcccagggtctctgatgtcagatttgctccctctgctggatgtcaggtgctcctacaacaaaaccagcatcagggcctagtgggctgtcaaaggagtctcaaggaagcctgaggtggtgagtgccagagctctagatcaaagctaagaagctcacttttttttttttttttgagacagagtctcgctctgtcacccaagctggagtgcagtggcttgatctcggctcactgcaacctccacctcccgggtttaagcgattctcctgcctcagcctcccaagtagctgggattacaggtgcctgccaccacacctggctagttttgtatttttagtagagatgaggtttcaccatgttggccaggctggtctcgaattcctgactttgggtgatttgcccacctcggcctcccaaagtgctgggattacaggcgtgagccaccgcgcccggccagaagctcacattttagtcttggctttgccactgacagtgtgtgtggctttggaaaaatgccttgaatctccaggccatagttctcactgccataaaacaagaggactgggatcgatgctgctaaaatctcttccccttctctagactctctagaattctagagttctagaattctagcacttagaattcagctacaaatatgtttaaaacatatacactttcatgtacactcattccaccatctcaaactttctgttcacgtgccagccatgtctattagattatacactccatgaggacaggggtcaggacttttcacctttgcacctgagggcttaacaacagagcttagcacatagcaggcgcttgataaaagttgtgaatgctgtcttaataaccagaaatgcaagctatgtcacagggaaattactgagccaacaaaaagccacagcatgggttccaaccagagctgggaagctgcagaggcagtcttagtgggaatggcttggcaggtgatccagtgtggtggaaagttaactaaactctaggatgggatctatcatcaaatggactccctcttaatgcatttcatccttaaaacaacttaattcttagacctacaagcagtgttgagttttaagtcttgcccatgtcctagaacactagagctcaaaaaaaaaaaaaaaaaaaaagtttgccttttaaaaagatattctctgttcctccttaagaggagaaaaaagtgttaggacccctaaccccctaaataaatgctgggataattctggtgagtcactgtccccctgcgttgctggggaggccaagctgcaggagtctaggaagagagcttggagcagggagactacgcgtacctgtttgtcagttcctgaggagccaaaggtctggcggatgccactctgcagaatgttggagatgccttccatgctgaagcgctgtgggggagagagactcaagaagggcaaatgcttcttgctacactgtcaccacacccagggacctctcagctaccaggctgtcccagataacgccccagggttctgtgactagacagtaagtgtaagacactggcttacagagacaggccagaattgaagcctgagctttgcaagaataaacagagtctcaagaactcttatcttagtaagtccctcagggctacaagacccctctgcatcccccagttttcctccttttatcctccatcatgcaaatagaaaaataaagcagttcagtcaaacttaaatgaaccatgatgcaaagatcttaggggaaaacaaaatgttcagctatcagaagaggctgtcttaaagcaactgtcctgatgggggaagtttttttcaaaatgtacatgcggagaactaattccataggtctgtgatagagcctagggaaaggcattttgaaaaaaactccttagataattctactgagctcccctgattaagaagcatgagtggctgggcgcagtggctcacacctgtaatcccagcactttgggaggccgaggcggggagatcacgaggtgaggagtttgagaccagcctgaccaacatggtgaaactccgtctctactaaaaatacaaaaattagccaggcgtggtggtgtgaacctgtaatcccggcgactcaggaggttgagacaggagaatcgcttgaacccgggaagcagagattgcagtgaaccgagatcgcaccactgcactccagcctgggcaacagagtgagactccatctcaccaaaaaaaaaaaaaagaaaaaaaaaatgaaccatgagaaccaggggtttgggttaaacccaaaaatagaacaatagaacaataaggcatctggggccaggcacggtggctcatgcccgtaatcccaacactttgggaggccaagatgggcaaatcacctgagatcaggagtttgagaccagcctggccaacatggtgaaaccccatctctactaaaaatacaaaaataatccaggagtggtggcatgaacctgtaatcccagctactagggaggctgagacaggagaattgcttgagcccaggaggcggaggttgcagtgagccgagatggtaccattgcactccagcctgggcaaaagagtgagactctgtctcaaaaaataataacaataataataaggcacctgatcattttcaatcactgaaacaccttagcacgccctaaagagaccagtcaggactggaacctgggacacaaggagggatttggacccagaattctgaggcccatctcaagactcccaacacgaaataccctcactccactttctttaaggtcttgcctacagagaacacaagccaaattcaattatttcctaatgtacacactgtcttcctgggttagactgtgagccctttgggggagtggaggagataggtgatatcttctccctttctgaccccctgtctgtcacagtgtgctgctcaccaccactgctcggtaaacgttgatgagtcccctgcagggttggtagggcactgaaacgggcagggttggaggttggaggcacccagtcttccacctggttgttcacctaccttgagaggcatctggtttcccttctctatccggctgctctgcaggctcagccctttctctttccgcctctttttcatcagttctcgctgctccttctgcttgttctgaacctcaataagcaccgtgataaaggagttcttcacttccttctcaaactccagctcgtcccggcgggccagctgctgcaccagctcctccgagaagtcacggatggcaccctccacctggtccagcagctcggtcagctcagacccagacatgtgcctcagccctgcaggggaagaccgtctcccgcataacacctgcatccacaccagagcccgctggggaggctcctggggccaccaccaatcaagatgggactgcccctcagaggagatcccttccaactccttaaagatccaagaaagaccttcacaatttacgagcacgccaggaaggcgggggcctgtgtactgactgcagaagagaacacccctctcaggaaacaaaggaggaagaagaaacagcccacgaggaagtctgtggactctattctcaaaaatggggatggtttgttccttctattttctatctgtgtccataagattccttgtgtgaaatgggtcaagaattggggatggaaaagtgatgggagggaggtttttgtcatccatactgaagagcaatagagacgttggtgcttattcccaagaactgatcaagatatagcatacggcaacaacaacaaaaaagccgaccatctgagcccttctttacatctctggtcctgtgtcgcagtgcatgtattcaaaaatatgtgaaacctggaagattggtgactatgcatgaaaaaataaagcctagcgggttagcatacggcagtcagctactttcaaaggaaagaaaagggaagctgagatcatgggaaatatataactttaagaagtctcctaagacttctttcatttaaaatagatttggatattttattccaaatttttctgtttacatgttatatattttcatagttgagattatacttgtatacaggtctaaatcatgctttaaaactttatacactttaggccaggagcagtggctcatgcctgtaatcccagcatattggaaggctgcgatgtgcggatcacctgaggtcaggagttcgaaaacagcctggccagcatagtgaaaccctgcctctacttaaaatacaaaattagccaggcatggtggtgcctgactataattccagctattcggcagagtgaggcaggagaaccgcttgaacctgagaggcggaggttgcagtgagcagagatcacaccactgtactctagcctgggcaacaacaagagcaaaactctatcttaaaataaaaataaataaataaataaataaataaaaactttataccctttaagcattttctgattaaaaattcttttaaacacttaaaaaaaaatttaggccaggtgcagtggctcacacctgtaatcccagcactttgagaggctgaggtgggtgggtcacctgaggccaggagttcgagaccagcctggccaacatggtgaaactgtttctactttaaaaaaaaaaaaaaaaaaaaaaaaaaatatatatatatatatatatatgtatatatacacatatatatgtatatatacacatatatgtgtatatatgtatatatatacacatatatataatttgaaaaaataaaatatacttgggaaacatcttttaaaatgtgtctccatctaatggtatctttttgcggcaggggaggaagaattaattgattgactggtttttaatttttaatttttgtgggtacatagggggtgtatgtgtttatggagcacatgagatgtttggatgcagacatgcaatgcataataatcacatcatggagaatgaggtatccactccctaaggcatttttcctttatgtcacaaacaatccaattatactcttttagttattttcaaatgtacagcgtctaatggtgtccttcactttcacctcagaatccatttccctcttcctctttgtttctgctttgcccggatatttgctgacttggttgggctttccccttattctgctctttggagctgccctctcccccttctgtttttttgccatttcactctgcatttcagctgttttcacaagtcttttgctgaacgcgtctatctttgggacctttgtgtggctgggaagggcctgacaagggcagtcgggaatgcagcgaggcagccaagtccagttcagcaccgagcagactctctgccggccacctcctgccgctgctattcaaagccaaagtctgacttgcaggatgcaggcctccagattctgcctctgctttcaccacttctaacccgcagttgacctttgaaccctgaccaacccaccttctccctcccctgtttctaagttcccatctccccatgggtggatcaactcctaggatggggccccttctgcagcgtgggcatttgataccctacggctggtgaattgttctgcctttgctgtgttacactttttcatttcatgcttcatccagccgtttcttgtgcacagtcataattactataaacctgtgtcagagagttaagaggatggcctctggagttaacctacctggcttcaaatgttagcttcaccccttatggcttctgcatggactaagcacaaatacaaattttaaatgagaggcttgattctccccgttgaaaataagggaagagacttttcctctcccccacctcccttttctttcagaatttcttctacctatccttttcaatctctcaaagatttagattaaatctttaaaataaacatatgttacatttacattaaattattgtcatggctaaaataagcctcttgtcattcttataattcaggaggctttcttcaagggcctggaggttactgctttgaaatataatcatcgggccgggcgcagtgggtcatgcctgtaatcccagcactttgggaggccgaggcagtcggatcacgaggtcaagagttcgagaccaccttggccaacatgtgaaacctcatctctactaagaatataaaaattagccaggcgtagtggtgcatgcctgtaatcccagctactcgggaggatgaggcaggagaactgcttgaacctgggaggcggaggttgcagtgagcagagatcatgccactgcactccagcctgggcaacagagcaagactctgtctcaaaaaaaagaaggaaagaaagaaaagaaaaagaaacataatcatctctcattgttctgagcagaggggcctaactcccttccgactccaaattgcaaaacctactcaatgtaatgggttccattcatccacttagctacacaagagtgagactgctttctgtctttgcagtctcttcagagagttgtctgtgatgtggctcccatcctggtttagtgcttattcaataataaaatagttttctaggccgggcatggtggctcacacctgtaatcccagcactttgggagaccgaggcaggcggataacctgaggtcaggagtttgagaacagcctggccaacgtggagaaaccccatctctactaaaaacacaaaaagtagctgggcatggtgatgcatgcctgtaatcccggctactcagggggctgaggcaggagaatcgcgtgaagctgggaggcagaggctgcagtgagccaagatcatgccactgcactctagcctgggcgacagagcgagattctatctctaaaaaataaataaataaataaaaatagtaacaaaatagttttctttctcacctgtctttgtggagaggttttctgaacaggaaggaaatctcatttctaatcatatttccctaacagtggccttggacaagtcatgtaacctctgaaagactcggttagcttgatccaaatggggttggtgtgaagatgaaatgagattaggcataggaagtcttagaataaggccaggcgcagtggctcacacttgtaatcccagcactttgggaggctgaggcaggcagatcacttgaggccaggagtttgagaccagccttgccaacatggcgaaacctcgtctctacaaaaatacacaaattagcagggcgtggtggcacgtgcctgtagtcccaactactcaggaggctgaggcttgagaatcacttcaacctgggaggtggaggttgcagtgagctaagaccatgccgctacactccagcctgggtgacagacagagagagactctgtctcaaaaaaaaaagaaagaaagtcttagaataaggtctggcacatagaaagcacttcagaaatatgagctgttactattaccttttttattcattgattttatggtagcatcattcattgcttttatatagtagttcagatttcttctgcttattctgccttagtcttgttctttggttagttttaacatttaaattttgctcgactaccttgttcttttctcaaaaatgcaaacttctctcctgatgccgagtaagaaaggtattgctgaccacctagatctgcaaggctctgctctgaggcagtcagggttctattagccatgtacaaagcacacagcccagagcctggccccgagcaggtgcttcctcctcggccagcccagcgcccagggccctcaccttcataggaccagttgttgttgaaggtctgtgtcaatgcctgcatctcctgcaggaggaccgagtctgcctgggaggaagtttctcctccatcctcttcttccagaacctcctcttcttcctcagggtctggggagttctgcatcatttcctcaatctcctcaattacctgaagaaggtacacgagagagtgctaactctgttctctgctagaggggcattctggcttgaattttgatcagttaaggatgttcctaattagctatctgaaaatttctaaagcaatattgtttttacataaatactgaataataaaaatagttccaaccaaaggcttgcatacactctttctttaatgtaaggcactctttaatgtaaaacctcttccaagagctccttttagataaatgacttattggaaataagctgctctttcaggaagcaaggcagagctgcctggaagggaacatttacttcaatgtgctgagctatttctaagtgggaaaatatttcattcacccaactttaacacaaaacccagtccattaattgacataatacacgtgactgtaaaaaatagcgtgctcctagaacaacacaaaatggggaggaaaacaactatttctccagaattcacctagacaggaactgaagctgcccagcaacaaatgaaaatagagataatgaaataatagaaggataggtggagtctagagagcagcaaatagataagaaccccagctctaatctagactattgacaggagccagctcccagaagtggagggaaaattagatatctgccaaaaggaacaaaagtgaattactagctgggcatggtgtctcatgcctgtaatcccagcactttgggaagccgaggcaggtggatcacttgagctcaggagttcaagaccagcctgagcaacatggcgaaaccccatctctgcaaaaagcagaaaaattagccagttgtggtgacgtgtgtctgtagtccatgttacttgggaggttgaggtgggaggatggcttgagcccaagaggtagaggttgcagtgaaccgagactgggccactggactccagcctgggcaatagagccagatcctgtttcaacaacaacaacaaaaaaaagagtgacttactttgtacattaattatttacaaataaagaagactgctgctgaaagcaggtctttagatgagttttgtcccaaccttcacctttgtctgttctccatggatggactaaagtccccgaggccagcattgtactctttgaggtggtttcttcacagtgggctggaccaaaggtaaggggtttcagggtctcctcctttagaataatttccattcttattcccaaaccttttcacctctactcacaaacttaggaaatacccagtctttgactactgaaagccattttacagaatgcaaccaaatgacacaagtccctgtcagggtcttatggctgaatgtccttttctctaagaggagttataattgagttcatatcattgaattgtagatcctcctacaagtcacaagaatagctattagcccctatttttaaaaatctggttctcttcagtctcctaatcctcacgtgtttcaattcccacctttctatcacagatatgaaaaagcaccattgctgctaaaaaagcactttctggcaccgaaggctgccagtggagctttgcagaaagactttgtggaaacttatgtagtgtttagctcaaaataagcacccataaatatttgttgactaaaacattaaataaggaatccagaaactgaacattatcctctctaagtaataaattattaaagctatgatgatctcaattgaatgcgaagcactctatcttttttcacaaagtcgaagtggctctaagactcctttcggaaggcccaaaattttgagtgttctatgaaatgtaagaaaatatccatcacacaaaagcctcatctgtcacttctctttttgggaaaacaggtatttgggacccttgtttgagtgtcttgactccgagtacaacgaatttcaataagaaggcttagcaggattgtagctactaaacactatgcctgtctctggctcctatcagagactgaccccaactatcccaagtgtcaagaatgacattcatgttcactgcaggtgggcaacctgaggcagaaagagagatgaaatcccttatcaaaaatactctgagttggacagtcaccgtggctcatgcctgtaatcccagcactttgggaggccaaggcgggtggactgcttgagtccaggagtttgagaccagcctgggcagcatggtgaaacctcatctccactaaaagtacagaaaattagctgggcatagtgatgcatgcctgtagtcccagctacttaggggcctgaggcgggaggatcgcttgagccaaggaggttgaggctatagtgaaccctgattttgccactgcactctggcctgggtgacaaagtgagaccctgtctcaaaatgaaaaaaaaaaaaggtcaggcacagtggctcatgcctataatcccagcactttgggaggttgaggtgggcagatcacttgaggttaggagtttgagaccagcctggccaacatggtgaaatcacatctctaccaaaaaattttttataagaattagccaggcatggtggtgcatgcctgtagtcccagctactcgggaggctgaggcaggaaagtcacttgaatccgggaggcagaggttgcaatgagccaagatcacgccactgcactccagcctgggcaacagagcaagactctgtctcaaaagtatatatatataaagaaaaaaaagaaacaaaaaatactctgagtcatgagcacaggcaccacatgaccacatatctttcttctgccttaaatggatgtggcaagtgtgttctcttggactttttctccatcaaaagaacaaaaggtcccgataacctggagagatacttatacctgatctgctgtgagcagaggctcctcgttgataccggaatcattttcactcttctcattgaactcttcctcttctttctcatggatctggagaggaggtggggagatggaattctgggtgaccatcagcagaagtgggattgcctctagtctcgagaatggatgatactgactgggaggccactccagccagctgctgtctaaacagtggagctgaagaggtgtccagagtttcatccaattccaaacatatctttgccccatcactaactccagcatgccagaaatccagcatgcagcactgaatccaacttggcaggaaaagacgacaggggaatggccagcaccattctgactcaaaggggacagcaccgttttttaacccacagacaggtcatcctggggtgaacaaggcgccttctccaggtaagtgacactgcagccaactgcagcaaaggtgccctgattttgttaaggagttccaacctggggggttgtttccagatttcgtcttactaggcattttaaggaataggttgttctagtccaaataatgatgactttcagaatttgatgaaatgccatcctgttactggaatccaggcatgatgtcatagctgatggcagatgtaagaaatctgcatgggacatgccactgaataacctgaccacatgaactaaacaacaacaaaactacaaaagagaaccccatttatctcatttgccctgtgtctctataattccataatcccaagtaagatcctcaaagttcacagccatcaaaattctagatgtttaaatctaacaagctattcaaagcatatctggcttaactgaccatatcccaaactgccatagtctggcatttacattcaagtcccacagaaaagttaatcactaaacacctaacaagctgtatgtctagaagtctgatttgaacgtcatacaaggaggaggcaggaggtgtctctaggaaatctctctgctgagtcacctctcatccaggaatgaatcctccttgcgctccagtagctggcacaccgattggccccttccctggggcttgtattctgccttttctaacaggaaacagcccagctccaatccaagcaataatgtcagaggtagtctatcctcagaaacttctcccgtcttctgtgagctttgccttggcagacatccctaacagagcacatcaccttttatctccatttgcttaaaaccaggactatgtcattaaaaaagaaaaaaaaaattaagcaaatatatctcaaatgccatccgcactcaacctagatatggggtaggacagggaggtaatggaatcatctgaagggcccgggtaccagatggtgacatctatttccgctgtcaaacccatatgctcctctctctgccaagtccaccacctgcgatagcctcgtggtttccaccgctccccactatgcagaacaaaactcctggagctacgctttgttcacaactacactcatatggaagaactttcttcaggccagaaaatcctgcagtagaagttagcccaaaattaagagaacgaagatacattttttcctccagacaaaaattaggggagaaaaaggaagaaatgtatcaatatgaacccagcccaagttagtgtgagcccaagttaggctcatcctgggaaacagggttatttttcataagcatctaacagcaactgttagtctataaccaggatttggcagggggtagggggtggtgggcactaagtctatataaaaatggcatgtttaccttttctgaaatgtggctgattgtagtgggtttaactccctgactgttaatattgcttctttcaactatatcatctcctccctccccaagttcctcactccttggggagttccaggaagaaggcagggaggaagcttctagggatagatccttcttgctgctcaaatgctaataagcctgggctgtggccggaatgatgcactagtagagtttctctcccctccccctctcaggcgcaaagcctccaggtctgaattgtcaggcttgggaaaacagagatgggaaaatcaattataagcttatgaaaggtactgtgagttcctactcttatgggaaccatactcatcccttattttcttatttctcagaagtctgccactaaaaaataaaataaaaggagaggcagacataaaatacggccaagaaaaccctggctccttccctctatgtgcgggttaccccctaatccttgggcttccccacctccatcgtgccccagcctcttcacctccctctccagcgtttgattctgatcctctcacccttcccaccctccctaggcctggttcccacattttctgtccatcctgccagactttgctctgttccaacagcatccatcacttcacaagcccttgcctctttacgggcactgtttacagactccttccctcccctccttgaccaggacagtatcttgtgcacagggtggagagctggaggggaaacaatgacagaggaagaaagaaaggtttttgaaaaatgacagcccttgtgcatataaatactcttaatcctagcataagacactgacatagatatcacggtagagagttcctttagccccttgtgcagcagtggggaagatacatgtcaaaaataacttcaggccaggtcatttagggctgaatttctttgtcagctaaaactgctagttgttaccagatgtggtggcttacacctgtaatcccagcactttgggaggccgagatgagaggattgcttgagtccaggagttcgagaccaacctgggcaacatggcaagactccgtctctaaaaaaatagaaaaattagtcaggcatgatggcacacctgtagtcccaactactcaggaggctgaggtgggaggatcaattgagccatggagatggaggctgcagtgaggctgcagtgagccgtgattatgccactgcactccagcctggatgacaaagtgagatcctgtctaaaaaaaaaaacaccttgctagctgtttggatactattgacgtgaactatgcttttccaagaaaagtcattcttccaaatgatttattcccagaattgagaagatttgaatccagaaaggggtctggctataccattcagcaagctgtttcttcctcctgcttttgggaagagtgtgtctctaggactataacatgaaagcttgaaacttgaaaagaaatgcagaaaactttccccaaggcctataacattgctaaatcttgctgcacagtgaagtattctgaatgatgattaaaattatgtggagcccttgattccaataatgactattaaccagtgtattttattaaagtgtttcaaatgaccccattcatagaaaaggtaatttttacagcatatttagccctttgcataatattttcctccccttaccactattgtttgacatgagtggttgcccccctgacaaaaattaagagaacaaagatacatttttaccttcagacaaaaagtaaaaaaaaaaaaagaaattcacaacaactgtgtcccattttttttttttttagacacaggatctcgctgtgtcacacaagctggaatgcagtggcacaatcatggctcaatgcagcctctaactcctttgctcgagtgatcctcctgcctcagcctcccaagtagctgggactacaggcaggtgccaccacacctgactaagattttttttgttttgaatttttttagagataggggtctcactgtgttgcccaggctggtctcaaactcctggcctcaagcaatcctcccacctcagcctcccgagtgggattacaggtgtgagccactgtgcctggtaactatgtcccttttatgcttatgaacaaccaggaaacatctgcgtggattaagtcaatggctgtgcattcccatagggagatgcactagggcatgcagccaacacatatttgttgaaagaattaatgaacaattgaaaaagagaggactgagagcagtactatcatctagattcagtccacttccacaggtaacttagctatttagtcacctggaaaagaggaagatgtgactgggcatggtgtctcatgcctgtaattccagcaatttgggaggccagggtgggagggtcacttgagcccagcctgggcaacatagtgaaactctgtctctacaaaaaaaatgaacaaaattagccaggcatggtggtgcacacctgtagtcccagctactcaggagatggaggtgggaggattgcttgagccagggaggtggaggctgtagtgagccatgactgttgccactgtactctagcctgggtgacatagtgagatcctgtctcaaaaatatgaaagacataattcactatcctggacttccaatttcctcttatccagacaaccactatctgctattaaataaaggttataaggtaaaaggagactgtgttttacatcacaggaatagaatagattgatgaatcgaaagccccagtaaaagtggtaaattgtgaaaaaaataataatgcctcctacagacatattaactcaagcaaattattttgacctaaaaatgtaaatgtacatttatttattcaccaagttcctagtgtaggaccaagcttacaatgaaactctgagtagagttccacagtctctcttgcatcatccacataataacttttttttttctttttttaaacagagtctcacaatatcacccaggctggagtccaatgacatgatcaaagtccactgcagcctccctttcctgggatcaggcaattcttccacctcagcctcccaagtagctaggaacataggtgcacaccaccactcatggcaaactttttcatttttttgtaaagattgagtccaatactccctctttatctttacccaggctggcttctaactcctaggctcaagtgatcttcctacttcagcctcccaaagtgctgtgcttacaggtgtgagccaccacacccagcccataacataatttttaaaatgatttcctgtttccatttctttatagtagaaggtgggtacacaggagattgggcacaaatttatcagcccttcctcctcaaaccctactaaaatgagagtcaagggatcaaaaaagaataacccaaaagggacaaagtgaacaggagaaaaggcaacagcaagagaaatgccagaaaacagacgccggcccagcaggctcagcagggttaaacttggcgagagcaggctgcccaaggtaaagggggtcacacagcagatactgaatggctcaggaattgcagaccccgaggggcagcatggcggggctatgtaaggaagatttgctggtattcttcatcaagaataatgagacccaagtgtcttcttccaacccagataaaaagggactgcatcctctcagctcaaaaggactgtagacttcactctgagcaggttgaactggaggttctggactcagagcaccaggccacctaaaagtgagggtgagggttctcaccaaaaacagagagaggatgtaagactctacagaatgactcaccagacagacctctggcctccttccctgagtaggctccaaggacactggcagctggtttattctgtccatcaagccattggagaacacctctctatggatgctataagtctacaaatacatgccaactgtcaagatctccgaacaagacgcataggtccttactggcactgtgatccagcaggaaacaagccctgaccccatagccttctagggcctcactttctttttttccaagggtttccctctgtcacctagactgaaggggagtggcttgatctcagctcactgcaacctctgcctccccggctcaagcaatcctcccacctcagcctcctgagtagttgggactactggcgcatgccaccatgcccaactaacttttgtattttttgtagagatggggaacttgccatgtttcctaggctggtctcaaactcctgagcacaagcaattcacctgcctcggcctcctaaagtgttgagattacaggcgtgagctatcaccagccattttttttaaaattaatgtttttagagacaggggcttgctctgttgcccaggctggtgtgaaatggtgtaatcatagctcactgtagcctcaaactcctaagctcaagcgattctctagcctcagcctcccaagtagctgggactacaggtgcatgccaccaggcccagctaatgcttttttttttttttttaattttttgtagagacagggtcttactgtgttggccaggctggtattgaaaattctgggctcaagtgatcctcctgccttggcctcccaagtagttgggactgcaagtgcactccatcccctggctacctttttgttttttttgtttttgttttttggtagagttgtagagatggggctggtcacaaactcctaggatcaagggatccccctgccttgtcctcccaaagtgctaggattataggagtaaaccaccatgcctggccataaagcctcacttttaaatatgaaaagatgctcaaggattgccagacatttgagaatagcccccaacatgaaagatgaaaatgtatagagaagagaaatcaaaagcaacagagagagcagaagaaacctcttctaagaaactgctatacctgccttcagaaggataacagaacaccttgcttcctcaaaatgtgtcctatttatcagaattcatttaaaaactacaaagatgtacacttactaagaccagaaaaaaattttaaaaacacacaaattctgtaaaaactggaaagggctcttagaaattaaaggtatgatagaaaatttagacttttccatcgagctgaaggctgagaaagttccctggagagtgaaacaaaataagcagatagaattatgggcggggaaaaatattcagaagatcagcttcagaagtccaatacttgaataaaaggaattctagaaagcaaaaacagaagagatggcccctttcagccatgacagagtaactggtattggacttatccctcctaccataaacaactacaatctggacaaaatctatgagccaattgttttcaggcactggacacaggcagtgcaaggctgtgtgttttgaaagaagggaaaaacatgaaataaatgagataaataaatgaaggctaaaggaatctgtcacctgtggctctacaccaaaagaaatgctataaaaagcattttgggttgaaaggaaatgatagaaaatcagaatcttcaggaaaaaataaggaatgccagaaatgataaatacataggtaaatattttaaaagtatcttttttttccttcttttgattttcttaaaagacaactaactgtctaaagcaaaaataataactttgtgttgtggagtatataatgtagattgaaataaaatatatgacaattatagcacaaaagatggaaggaatagactttatactgtgacaaatgttttacattttatgtaaagtgtacaatattaattctaaatggactatgattaattaataatgtatagtgtaacccctagagaaaccactaaagaaaaatacgacaaggtatagataaaaatccaacagaagacataagatgcaaagccaaagaatatttgattaacccaaaagaagacaaaaagtgtggaacagaggaacaacaaaacagcaacaaaaccagatgggacaatcagaaatgaagacaatacgctccaacacaaattatcaatattatgccaaatgtcaatggactacacactatgcaaataaactaaacacaataatcaagaagcataaattgtcagactgaatataaaaacaagatccaagtatacactacctgcaaaaacacactttaaataaaaagacagagataggcagaaactaaaaggattgagatagatacacacacacacacacacacacacacacacactttgcaaacagtatgcataagaaagcttaagtggctacattcatatcaaacaaagtagattttaagataagcattacagagaaagaatgacatttcataatgataaaagggtcaactcatcagggagatgtactcagagcttcaaaatatataaaacaaaaatcaacagaactaaagaaatagaaataaatgcacaacaatggttggagattttaataaacctttctcattaattgatagaataaacagacaaaaaatatcatttggaacacaggaattcaacaatactatcaaccaagttaacctggttgacatttatagcacattacaaccaacaattgcagaatgtgcatcatttccaatggcatatattacattcactaagacgtaccatatgctggaccctaaatcagtctgaacgtattttaaaagatttaagtcatacaaagtatgttctctgacaaaattaaattagaaatcaatttttaacaagatagctataaaacctcccaagcactttgaaattcagcagcaaactgccaaataacctatgggttaaagaagaaattgcaagaaaaaattagaaactatgtttttaattgaatgatgaaaacatacccaatcaaaatatgtagaattcagctaaaacagtgcttaaagggaattttatagctttaagtttttttaagtttaaaatataatcaaatttcctaccttaagaagctaaaaaaatgagggcaaattaaactcctactaagtagaaggaaggaagtaataaagctaagagagggaatcaataaactaaaaagttaacaaacaataaaggaaatcaaagaaataaaaagtggttctctgaaaagattaataaaggtgataatcccacagaccagctgacaagagagagtgagagagggatggagggagagagaacacaaattaacaatgtcaggaatagaaaagggaacatcactataaatcttacagacattttcaataacaaaacaaaattataaacaaatgaatgttcaatacattcaatgattaaatagataaattccttgagaaatgtaacttatcaaacctgactcagtaaaattgaatttgtaactgaaaatcttccacagagaaaaccctaggcccagatgctttcactagtatagtctatcaaacattcagggaagaaataataccaatgtaatacaaattctttcacaaagtagagatagagaggataatttccaacttattttatgacattagaacaaaataaaatttcagaaaaagaacatgatgcaaaaatctttaataaaatatcggcaaatcaaatcccacattatataaaaaagataaaatatcataactaagtggggtttattttaaaataaaatgctggtttaatatttgaaaaccaattaatgtaattcatcacattaacatgataaattgatctacatatataaattggtctgtagattctacacaatcaaagtcaaatttccagcaagattttttgcaaaaattcatctgctgattccaagatttatatggaaatgtaaataacctaaaataactaaaacaaatttggaaagaaaaaaaaaggacacagttggagaacttatattactttatttcaagacttaccataaagctacagcaatcaatacagtgtgggattggcataaagatagacacattttaaaataaattagggatgataaaaaaagacacacacatatatatatcattgaaacagaaaaaagaattcagaagtagatccgcacatacatgatcaattgattttcaacaaagatgccaaaacaatttaatggggaaggaataagattttcaatgaatggtactggaataattgaatagccatatgcagaaaaataaaccttgaagcccagcactgtggagtgcctcggtagtcccagcaattggggaggctgaagcaggtggatggcttgagccaaggagctcaagaccaacctgggaaacagcaacctgggaatcaaaaattttaaaaaatgagccctgacccttactccatactatatacaaaactaatttgaaggctgggcacagtggctcatacctgtaatcccagcactttgggaggccaagacgggtggatcacttgaggtcaggagttcaagaccagtctggccaaaatagtagaactctgcctctactaaaaatacaaaaattagctgggcatggttgcaggcacctgtaatcccagctactcaggaggcacagacagaagaattgcttgaacctgggaggtggaggctgcagtgagccaatattgagtcactgcactccagcctgggcaacagagcaagactccatttcaaaaaaaaaaaaaaaaacagaaagaaactgatttgagatggatcatagacctaaatacaagagctaaaattataaaacttctagaagaaaacttaagaaaaaaatcttagtgaccttgggtttaacaaagatttcttaaatacaacataaacacaaagtataaaaaggaaaatatcaataaattggacctcatcacatttaattttccttttctttttttttttgagatggagtctcactctgttgcccagactggagtgcaatggtgcaatctcaacccactgcaacctctgcctcccgggttcaagcaattctcttgcttcagcctcctgagtagctgggattacaggcacgtgccaccatgccaggctaattttttttttttttttttttgtatttttagtagagacagggtttcaccgtgttagccagcatggtctcaatctgctgacctcgtgatccacccaccttggcctcccaaagtgctgggattacagacatgagctaccacgcccggcctaatttttctttttgagaggggatctcactatgttgcccagtctggtctttaactcctggcctcaagcaatctgcccaccttagtctcccaaaatgctgggattacaagcttgagccaccacactcagccttcatcacatttaaaaaacatttgctcttcaaaagataatgttaagaaaattaaaaggcaacctatagactaggagaaaatatttgtaaaacatacattcaacaaataatttttatctagaatttataagaaactcttatggccaagcacggtggctcatgcctgtaatcccagcactttgggaggccaaggcaggcggatcacaaggtcaggagttcgagactagcctgaccaacatggtgaaaccccgtctctactaaaaatacaaaaattagccagtcatggtggtgtgcatctgtaatcccagctactcagaaggctaaggcaggagaatcacttgaacctgggaggcagaggttgcagtgagctgagattgcaccactgcactccagcctgggtgacagagcaagactccaactcaaagaaaaaaagaaactcttacaactcaatactaagaacacaaacaatgtactaaaaaaatgcacaaaagatttgaagaggcatttcaccaaagaaaacatacaggccgggcacagtcacgcctgtaatcccagcactttgggaggccggggcaggtggatcacttgagctcaggaattcaagaccatcctaggcaacatggtgaaatctcatctcttctaaaaatacaaaaattagctgggtgtggaggtgtgcacctatggtcccagctacttggggagctgaggtgtgaagattgcttgagtccgggaggtggaggttgctgtgagctgagattgagccactgccctccagactgggcaacacagcaagaccctgtctcaaaaatacacacacacacacacacacacacacacacacacacattgtaaataatcacttgaaaagatgctcaatattctatgtcactagagaaaagcaaattagaactgaaataaggtatcaattttgttactacccatgaagatgtctaaattttaaagattgtccataacaagtgttagtgagaatatgggacaattacagctctcaaactgggcaacagtttggtagttccttaaaaatttagacatgggagttaaatgatgagaacaaatggacacacggaagggaacaatacacactgggccctactggaggatgaagggtgggaggagggagaggatcaggaaaaataaccaatgtatactaggtttaatacctgggtgatgaaataatctgtacaacaaacccccatgacacaatttacctatgtaacaaacctgcacatgtacccctgaacttaaaataaaagctaaaaaaaaaaagttgaacatacacctaccatatgactcagccattccacacataggtttttatctaagagaaatggaagcatatgttcacacaaagacctacagaaaaatgttcacagcagcttcatttgaaatatgcaaaaagtagaaaaaaaactgttcatctataagcgaatgaataagccgctggtgatatatccatacaacagaatactactcaacaataaaaagaaatgaactgttgctatacttaaaaacatggatgaatacctaattacattgagtttaataagccagacaaaagaaaatgtacatattgcatgattccattcatgcaaaattctagaaaatgaaaactaatctacaacgacagaaagcagataagtggttgcccagagattgggcggtgagagagagggatgaggaatatgttgaatatcttgattgtggtgatggtttcgcagatatatgcagatgtcaaaatttaccgcattgctcactttaatatgtgcagctcattatatgccaattacctttcaattacgatatggggggaaaaacagaataaaataaaatgataatatatcatgatgaagttgtgtgtatctcaagaatgcatggttgagttgacatttgcaaattaatttatgaaattcatcacattaacatcataaaggagaaaagctatataatcatctccacagaggcagtaaatagaaataataaatcttcagaaaaaataataagaaaacgtcacaatttgaagtcatgagcttctatgttgaaaggactcactgaggacaacataatgaaggaaaaaattcattctaaagcacattattgtaaaatttcaaatgagaaaggaaaagaacatcctaaaagcttccagaaagaaccaaaaaagtcatataataaaggagcaggaatctaaagatggagaacagagtcagcctaaaaagaaggactgggaatcggaacagatttggggtttctcaacacgacctaatgctagaagagaacaaagccctcagaatgctaaataataatattcttatatatcctaaaaaccatttcctctgtactcctttctcaaaaatatgctgaatagtttggtttgttgttggtttttttcaccaaaacaaggaactatatctagaaagatttttaaaatatggtaaccagaagacaggagtggaagacaaaagaatccccagcatgaagggaaggacgttctcaggacagcagctgtgcagctgatctagcgaatgaccagaccagtttgtagcagaaagatgaaaggtactaactgggatgttttcaagaaaaaaacatggaattgacacaatatagtatctgatttatttaagcattgtgttatttatactttttaattttctgaaaattatgatttttaacattttaaagatctttctggtggggatagactgtaccttcaagattagccaattctggctgggtacagtgcctcacacctgtaatcccagcactttgggaggccaaggcaggcggctcacttgagatcagaagttcaagactagcctggccaatatgcaaaaccctgtttctaccaaaaatacaaaaaaaaaaaaaaaattagctgagcgtcatggtgcattcctgtaattccagctacctgggagggtggggcaggagaattgcttgaacctgggaggtggatgttgcagtgagccgagatcgtgccactgcactccagcctgagtgacagagtgtgactccatcacacacacacacaaaaaattagccaattcttagagatagcaaagggctcagcaagccttctatatgcaaactaaccaaagccaagccctgccgcctctacctgacctttacatcccaggaggcagagtcctcttccttagtcatcccagagtcaggtactaggcactaaggaccatccctagtgtttacagcttgcagaaattactcaaactagccagtcctaaactgtttaccccatctcgccattcctgaggcactggcctggctctcccctggctccttctgcctccaggggacactggagcttccccatgtggccccgcatggccccactataaaagtggagctttatgcaaaaaaaaaaaaaggcagctaaaagaaatgcaagcagttgcctgtatggagtagggaaagacaagaaggcaggggtctactgttttgggtggttgttttgtcttgcacttacagtgcattactttcaaagcattaattaactttttaaactatgtagacgtgttactttgattttaacaaaaaatgacactctttgcagtcacaattcaatagttggtacaatatttaattaaatttcttagtgcagtcacaaggacagcacaaacaggtttggggacaactgattcttaaaaatggaccacttggccaggtgtggcggctcacacctataatcccagcactttgggaggccaaggcgggtggatcacctgaggttgggagttcaagaccagcctgggcaacatagtgaaaccccatctctacaaaaatacaaaaattagctgagcatgatggcacatgcctgtaatcccagctactcaggaaactgaggcaggagaattgcttgaacctgggaggcggaggttgcagtgagccaagatcgcgccattgcactccagcctgggcaacagagagagacaccatctcaaaaaataaaaaaaattgttttaaatggaccacttaagtggaggtatgagtgctcactagagagaagcatcacagctgtgcacattcagcatgccaaacgcttttggtcgtatgttttacagaaggaatacagagcactggttaatctggtaaatcgtttaaacttagggcagttaatagagctcctactgtaattaatccagataataaaagaggatgaaataaaacagccttaatccatctacttttgctaccctgtccttttcccatgggttagatagaagaaatactacaaggaacagagctcaagatcatccttctcagggtcattcagtttgccctgaaatattaaccctcttgagggaaatctggaaatgaggataaattaaagcccttttgaagggcaggctatcttatatatcctttggcttaattcacaaaatgagttggaaaggtgtcaaaagagataacaaagcaaaatctgccttttgtaccatgacggacctgatttaatttcagtaactagatttattccattattgcctccatcttctttgcggtttgggtaagtactaagcatcatacctgtaagcattacaagagaacatgcacagccgagagttcaaaacaggacctgagacacagcctcctatgtctgtgctgaggaggcttgcaggaaatcttagtctcaaagtcatcatctcacttgctcccgtcaatgaagccttgaggttttgagtaccttagattgctaattactagaaaaatggagaaggatatatatggctacattttcaacaaatcagtcaactgctgatctctttgctgtgctattttgagcaataatctacaaatatattgccgagtaaggggaatctgtttcttgctcttttacttggactcaattctgaaacacttagaaagattagacccatccaactctatcacttgctgagcctgcagggctgtgacagcccttcctgacgataaattgtcaaatttccttcacaactgaaactagaaaaccaagtgaggcagaaatttgcttttaacatagagccattaaatgattttatcttttgctgtgctctgaatgtttatgtcccaccccccaaatttatatgctaaaatcctaatgcccaaagtgatggtattagacagtgagaccttgtggaggtgatgatatcatggaggtgggatgcccacaagtatctttctaaaagaggcccaagggagcactttagacccttctaccatgtggggacacagtgagaaggtgccgtctgtgaaccagaaagcaggtcctcaccagatattgaatctgccagtgccttgatcttggacttccctgccaccagagctgtgaaaatcaacttctgttgttaataaattacttagtctaacgtatcctgttacagcagcccaaactgactaagaaaccattccatatgtagattcagataggaggggcaatttggatcttctgaaaggtcaccccctttatggcctttgcaaatcaactcaaaataaatatcatctttatttttcagaagcccctaagctactttctcccttggagtcagtaactcatggagtgtgactctggtccagacacataaacgtccccttggttgagtttcataaacaattctaggccagcatggtggctcacacctgtaatcccaacactttgagagtccgagttgggtggattgcttgagctcaggagtttgaaaccagccttggtaacatggcaaaatcccatctctacaaaaaatacaaaaattagccgggcatggtggcgtatgcctgtagtcccagctactcggggagggggtggtgggtaaggctggaggatcacttgagcccaggaggtcaaggctgtagtgagccgagactgtgccactgcactccagcctaggcgacacagtgagaccctgtctgagaaaaaaagagagacttcttccccactgtgtggctacattgctaatatctgggccccacctctggccattgtcaagtgcaagatccgtcagcacttgttctcagcactgtttttgtgggcctgaactattcatttaagatgggaaaatctaatttttttaaaccatcattatttgaacccaagagaagcccatgacagtttcctcctcttatttccggcctgaactgttcatttaagatgagaaaacctgatttttttaaaccaccattatttgaacccaagagaagccatgacagtttcctcctcttatttcaggccactttatttttcatgttgtagtacacaggttagaaatattgatagtaatggcaggctgggtgtggtggctcacgcctgtaatcccagcactttggaaggccaaggcgggcggatcacggggtcaggagatcaagaccatcctggctaacacagtgaaaccacatctctactaaaaatacaaaaaattagccaggcatagtggcatgcacctgtagtcccagctactcgggatgctgaggcaggagactcccttgaacccgggaggcgaaggttgcagtgagccgagatcgtgccactgcactccagcctgggcaacagagcgagattccatctcaaaaaaagaaaaaaaaaaaaaggaaagtaatggcagaaaaaaaattacttttgcaccaacctaatagaagtgatctgtgtttctgcttttctatagatgaccattcctatcatttcagatatactggatgtcttccttatttttcaccctcctctacaactcctccttcccaacaataattttttttttaattgaacctcctaggctcaagcaatcctcccacctcagtctcctgagtagctgggaccacaagcatgcgccaccatgcctggctaattttttgtatttttggtagaaatgggggtttcaccacgtggcccaggctggtcttaaattactgaactcaagcaatcacccacctcggtctcccaaagctgagattacaggcatgagcctccatcaacaattttgaggaagactgttgagttactgaatgtttttctaactggattccacatctcaagccctgctaaaccaggggccccggagaggtacctcagtgtcagagcagttgccattcagagcctcgatgtttggatccctccagtcttctgagagtgaagggatgtaattgtctgtcagagcatcccaaaccctgtaaacaaagagaagctctcattaacacacatctgtggcctggccccgcctggaggaaggaagagctgggccgggagaggagagaggcttctgtgtgtgccaggctgagatcatctgccttccagcatgcaggggcaaagcagcttaaaaactgaatcagaggcacatccaggggagaaagtgcatggagcttggccaggggcttcagtgtgaaaggtgtttgcttgagggaagaggaatttcctaccattgagatacaaatggcagcatctataatcaaactgcctctggctctgaaaataaatctgcccctcatccaaatagctcatgtttctgaatctaagagatgcccatgtttcttttcctatgggcagagagagagagagagaaagagagagagagagaaagggagagagagagagaggaacacagagaaagagagatctgggcagtttttctggctgaatctcattaagatcagaatcattatctagtttataaccgtttcagtttcagaggcctacaatctaaatgatcaggaattccctccttgacatctaatgtaggtaagggaataatgccaatacagtgagtgcttacttactacccaaaatgttctatcgaacccacgggttgcaagatcctgccctctaacaatgtagaatctaaatcctgcattgtgtcattccaacatcacggacactctcaggtaaatactgtatataaaagaaaccaataaatacacctctgtctacacaatttgtttttagtggggaaagatggagctacatttattacatttctttttaaaattctgatatgtacattataagaaaggatttctacaattcttattccttaacttatttcagaaagatttcttacaaaaaaagaggagggaggttggggaaaatttcaaagtcacaaacacacatcaggaagatacataaattattcaacaccaagagattaatgtaaatcagtaaacaaagcccttaagataatgaccgccatggaagccaatggcacctgaattaatattaatgaggccgggcgcgatggctcacgcctgaaatccagcactttggaaggccaagatgggcagatcgcttgactccaggagttcaagatgagactggccaacatggtgaaaccctgtctctacaaaaaatacaaaaattaaccaggcatggtagcatgggcctatagtcccagctacttgagaggcttgaagtgggaggatagcctgatccatgggaagaaccttaggaagtcgaggctgcagtgagccatgattgtgtcactgctctccagcctgggtgacagaacaagacactgtaaaaaaaaaaaaaaaaaaaaaaaaaaaaaactaaaatattagataatgataaattagggctctatgctgcactctccttcaggtgcctatgcatgtcaaacacaaatgatacccgtgacagcaagatttcaaaaataagcaagtatgtatatatacaccagggcacagacacttgaaatcagaaagtaatgagggcactattaactaaacaaaatgcccatatatcacatcacattcctgattttgtttgtatcaggaatgcgacgtgatatatgggttttaaaagcaaaaagactttcttagtgcacaatgcatataattggtgatggaacaaatagaaggaacccaagaaaacacaatgtaatggcagtgcttggggcatctgcttattcattattttcctaccattacaagaaaacactttgaagagaactcatcaagtactcgttagccatctactcagcaggatttcagagcagacttcttaaaccatgggtgataccctaatctccatcaggcactattagagctgcattaatccaggctaattctaaatccaagtgccattagcattctagagccaagaagcaaataggatttgctttctccaagacaaaactccaaggcaccacacccgctggaaaggtcactgcaggactactctttacatcactgcattacattctctgctgcaagaatgaacatgcatacaggcactgaccttcagatttgtccctgcaggaagtgcccacagaaatgaaattcagcaaagcccaaaataggcaggagccttttgtatctctcccaggctggagggaagctgagaactttaacgagctacacactttccaatgaccttgagactatttacatccttaaagtgataagcaggggctctctcgggatcatttagagtgcccgcttttctcatctgagcctttgctgataagctttgaattttatcttctgattctacatttttagcgacaattccctaaacttttatcttctcaggatttcaagccatcctcattctctttcacattttgtccaggtttcctttttccttgctgacatactttttatcctttgaagtttataaacaagctttaagataaagcagctttcttctctttataatcagttgtataccctttccatacttacccagtgcccatttaacaataacaatagcagtcaacacttgctgagcacttactatgagccaggtagtactctaaaccagattcgaaacatggattaattcattcattcttcacaacaattatacaaggcagatgctaatgagaaaaaaattgaaacatagtgaatttaattcacttgtctcagctcacactgccagtaatggtaaaagtgggatttgaacttgggcagcacggctacagagcccatattcctaaccacttaacaattccaagtctttatgaattctgtaattggcatcggtatgggcatcagaataacataccaagttcctaatcataacctaggagagcagtttagaaactggctctgcgtgaaaattagctgggcgtggtggcccacacctgtaatctcagctacttgggaggctgaggcaggagaatcacttgaacctgggaggcggaggttgcagtgagccgagatggcgccattgcactccatcctgggcaacaagagtgaaactctgtctcaaaaaaaaaaaagaagaaaagaaaaaaaaaaagaaactggctctgcgtgagaaacccatacgtacgatgatcctgaacattgtgttttcatggatctacagaaggaggaatggcaaaggtagcaggggtgcatggccactttctatgtagatctccagcccagggaagggcacaaggaaggcacaggcagatgctggcagccagcagcctcagcaacagaggagccaatgcagccagggcagggggaaacagctttctgtgaggaagagaaagggaagggctgtctatcccatcatatatcccatcataagcagggttcttgggagtgtgcatcaccccttttgtgagtacccggaggtggactgtaaagttttacttccctgagaagcatcctgctatttactcttaccttggggaaagaagactttgaaagctatctcctctatcattcatcagagaactaagattaaacaggttgcctcagttcctatcattatgctgccatgacacctgagattcaatttgctctctccatccctgtataacagaaaaggctttttcaggtgcatattttatagcttgggcttaggtgcctgtagaattgacttaagtatctttcgccacagagagcaggggctttgggaaaggctgctggcagagtatgagcaaacccagtggaggagggtggagactggggggtgccaggacacgtgtacaaagaactccagggcctggaactggcaacatagccatcagggttctctcagtcctgatgcacacgtaaacccttatatacctatttctgacaatatggcaggcagcttaaagggcttattagaattctaacttgctgacatttccctcaagcctggctacttcccttgtctagtgttttgctggtgtgcagtcatgccaatatccacacccaaatgtgtattaatttgagtacacctttgcactttatgtttagaaagtagaaattagtggctgggcgtggtggctcacgcctgtaatcctagcactttgggaggctgaggcgggtggattgcctgagctcaggagttcgagaccagcttggacaacatggtgaaaacccatgtctactaaaagacaaaaaaaaaaaaaaaattagtccggcgtggcagcgtttgcctgtaatcccagctactcgggaggctgaggcaggagaattgcttgaaacaaggaagcggagcttgcagcgagccgagatcatgccactgcactccagcctgggcaacagagtgagactctgtctcaaaaagaaagaaagtagaaattattagcagcacattaatgcgtttgctcaactttctagatgtcctcaaatgtttaaatagaatcaatactatatccgctttctataacctctaaaaagagaattaaattttctaaaaatcacaattatgtgtagttttccctagctgactatttggtatttacttgtcttcaacatgtagtatatctgatgacaggcagtttattgtgtgcactttatttttaacatcacctataacaattctatctgaagaaacagccattgcatggttagcccctctgtcttcagggtactcgtaagagggctgatagggatccccagtgacgtaggaggtaagctgagggccgtcaatttccattttgtagtgacccctaagaggctgtgacctccaggcccaatctcttatggcaaaggaagagggtggtcacatatacacaaagaagagattctgggatatttcttgaatgcaaaaccaaaaaatgtgtattcaaatctgactctcctttaatgcctagaacttccatgccctgacagatcagagataagttgacaaatcttagccaactcccctcttggctaaatagttccaaatgaagactaaagaaagcttctaagggaatcactacatttgctctatgatttgtgctgtctttaaggaggcagtttaaccaagtatttccctgcttttgttttaagcttctattatttacctctaacccatccacagcacttttcactcatttgtggatgaaacagccctctaaatactaaaccggaacaagtttataacaataacattagagctatgttcaggagaagtgtagtcaggtgagatattaagtcacccttttcctttacttagccataatttcacagttgaaatatctggatagtgtctatgaaacaaagtgtgtaacagaattctgatttttattttaaattataaagaggggttagaactgaatgcctagaaagtgttgtgttaatttttctcttcccagcttcctcccgctacactgtccccaaattataccttatctcgaaggaattattcaatctttggtctcttaactgaggcagtcaatgaggcagtcaagtcagaaaaatcaggctgaggaggccaataatcccatgtgatggtaattaacattgagtggcctcttctaatgtgctagaagacagtaagaatctgctcattgggccttcatccttaatgaggcagaggaggggttttgataggggggaaatgatttgttggaagcaaaaggaatgggacgcatcttgaaatgtcattttcagagcacctgggcatcctgggtgaggtaagaaattaggttctttacaagtccttagcctcacttcatcaagattgagctctggaggtttcatagatgaggacctacacagtcaaccagggttaaatgacttgcccaaggtcacacagcgagttagagagagtaccaaaattagaattcatagtctttgtatttctagttcattggctggtgcactagaacgaaaaaatattcggcataataaacccccagagccattcttttttgacttataaatgttgagcagataacaggctcagaatctaaaaagaatctgtttgaaacttaaaatttaaacacatagcccacagctatagtactagtcagcagaatgaaatgttctctgtgatcataccttccggccagcattaattaaaaagaaaagaaggaaatggtgtgggcttagaaatatattacatgtacatacaaggctactagctattatcactcatctagtttatttgatattcaatatttcattcaaaaatattatttgcacattgcactgtattagacagtggggctgtaagagtgaatcagacagatatttggcccctctatgtgtaaaagtagagtcttacagtagtcatcaaataagcaaccctctcccaaatacagtcaggttccaatcctctaggacgtgcctcttaccccattatttgtgggccattcttcccactcaaatccacaaaaagggaaacaaaagcacaggtgcttcagacttccctgacgtttgacatttcttgtgtgatagctaagaacaatggatgcatattgtatctctgcagggaactcatgtagacagtagtccccccttatctgtggttttgctttcccagggctcggttatctgctgtacagtacaatgaaatattttgaaagagagagagaaagagagaccacattcacataatttttattacaatatattgttataattgctctattttgctgtgagctgttgttagtctcttactgtgcctaacttataaactgaactttatcatatgtacgtacatacaggaaaaaacattagggtttggtactagcagcggtttcaggcattaactgggggtcttaaaacatatcccccaccatgggccaggtgtggtgactcacgcctgtaatcccagcactttgggaggccaaggcgggcaaatcaccaggtcaggagttcgagaccagcctggccaacatggtgaaactcccatctctactcaaaatacaaaaattagtcgggcatggtggcgcacacctgtagtcccagctactcaggaggctgaggcaggagaatagcttgaacctgggaggtggaggttgcagtgagccaaaattgtgccattgcactccagcctgggcgatagaatgaaacttcatctcaaaaaaaaacaaaacaaaacaaaacaaaaaaacacatcccccgaggatagcggggaaccactgaatttttactaaatgcctaagacatccttctttaatttgtgtaacatatcacccccttctctttctagtccctcctgaaagagtacttttctcagatcccttttcttgactactattaagaccctagaaagtagcgagcaagtgatacaaggaatctgcatactcaaaggccacatcacctagtttccacctttactttgtccagggtagcccgctgtgctctcagttcagtttagatgctttcttatgtggacatatcctaacatctgtagataactctccaggcctgaggggctgtcaaaaattcgggattttcaaaattctggtgtttcttgaagcaaattagtccaataacatagattcatccatcatggttaattaattttttctggcctttatttctaatatctcgctggatttccactgatataaagaaagcttaagatagacagaccctgaaatttactgtgctcctgaaattccattttgtatctaggaaaaccttcattcctctaaggtttcaatttaagaaagttctcctcaggggactgtaaagggacatatatagagctatgacagcaagtaccagggcactgctccgctggcaacacgaaaatgaaagtaatagcccataaacctatagacagaaaccagcactatgtcaaggagacaaggactacagggctctcgactgaagcaggagagggcaattaagacttcttactcctcgtcctgaagggtctcctcctcctcttggatctgtaactggttcttcacgggagctaggttctcggtcttggcgttgtagttccgaaagcagacattgagcttctcatcaaattcatttacgaggtcctccatggacttgaagctgattatttcggaagaaaaattctcaagctcggagagggaggggtcctcgagatggtggggagatgaaccatagaaacactggggcttctcctccgggtcctccgagcaggagggtcgaaggtcctcaaactcttcatccagactcaccagtggggcctccattcttgctcagcaggagaacaacagcgactttcaggatgagtttatctaaaagaaatgaacagcgtaatgtgagtttagaccaggctaatctaaataatagagttaactttagagacacacctgcttccaattccctactccaaaaaacaaggcactggttaagtacgaagctcctggacaagatcgtctaggtttgcattctgttctgtcctaccagctgtgaccttgggcaagtgattaattgctctgtgcttcttattcttctcaagacagatataatactgaacccacctcaaagggctgttagaagactaaaggagtaaacacaggtgagtgcttaaaacagtacctggaagataataagtgccaatattattgaatactttctgttggtgttttagtattattatttttattactattactattaccacagatccatatccttaactatgtgatctgaaagctgaaaattctccatgacttgtttggcagcaaaatgtgacatgatctaaactcatctggcaactaaacatgaccaacatgaatataaagctgttcatggctttaatttatcccattttgtgtgttttgctgcagaaatattaactttttaattacaaagattgctatcccagatcccactggatgaaatgcggaatgtacactctattactactttccaaaatctgaaataatctgaattccaaatgcctggccccaggggttttggataagggtttgtatacctagatattactacccttatcaataaatagtagaaactaataaaacattggctggatgtggtggctcatgcttgtaatcccagcactttgggaggttgaggtgggaggatcatttgagctcactcaggagttcaagaccagcctgggcaacatagtaaggtcccatctctatttttatttttttaaaaaaactaataaaacatcaatagagaccttccaataaatgcctgagttgtttttgtttcgtttcgcttttgagacatagcttcactctgtggcccaggctggagtgcagtggtgtgatctcagctcactgcaacctacacctctgggttccaccaatcctcatgccttggcctcccaagtagctgcgtgtgccaccacacccagctaatttttgtattattagtagagatggggtttcaccatgttggccaggctggtctcgaactcctgacctcaggtgatctacctgcctcagcctcccaaagttctgggattacaggcatgagccaccgtgcccagacaagcacccaaggttttcccacacatagagcatatgcctaggagcagaggaatagactaaatgatctattatcctgtatcctgtaagaaacagacccaactacccatgtgctccaaagccatactccataaccatcttgggcactgcaccctggaacgctgcacacacagaactcccttcagttcccaccaactgtgggacctctacccctcatcgggccatcttcatgcactgcttccaactgtgatttatccatctgtgtgtacatctgggccccattcaattttaacttaaattcctcgaggacacagaaatcctctggatatcttccctggctccaaatatacactgcctaccctgtggctaggcagtcaatcaatatgtgctcgttgaaaaaatgatctatctcccacatacagttttccattttcagtttcaggcagcacaagcattgctgactatcatacccttctctacacgctcaacagaaaggctaccaagcttttctcttcggtctatagggttattgatatagttaggtgctcaaattggaggcgcttcctgaggggaaccagacagcaaaattcatggattttgccctaggagtgcccattctccatctctacctacaaaactaaaactctaaataagcaaggcaaaggacatgccaggcaagaacactgccagtttgtaccgggattttgctgggattaagttgattaccgttgctttaaaacatatttggagcatttacagtttgcaaaggcaacatgataggacctttgaatacaaaaatatatacaagtagtaccatatcttggaaagaagacaggctcgagagccaacagatctgccaatggctggctgagtgacaagcatcattggtcctgatttcctcatttgttataaggaaggtgttggtacagagttaacatctttaggagttatttttaataaatcaataatttaattaatcattttgattgaagtaatatgtttatttaatccaatatatccaaagtgttaccatttcaaaatgtaatccacaaaaaaactaatgaggcagtttttattctttttttatactaagccctttgaaatccagtgtatattttccatttacagtacatctcactttggactagccacattgcaagtgctcaacagtcaaatgtggcctgtggctaccgcaagggacaacacagctctaaagcaaacacaagtaattgccagtcaggggttcttcatcttcagtacatagacccctgcaggctctttgaaggtaactatatttcaatgaaattggtttcctttacaagactaagtattttattttatgcatttaaaaacattatttggagaaggagcccacaggcttctccataccaccaaaggaggtcatagtgcaaaaaagattaagaatccctgagcaacaaaaaagtgagattagaaaagatggcagaatgcagtagagagtaaaacagttttcacagcccagggatttgtgttgattaaggcagtactctgtgatggctaagagcataggctttgggttcctgtcctggtcctgtcactcctagttgggagactttgggcaagttatcaacctcactgtgcctcaatttcatcatctataaaatggagtttaaaacagtgcttcccttgaagattactttttggactaaatgagatcatctttgaagtgttaagtacaatgtgcagaatatagaaagcatccaataaatatcaatcattctagaaaaatcaaagctgggcacggtggctcacacctgtaatcccagcaactggagaggctgaggcaggaggattggttgagcccatgagtttgaggctatagtgagctatgatcacactactgtatgccagcctgggtgacaaagtgagaccctatctttaaaaaaaaaaaaaaaaaagttaaaaataattctaggaaaaccaggatagctaacttacatagaaatgtgatgtgggggctgggcacagtggctcatgcctgtaatcccagcactttgggaggctgaggtgcgtggatcacctgaggtcaggagttcaagaccagcctggccaacatggcaaaaccctgtctctactaaaaatacaaaaaaaaaaaattagctgagcatggtggcaggtgcctgtaatcccagctacttgggaggctgaggcaggagaatcgcttgagcccaagaggcagaggttgcagtgagccgagatcatgccattgcactccagcctgggcaacaagagcgaaactccatctcaagaaagaaagaaagaaagaaagagagaaaagaaagaaagaaagaaagaaagaaagaaagaaagaaagaaagaaagaaagaaagaaagaaggaaagaaggaaagaaggaaagaaggaaagaaggaaagaaggaaagaaggaaagaaggaaagaaggaaagaaagaaagaaagagagaaagaaagaaagaaagaaagaaagaaagaaagaaagaaagaaaggtgatgtgggagtgcttcaagtaaaagaaaaattatccctgccatgatattctctgtgcaatgcttcaatatgcttatcaaacaagagaactattgctgaaagaattttagcatcttttttactaaggcttcttttttcaatttatttgttcaaaggttcctggatcgtgggttccattttacagagatatgaaagccaatccgatagtgttgcaggtatttacactgcctttaaatttgtacttttctctgggaatgacaggggagaagcagatggtgacaccagtggggtttctgatttgaaatgacacagtctatatgattaaccagcaacaagaggccaatccaaccagaatctaggactaagactgagttttgagtgttggcaacaggaagagtgtgctgaaagcactctgcccaggcagagtgtagagaaaatggattcatctagaaaattataaaagacgaaatgaatatcacagctctagggttcagacacatgctcatttgaaacagtccataatatagactgattgttttttgtcaactcattatccaagagccaagaagtgctgcatgaatgaccatctggagatgaagttaaagtgaaagccagtgctgggaaactagtcactcaacacccaaactgaatccagcatttgtggaaagacctcaggctgtggcacagatgagagtcaggcgttctgactggccccactatagcctccaggagggctctgtggattggggttggcagcacttccttagatggtgaccctgccttccttcctttagcccactttctttcgccctcctctcttcacggagtgctttcatccttcaactaaaatgtctgaaacaaccttattttccatcctggcaagcttgcaccatcctcattcatagctcatctgggagccttcttttccttaaagtaggattaatacaagcgatagcttattccctttagacttccaagatcaaaaataaatacgtacatacatgaaaatggcagaaagaaggaaccatgggagggtcgccttttctttttctctttaccacagaacagagcgcaggactatagtctgattgtcctacaatctattccatttattttcactcccaatagatggtgtaatttggaaaagaaaagacactcacggggcttaacagagacccagtaggaaacgcataaacgtctccctgcagcacaatgatgcactcgctgcatctcggggctgcggtacaaatgctcagtccctgctttgctgagctgacccgagtggagcggagcggtggagatttcaccacgctaaccccgctgggcctcggcacctccacacaagccccattccatctccttcttcccatcacttggtccatagatcaactgattccgtgcctcgtcccccatatccgtccctaaaacctaccctgcactgatccaccttcagatttcccactgctcctccgcagaacccacccagtgtgcatgtttgtgcacattttgacagaaaaagtatttcgttgcatatggatcagcaaccccttcgcggttctgcttgctcccctccccctcctcccgctgctccattcacctccatctcagatccccctcctccccccagtccggtggggtaaagaaagcctcctccaggcagcacaatggctggcactctgaggaagccggactcatcccgtgcaggccgcatacacactccactgcccttccggccaaacaagcccggacacgggagagggatgagagtcggggatgcctagcggcgaggagagaagggataggcaaaagggaagaagagcgggctgtgatacctcctcgacgccgtcaaacactgctccccgcattccagagcccggggcccacccgacggcagcgcgccccgccaccgcgcagccgccccggtcccttctcccgcccgtctgtagtaaaacaatcgctctcccggcgtctgcggccgctgccagcggttctgacactgcaggaatgcgcggtctggggaaggctccgcactctggggaggggcacgagcggggtcgggggtaagtttttagggacaaagatgatcttggggcgtttacggtgactggaccagataacggtcccgggacgaggtaccgacccactgccccagcgcgatcgggcggcgttcccttcttcccccagcccccatacctcgccgccctgccttcacacgcgcgcacacacgcgggcacacacacgcggacacacacacacacacacacacacacacacacacaccaggcctggctggagggccgatgctgagatgatactggaagtgcccatcatcccacatctccagggcctggcgcggcgtcccagctgcgctccctgaagggctgggcaggaaggcgacggcctcccgttgttcctttctaatcccagaatgggaccaggtgaggggagctgcggcgaccccagaccgtcctgtcagagaatcccggggcctccttaccacccccaccagaccccacccccagcagtgagtcgggtcctaactaaagtcaacccccgcgacggcacctgtgcgggtcctggcggagggaggcggatcccggggctcagccggacacccccatccacgggccgcgggagcggccggagcgcagcgcagcgcagcggagagccagccagccagccagccagcgagcgctccccgcgcagctccggcggcgcccggctccgctcccgcctccaccccaccccttccccgcgctcgtgcccgggctccgggggcgcgcccgcgctcgggcacccacccaactggcacgcgcgggagctggacgtcatcccctcgttaacattcatagccttcctccgagcacgtgggcttgcctttattaatatttatgcatttctgtttctctcctctttaacattggcctttctgcttccctcatgaatattcagaaactccaagatgaaagcgtgcaataactaccaatatggatacctcgcaaagcctgacactagtttctggataaaatgcaggcgatggctgctggcggatgccggcagacacactcaaagacccttttggactttccgagtttcccattctcctctactggaggctgaggcgggcaggcccagcgacgtctcccagctccaactgggttcggacctcaagccaaaaatgaggaggccggcaggagagcttttctcgcccaaagatgctgggtgggagctggatccagctgaaaaatctgagtgagaaggtttcaggcccaggaggacttgagataatacaggaaaattcaagaggctgaaatgagaagggtccctggagtcttgtgaaaaattattaatttatcttgtctactgtgcataggcctgtgcttatagaagttgtcaataaaaaatctaataattcacgaatacacacaactaagagcacaagaactgtaattatcgaaggaaggcactggaaaaagcatgtcggcttggagaaccccaagtacttttgtctgatggcaaagtacctctgggctgaactgaggacttcaactggaaggggcagggagcgtctcttttgctcgtttatgcattcattccacagacatttcaaccatgagaaggatggaaacaggaataatgtcccaatgagatgagaagaagcgttggcctatttgcctttgtgggagcaatagacagaggatgtcttcctgtaagaaatcataaggccaggcacggtggctcacacctataatcccaacatgttggaaagctgaggcaggaggatcacttgaggccaggagttcaagaccagcctaggcaacatagtgagaccccatctctataaaaaaaaaaaaattagccaggcatggtgggcccatcctggtagcccatcctggtagccccagctacactggaggatgaggtgggaggatcgcttgagcccaagaggttgaagctgcactccagcctgggcgacagcaagaccttgtctcaaaagtaaataaataaataaataaatcacaaagagtagctggttaaaagatccctagatctcctttcttgggatcatgcccagttttgtgaccttgggttagttaacttccctgtggctcatttcctcatctgtaaaatgaagaaaataatagtgcccgccgggcgcggtggctcacgcctgtaatcccagcactttgggaggccgaggcgggcggatcacgaggtcaggagatcgagaccatcctggctaacacggtgaaac

SEQ ID NO: 201 - DNA, 123128 bp, Homo sapiens
  source 1..123128: mol_type = genomic DNA
aggctaccatcagctagacgttttgaggcagcctcttggatatgcctttcccagttaggaacagcaggccgggcactacacatccaagatgcctgcaatcttttggttcttcacaaatgaactcatctcatgatggttaggtgaccatcacatgtagttgcaactaatttccaacgctctccttaggttcttgggggaggagagccataagctccaggattcttatcgaatcctacctgtgtatgctcatttgggacaggtctcaaaaaaaaaaaggtactgtattacctatcattctcatggaccacactgccttcttgcccttcatgacaagtgtctctttcaaaataattctaaaatcaaaatggccaaaagaccatttaggattcttgcccacccatctccatgaaatgggccagaaatacagcagttcttactgccattataatctacactgtcaaggctataaactgcccttcagtgtctaaagtacagcatatgcaccagagagctgcacggaggaaccagcgtagaccccagcaagtccatcctcacccttgccaaggacatctcacggtagaaatgtccccaggggtacagaacatcaccctgtacacttgtgtctaacaggtgacaattttcttaggtggctttcatgcaccttatttttaaaatcacattcccaagagccctgttatcctgtaagaaacagaaggacagaggtttgggaaatacagaaccaggaccctaggccactcccctgatggctggtgacaccttgctccaccatgaatggcctcaaacagaaagaagaccccaaagacagcactctttaccaatggccctgtaaggttctaagagcctggctgaagtgcaggagaagttggcctatgttcaattccctttcctgctgctgatgaggctggcaagtagatacaacagacccttaagagtcacagattcacatttgttaactgacaggcaaaactccatttccctcttcagatcgttggtggtatgaaaataaataattattcgaacatttgtccaagttttcttttggaaaatttgaagcaaatccttctctccatacatcatgaagaaaacagcctaaaaggtttttaagtccccaggattcagatgttctgaacgtcttccctactcaatacctgtcatccttaggtcaccttccagtttgcaaagctctctaccatgtggctctttgtttgctcctctggggaactggtagggctcagaaaggaacgatgattccattgaggtgccagtaagcaaccgagccagggctccaaccaactgattcagattttccactggatcaacctcaacctgtcacaggtactgctggtctcagtcaacccctctggcaagtcacccccgtgtgtagcacataagacccttggcagccctgcccttcctgcattcacaacagcactcagtcagcacctccaagcacaggaaaccatttggtaagacacgagtattaaaaaaataagttgcgtgacatttattttgtcttgttaacattaatatctgtagaaacatttttattgtcagtataaaaattaacaggttttattaaatactttctccaattttgtaacacataagatcagtgtaatctgcattcatcttgcacggctattgcaaagtgagtgggtgtttccaaagcaaaacacaatactttagtacagaaggaacaacggcgatattttgtctgatgtaggtatgaggctggatcttttggtgaggtcctgccagaattagatgaaagcaatcccttaaaaagatggacgtatccccaaaactatcagcagaacaactctgtgtttcaattttctatgatgggacttgaagatcctaacaggcgtctccaacgccaaagagtctggaagccattatcaaaattcactgaagagaatacaggctaatctgattaatgtgcaactcagaagcagaaggccagctgccagagagaagcacattctgctatcatttcaactaaggtctgtcctcaaggaatggattaaggcatcttttaagaggacgctggtaccatttatcttgggaagtccagttagacgttgcgttgacgtaatgacagggttgcacaccaaaatgaaacaccttcctatgaatgagttcttttaatatggggcatttaggaggtctaagaacaatcgtctgacagcagcatttaaacacaaataaatcaaaacttcattttccccaaattagtcatatattgtaaatattctcttttcaaaggatctgataactagttaagtccaagcaatagattaactagtctgctgtgctgcctgcatagaaatgccacttaaattacaaaaaaaactataaatgattaattgttttgtatattaccaatttattaataaattaacgttataccattttccctgaaagcaaaagtatttttccacctctgctcggtgaaaattaagaaattatgtgtaagaacagcatttagcaaatagctattaaaaaaagagagaccaattttctaggtgcattgggacatccatttaaaatcaatacaaaaaataactccttgtaaatatataatatatatttatacataatttgaatatatttacatacatccagcacctatatactgcatttgtgctctgtaagtgtgtgctgacataaatcttctccaattattacaaaattaacaaggaaggcagaacgcacgtccaccttgagtcctactggtccacagccagtacgcacggcaggtgagaggggttacatggtggcttgtggcagtccactgctccagaaaccttcttctcctcctggggaagattacaagttttcaactgtataaatctttacacatatgctgattacttttccaattatttactcctctgatccatatatacaagtggagacaacaagctctgggaggcatggtctccctgctcagtgtagctaggttcccagtgctgtcctgtttggggacaggcagacacagtcattcatgttttaacactgccgtttatgtgtggatactgaggaaggcatggttcgtaaggcatggggtctggagaaaaaacagaatcatctcctgaagaacaagaacttcttgtgtcagggtaactaggtgaatactgttcgagaggttggctgaggtccaagtattcctgaaagaagggaagagagacgttttatttcatcttgggtcaggataacaaggtgaatacggttcgagaggctgactgaggtccaagtattcctgaaagaagggaagagaagagttttatttcaaacacaaactcttgagatgtgggtattggacgtgggacaggacaggagacccctagaaggtgaacagagacccagcccacctgacttccacgaagacctccctgagaccacgtctgatgtaccccaggctgtccttagcttttctcttggaatccatcataaatcaactattgacaggtagagaacaataaaacctagttgagctataggtgctgggcaggcaactcggcttcacacggacctaaataacccgctgagtctacaccacctcctcactagagcccttgcttcaaatgcgagccccagcaaaatgaaaaccggtaacatgttgtgggtccccagaccccctttaagtagttgagactatgaatatttattttctgaattacattttactattgtagtttcggggataattgaaggggaatacttcttcattcagtgggtaatttaacagatgtaactgattactctcagaagctctccgagttgaaaatgtaaacaggttcaaaaaaggcttagacatactcatgtatgttaaatccataatgcactgttaaaggaaacttcaggaaaatatcggttaagtttcaaagttttgaaggttcgagattcagaaagtgtcctttgctccccaaggcatccagtgctggtgctgcaaaaagccctctggatcaccccagggtgacacttcctccgacttgggtgcccacagacgactttgtatggcctgagggctaaagatggtctttaacattggtaagcggttgaaaaaaaaaatcaaaagaagaagaatatcttataggattaaaatgaataaaatttatatacaattatataaaattccaatttcaggatccataaaattttactagaagacagactagaacacatctatttacatattgtctgtggctactttgaggctacagtggcgaagttgcaacagagaccacagggccggcaaagctgaaaatatttactccctggccctttacagaaagcagttgccgacccctgttctgaagctatgaaaagctttctaaattgggaacttgtgggtctctctgcctccactgggctggcacagtggggcagttctgctcacacatccagaagccaacaactattctatgacatgtggttttgctgagagggggcaaaaagtgcagaccacagcacaaacagcctcagtgttatcagaaaagagcccatggaatgttggcaactagacatttttaaagacacacacacacacacacacacacacacacacaaaaccctctaattcatcaccagggttggcaagagaaagagtccccatcccagcatcccagaaggggaatgtatcagttccaacaacatcagcattaaccacacaactggaaacaaacacgcccaccacatcaaaagagaactttttgcttacaatgataaaaacgaaattttgtcctaaatggaaccgtttttcttgagcatatggtaatgattttcagaaggaaagaaacttcgatttttatatccaccagacaatatggcattctgcttttttattttagggtactagatacaaatttcagtatcaacggacccactctacatgtaaatatataaataaatcactttgagcatagacatgagatcattaaaatagaactttagtgcttttcccggtttctttcttttttatttttattttttttttttttgagacggagtctcgctctgtcgccaaggctggaatgcaatggcatgatctcggctcactgcaacctccgcctccccggttcaagtgactctcctgcctcagcctcccggagtagctgggattacaggtgcacaccaacacgcccggctaattttttgtatctttagtagagacagggtttcaccatgttggccaggctggtctggaactcctgacctcatgatccgcctgcctcggcctcccaaagtgctgggattacaggcatgagccactgcgcctgaccaacttttcccagtttctcaatgaagccataaactttcagatctgataggaaaaaaacagggatatcagtagattccaagtctacagttaaaggaacttatactagaaacaacaattttggcagaagaagaaagttggtttcttcccccccttgaaccgttcctttcctttcaacttctgaaggtcagctgtattcatttaagtgcaatctcttcctttatccagcacaggccacagtcagacgcataagataaagctgctgagctaagacttcatatcactacatttgattattactttttaaaaaatcactctaaaactatttcctaaatcagaaattaagtgtattattttccttctaaaatacttgggggactttaacttttttcttgttgagacaattgcatggtttggagttagtttcctgtgtaaaagaacactattgtgcatcctcattaaatatctcaaaatacattcattaacaatttctctatcttaagatttgactagacttgatgggtttatcatctttcctgctcagagcatatgctttccataattataaaaggcactctatctgcatattgaaggagccactgacatggctaaatttgcacagtgagtgacagacgagtgtttattttgttggcaaggatcataaattattattattttctttttgagatgaagtcttgctctgtctcccagactggagtgcagtggcgcaatctcagtcactgcaaacttcacctcctgggttcaagcgattcccctacctcgcctcctaagtagctgggattacaggcacataccaccacatccaactaatttttgtatttttagtagagacagggtttcgccatgttggccaggctgctctcgaactcctggcctcaggtgatctgccctcctcggcttcccaaaatgctgggattacaggcgagagcataaatattttagggaaaataaatattttaacaaaaggtacatgtttttatgtaaaaatcatgtaagttgctcattgtagaaaacagtgtatgtttatatacacctagaaagaggctgcaaggcatatagcattaccaacaggatcacataggatagtactgtggtaacagaagctggtgttagaaaacttcattgtattccatcaagcaaatgatgacgaacattatcagtttacccactaatgaccaaagcacagaatcaaacttgcacaggaatccaagctttttcccatgcacaccaaaatgcaagtgaatactgcttcccctttcccactctcccacataccccggactgctccaccagcagctacactgaaggcagcctcggggatgtccctctgtctttggtttcatgagtcagaactcacaaaatgaagttctgagaaaaatcatgatttgagaggaacccatagttgaactatctgaccctatggaaaaagaataaacaagaccacagactccaaccaacagccaacaggggagtgtgtgtgtaaaacactacgcatgtctcacaagacaaccaaggacaaggggcttctagaaggaagttcttacctcattggttgtgagagtgagaattcgatccaagtcttctaccaactgcttgaacgttggtctctgggagggcactgcatgccaacagtccctcatcatcatgtacctgggaaaaatggatttccttgaattaatttcatatgcactgggtacgtggttatagtcagttttaataggcaatatggggacgtggtgtaaattaggaaaatgcatcagaaccttccaagcaactagattagggggtcatgaatcactttcccaaaagcttccctgccagttcctccgaaaggcactttgacttacaaaaacatgttagaaaggcatcgaagccatcaagaaagacacagctatgtgttttccctggtaaccctgggccacagtgacatctcacaatggcgtcacaccctaaagatgctttggaggctgaaggaaaatgcgtatttccatgggctggtctccagtcttccctcccctgacaccctgcccagcaccaaagcagctccactatttatctgcccggtgctttgggtcttaatgattctagttgacacagcttcctgagttaaaaaaaaattaaataaaatttgaaaactacaacttcaagtttttgatgaattaatctgccaccactgggctgcacactaacttcctgattaactcttagataggcttagcttcccaggtcttatcttgattttgggtttcgacagatcctctacgttacaaaagaaaaaaaacaataggaatgacaaagagcacaataaatgcctttatataatatgctataaaatgtggccattcatcagacatccacggtacaccgaaaagcactcacgggattactgatataaaatccccatgaaatgatacacaatagaccgcagtttctgggacaatcactcttcttagttaatcctggaggggttgaggcaggaggcagagagactcctttcaaagcactgattctattgcaccaggcacacgtcacaaacacaacataactccacttaaagtgtgaggcaggttttgctacaaaccagttcatggttttacaggcagatctggtacagtaaggagggcgcctggacacatgtttaattctctgcactaaaacacaagtgagacctaggtaaccaaacacgagttccttcgctctgaggaaatgtggttggcgtcaatctgtaatggcaattttcaatggttcgagaagttctggaaacaccgattctctactggccacgatggggccaggcgggggccaggcacaaccaccagggaaaggctgtgttggttccttaatcctacaccctgcagggcggccccgcggctttctagcttgtttcctgacccgtgggtcttcctgtcactccacgggagaccgcagaaggtgcagcacagtggcccaggaagaccactcctgctggctctgcaaagtcaggagccctcagccaggcagccagacaccctctgatccaaagccctctccatactcagaataatgttctttctctcagacaagtaatggttgtcggtgtcgctatgtatcccagctctggattgagcccagagagcttcagccattcttcttagagcatgtttaggaaaccaggggccttcaaaaacgagatacatcaggagaggtattactggtgtggcaagtccactggggcaccggcaggaaagacaacagcccttacagttcgttggtgcagttggctggcttatccattctgtgtccttccttcagcagcttaaaaagttcctccacgggaatccctgggtagggcgagccccctaaagtgaagatctcccacattaacaccccgaaggaccagctgcaacaaaaggagaaagcacggcattactaacccatccacgttgccaaaacctaaacacgcccagctgagacataaacacctcctcacttctgaagttcaaagacaaatgggccctcctgcagttcctcctatgtgctctttcctgccctgcaagagcatccccgaatgatgatgacacggggatgtgctgatggaattttccatcaatagacaaaaaggcaaactgccatcactctggaatagagctgcttgtcttaaatgtggtgttagcaatgcaaggatctcagtttctcagtttcaaagcctttacgctcctttccaactccttatgtgcctgacccaagggttgtgatctaccaggatgggcagttgacagaataaggccagcaagccaactccgcaggatcacagctgccctgtgtggctggcggaacatctgctgcacagaggctctggaacttactaagatcgcaaaggcaatcagcactgggctggggttaggatgaggaatcacatgccccagatgagttgcacacaacaaaactgaacacatctcacaggccataatttatttacacttgactcttcagagatttggacttcctgtgccaagttcaggaggctcaatctctgggaggagcaagctgagagagccaggtttagctacatcatggtcgttctggaaactcaaccttctgtactcgatggtggtgtttcactccgcagttttctacagagcaaaagcagcagcacaggacaggcagaacagcctctgtgcctcagttgctcacagcaaaaatgggatagtcatgtcttttttttaggattgttgagaggaccaactatggtagcacagaattaatgcctacccagaactcctcctgctcatacaaataaaaaatagttcaagtgatttttttttccccagacagagtctcgctctgttgccaggctggagtgcagtggcacaatctcagctcactgcaacctctgactcccaggttcaagcgattctcctgcctcagcctcccaagtagtggagattacagacacgcataactacgcccagctaatttttgtagttttagtagagacggggtttcaccatgttggccaggatggccttgatctcctgacctcgtgatccacccgccttgccctcccaaagtgctgggattgattacaggtatgagtcactgcacacagccttcaactgaattttcaaatctaaaatatcagttggagcctgaccccactggttttgtcagtatatcataatagaaatattctactgtgtttctagaatgctatcaaggatgccaaagcaagatcagacctttttgttgagggataaacatagagagtagaccctgtggaggtccccagcctggaccacatctcactcagctccactctttaaggacaaatctgggttagagggaaatatgacaaactactcgtaagtgggaaaagctccaggattactcctttaatggagtgaagaacatgccaagagcttggcgaattagataaccgctttgtagttgcacatccatgaatatgttcaagggaaggacttccgctctggcagggggaggtcagcagttccaccttctgtgctctttgaagccaggcagattagtaacagagcattggttatcagcctaccataaaatctgtcctttctaaggccagctcctgcaccttctacgaatgtgtgaaatgcagcagccactaaagaaggaagaaaggtgaagtacgtacagtatttttgcagctcaagcccaggaaaaagccagagaaaagagagttactcacacatcactctgatgagtgtatactctatcaaacagggcttctggagccatccacttgactggaagccgcccctgcaaatgtagaggaaaatgcaaaaactaaatatatttaaaagaatttatcttagcaggctcaatagggctatgccctgtttaagagctgatattctcggtttttactagtcagtcaatagagcagaaatcagtcccaatgaggaccatgaacaatgtgtgagatgcacaggtctgggccgttaataaaatgccatctccttggattctatcctttatctccctagcacacagatgctccttgaccagttattaggcaaaaattaaaccagtaacttccaagctgtagtttttgctatgaaagttcttgatgagaaccataagaaaatcctagcggttgctgattattctgtatataagtgtttcacatttactaaaattgacataatagaggctaaatttgcatattgagagtttgtgaatagtaagtcaaaagaacgggaatcggggcaggggaatgggtccccagccatcccacccagctctcaacattgacggcctttcttcctggaacattctgagcctcacccccgcccctgcccactgtgttactgccatcgacttacattggtggtctttttgtaatagtctatattgttgatatctctggcgagtccaaagtctgctattttcatcacattgttttctgttaccaaaacatttctggctgctaaatctcgatgaatacactgaaatcaagaaagaagcaagagaaataactaatttcaaaacaccgccagaacaaaaaggaaatatgttcatttcttaaaatgcagatagaaaatatagctgatgttaaaaaccagttgcggtatactataagaaatacagtgtggccgggtgcggtggctcatgcctgtaataccagcactttgggaggtcaaggtgggcggatcacttgaggtcagtagttcgagaccagcctggccaacacggcaaaatcccatctctgctaaaactacaaaaattagccgagcgtggtggtgtgcacctgtagtcccagctactcaggaggctgaggcacaagaatcacttgaacctgggagacagaggttgcagtgagctgagatcacgccattgcactccagcctgggtgacagagtgagactctgtctcaaaaaaaaaaaaaaaaaaagaaagaaaagaaaagaaaacgcagtgtggctctaagattaagaagacaggtcaactgggatcatcggagagcctggatcacgacatgtatttgttttggaattataaataaatagaatgatcattttgaagagcgaaggtagactaaataaccatattctcttctacctccagttgtccagccacaccagtgtctttctttcagctgcttatagatctgtatctgatcatcctaaaatcttttctctcaacacttgctctcctgccctttaaacctgaattttcagaagcgttggttaaaatccaacattgtgtcttcttcattcctggtcacttctcaaacattctaatctgtgttccactcttgcctctcctgaagcttatgaagaacctctgaattgttagacgcaaatgacgtcctccaactcctcagttgttcctcctctgtggcttcagatgctattgatttcttgcttgttttttaaaatggtccctctgtttaggttttcttgtttttgttttttttgttttaacatggagtcttgtccttgtcgcccaggctggagtgcaatggtgcgatcttggctcaccgcaacctccgcctcctgggttcaagcgattctcctgcctcagcctcccgagtagctgagactacaggtgcctgccaccacacccggctaatattttgtatttttagtagagacggggtttcaccatgtcggtcaggctggtctcgaactcctgacctcaggtgagccatccgcctcggcctcccaaagtgctaggattacaggtgtaagccaccacacccagcccctctgtttagttttatcccgtccccttccctcagctgcctctctgtctctccctgccctcttagaatctctggctggctcttctctttttctgtcccttcaaatagaggaattgttccattaagtttatgtatttccatatatcctcaaggcattaattctaaacacatacaaaatatgcgcaagttcgtatctccatcatgacctccctcctgagacccatgttctcattttcaactgtctatgggacacttccccactgacattcccttgacgtctcaaattcaaggtttcaactcctccaatgctttgtctctcttaatcggagagctatacaccggtattctttacacattcctcccaagtcctgttgatttcaactccaaaatgccttcccatgtgtccacaccatgcctttcccactgctaatgccttagtccaggccatcttcactgtctgcccctccccctgagacttccacactgcccgtctagcgggtctctacgcttccaaacttagccctgttgtacctcctccatgtcccatgactaaggttcctgaaatgactagtcatgtcctttcttggtctctaccatggccaatgcccgtctatccacgttctcagtccagtttctcctaacacctggcctcagcctgaatgtgccacatacactgattctaaacactgaaatattaaatacttgctgcagaacagctaatttattgtcttgacactaactcttgggtctcagaaagatctagctattacgacttttccttcttttttttttttttttttttttttttgagacggagtttcactcttgtttcccaggctagagtgcagtggcacgatcttggctcaatgcaacctctgcctcccaggttcaagtgattctcctgccctcagcctcccaagtagctgggattgcaggtgcccaccaccacatcaggctaattttgtatttttggtagagatagggtttcaccatgttggtcaggctggtctcaaactcctgacctcaagtgatccacccgcctcggcctcccaaagtactgggattataggcgtgagccaccacgcccggcctatgatttttcctttctacaaatgatacgctactgtgagctgctgcatttttgttacactttcatatagcaagatttccacaagatacaaggtaattagggtctccaatcatcaccttctattttgggaagagataagacacaaagaagcaaatatcaccaccgaagccttttacactggttattggcaaaggttaactatcatacgaagcagaaagtcttatcagtccattcaacaaggctgaaatgggggcgatcttaggcactccacgaaatggacaattaaaaaaggggcaagctacgtgatccctgaaatataaataaggaattatttgattccaccccgacccctagctattccttgtgttcacacacttctgggcctcccgggtagcctaagcccagaagcgggaaagcaagaaagccacgcaagcttgcaatccctggccaggttggaagcaggaaacatgagagctcacagaagctgcctggagattcgtctggggctgcagccctgttcccagttttggaggcctgttcaaattgaacttccaagccccgggccaaactctcccggtggtgtgctcctgccgacacgcgctctgtgtgtctggcaagctgtgtggtcagaagaatgtgcttcccacgcactgggctccaactatgcattagggctcagcttgcacagagacactgctgacggctccctccaccatcttctcagcgaaagccagagtctagcgtggccatccctcatcccaggggctaggaaacatcaaaccccagcctctgggttgaataagaggagacttggaacccacacccgagaaaaagaaagtaatcaaaggcaagccaaatccccgtcatccacaggaatgtcagccgttctccagcacagggagctgaccattttatacaattagggccctgggacagtttggtgttccataggtgaaggtcagtgggtcactaagggaaggaagaccaacatccctatgatgtagacagtatgccctgtgcccagtatggctgatgacatcgaattcctgcggcaacctatgacatggatagtgttatacccattttacaggtggggaagctggggcttcactaaaaaaactgctcaggctgagcgtggtggctcacacctgttatcccagcactttgggaggccaaggcaggcggatcccgaggtcaggagatggagaccaccctggctaacacagcgaaaccccatctctactaaaaacacaaaaaattagccgggcgtggtggcaagcgcctgtagtcccagctacttgggaggctgaggcaggagaatcgctagaacctgggaggcagaggctgcagtgagccgagatagcgccactgaactccagcctcggcaaaagagctagactctgtctcaaccaaaaaaaaaaaaaaactgctcagggccaggcgcagtggctcatgcctgtaatcccagcactttgggaggctgaggtgggcagatcacttgaggtcaggagttcaagaccagcctggccaacatggtatggtaaaaccccgtctctaccaaaaaatagccaggtgtggtggtacatgcctgtagtcccagcaactcaggaggctgaggtgggagaatcacttgaacccaggaggccaaggctgcagtgagccaagatcacgccactgcactccagccaggtgacagagtgagaccctgtctcaaaaacaaaaacgaaaaacaaactgctcaggtttaacactttgagggttaactgggtttgggatttggttaaaaaagtaaaattagtgtgatttgagctaaaaatagtaaggattttataaattgtgtaaggctcaaataccctattacctaattgcattgctatatacaccatggtgttttttcacttctctgtctccaatccccaacccctaccccaacactcacacactcacgcacacacacacatgtacacacacaactgaaagctgctggaggccaggcactgtgtgttcatctcaatcggcccagcgctgagcacagatgaacccagtacatcagtaacgatgtaatcaacagttctcttttgccccttccttcaggcaagcaggtctctcacaagcccatggctccccattgtgaggggatgggtgtgggaaagccagggccggaccctttgcctggttcttcattctccactttcaagaataagccctccatttttggaagcagagccctcgcaaggggaccatgcttaacatcttcatctacctccattttcaaacctattctgggtccttaactgcaggtggcctccagtaagtggctttggaaccatgccatgtcttaaaggcccatacaatatcccttttaccttgggctgttattcaatgtagagacaatgaggccacactggggcactaaacaacccctcacccgccccccacgtggaatctcattggtcttgcctcagtttagagagagttaggggcctcatgagagcaggagacagctgagtgggggaccaggagacctaggtctgggacctgccactccactcttcagacctacaagtccgcttctcagaagtgaggacatctgagtcctcctgacacatctggtctcaaaccattcatgctgcttcctcatcgtcctcccccatacaatggggatccaaatcccacctatttccgggttgttctgagggctacgtaagatgctttatgtcaaatgctctgccacggtgcctggaagatggttagcttctcccggaggggtcagtaattaataataacgatagttactattatcacaacactttaatatgggtacttccgttcttccacgattaaatggatgcatttgccctgcttagcaaagttcgtctcttagttttctctctgccagctccaaaacaggaaggagctctgggtcctcagggctagggtgggcaggggtaccaccactgcctctaggaccaggactcaacacccgtgcttctcaccagtctgagcgccgaggctctactacctgccccctccttcctgaagctcccatgtggggcctctgtgctccgtgtcctgattttcctactgctcaggctgtgcctgctcggcctccgctgctgtttctggtgctttcagtcaatctctagatttgagaattttctcaggacctgacttcaggcttctattctcctcttccaagcttctccgcagatgagtttgtccacgcccatggcttgaactcacagctccctttgctgcctcccagctgttagcccaccctcagagctgagctgctgcctgcagcttcttcattatctccccttggatgactcagatacgctcaagacgagctcggattttccacccaaatctatgccccctgccccagccctgattcccaagtcctcccagacttggaagctgcaccaccatccagtttttcaagctggaaatccagaagtcacccttgatctctctttctctccctcctatctaatcaatccattcattatcccaagagcaaaatatgtccaacatcagcccaccagcttttctcggtgtctttggacccaacagaccctagcccaaaccatcatcacctttgacaggggctcagccttcccattcaccacacaagcagcagtgagaggcatttttgaagcactaactgatcctcttcctccccctcagaggcttccatggcagtgacagcaaagtgcagcgtcctggcatgagtaaggccttatccccctgtttcctccatggcacctttttcaatatttttttacaaccttattttcattcccacatttacagtcaatttctcttactgtcacccatggttcttgccccaggaggtcaaggactatgtctcttctggccacttcgctggagagcctgaccaagggcatgagacatcgggggtgctctaggagtagatgttgaaggatttaataaaatgactgagccagccctcctaccacatttcccctagtagcaccaccctgctgggtgcaaaactgcttcccctatctcccacacaggtagggcagggagtgatcaagaccagaatatcaaaataggcagcctacagatgggctaccctccccaggcttatttaggaagagttcacagctgcagaaaaggagggatggcacagtgagtatccaccactgctgggtttgcttgttacacctactcaatcacttgctgtctccatgtcctgccccacctgcccccacacacatacacacttgggatagtgaatggattgattatattttatggctggaccacttaaaactgagctgcaggcatcactgatacttcacaaatctcaattcttcagcgtatttctcctacaacagataccactgtcaccacccccggcaaattcaacactgatacagaaatataaccagtaatattatacagtccatattcaaaggacactcacaaatgtcctttctaagaactggccaccctccccgacccacaggatccagtccaggatcccacttttacacttaggaattgtctcatcggcccccttttatctggaaccgtctccccagcagtttttgtctttcgagacactgacatttggaagcgatatcttgtcaaatgtcccatgttctggatctgtctggttgtctctggatgccaaatagattggcaaactaccctacatacacgcacacacacgcacgtgtacgtaaacacaatcacagaagtcaaaactgtgtttaattagtttcccaaaacctatatattgggagatttttatacgaaaaagatctgaaaaagtcttaaactctaaactctcctgaaaaaatgtttttaaagtttttcttaaattaaaaagaaaaaaggcaaaaccccgtctctaccaaaacaaaaaacaaaaaacacaaaacttagccaggcatggtggcacatcctcgtactcccagctactcaggaggttgaggtgggaggctcacctgaacccaggaggtcaaggctgcagtgagctgtgattatgccacggcactccagcctgtttgaaagaaagaaaaaaccatccagaacatggggtagctctgggccatgttcctatgtggccagagagtagagctgaggtgcagccatccctcgaatctctgcactctgagtgatccgcaggccttggtggtgtgactggcatggccccatggagacttgagtttgtgactcttcaggcaacccagacccccagtgacagagggtgcacgccgaccagaggatctcacctctttggggacccaaggaattcctggcactgcaataaactgcaatgcaggtaggagcaaggcccacctctgcacaggaggcagctccgcccctccgcttccctatgtgtggggctgacaagggagttttgggtcatccaaaatgcctccgaggacatctgggcacctgtctaactactctcagaataactgaaatgtttcaagttccacggtaagtggcacgcctggaatgcaggcagtccacctcaggggacctggccaacttctaaccacagagggtcacccgccaaacgaggcaaaataaacgcagagctccaggacgcaaggttactaaaatacccctttgtttgacctttactcttagaatatttaatgccatatcaaacccaaaacactaaacacctaaagtctatgttcaaaaactcagtaaccacaaaataaatgaagcttaagaaaaaaaaaaaagaaagaaagaaaatcatccgaattaaagggggcctttaaaaccatccatttcccacctggagagctgaattccgagggaaatcacacatggtcctgtctcaaagaagaggtatcttttctgctcatctctgcagcgatgctataggtttatgaggctgctttggttttaaacagttcattaaactcaaatgggaataacgcaataaatattttccaggttgtacaagacatgcgagggcttgatctagcaaatgagcatgtccaaattgcctgttttctttaaagacatttttagttggattccacccagccaagtagaatgtgaaagactcactttttgggaagccaagtactccatgcctctggccagctggtaggtgcatgacaccaagtccttgaaggtcatctgctcctcaggaacacggttaatgtcataggagtactccatcccgggtggcctccgggctcggaggtattctcggaggttgcctttagaggcatactcaactatgacatagagaggccctgttgaggaagaagagaagctccctaaagagagaatccagggtctccccttgggcaattcagcaaaacatttttagttattacaacccatgcttttttttttttttttaaagtttaacatacagcggctgggcgtggtgcctcatatctgtaatcccagcccttacagaggccgaggcaggtggatcacatgaggccaggagttcaagaccagcctggccagcatagcgaaacctcgtctctactaaaaatacaaaaattagctgggcatggtgacacacacctatagtcccagctacttgagaggctgagacaggagaatcgcttgaacccaggaggtggaggctgtagtgagccgagatcacaccactgcactgcagcctaggcaacagagcgagactttgtctcaaaaaaaaaaaaaaaaaaagaagaagaaaaaagaaaaagttttaacatacagaaaagcacacataaaaatatgattataatctctccaaaatgataaataagcccttggtcatgatagcctcaaaaggcacagagacacagttgacgtgctcttccctgtcactctcatgctgtcacctgcgccctcttggaaagcaatggatccctccactctatccttttggttcattttaactattcaataagtaatatattatttttaatcacataaatgaataataaagctcttagatctttgcaacattttttacccatacattatccttttggaacctgttgggcttataaaaacaaaaccagatcattccttttcacagctgcatatactgtatcgtataaacacaccacactttatttatccattcccttatatgcataggcatttgcttccaggtttcagccataacaaacagtaggcaatgaacatctctgtacatgttcccttacacacgtgtgcaataatttctccatggtataggctcggggttggcagactacagcctgcaagccaaatcctgcctaccgcctgtttgggtaattaaattttattggcatgcagccaggtccattcatttctgtacttctagcactgctttctcactactatggcagacacgagaagttgcgacaaagaccatacggcccacaaaagtctaaaatatctacgacctccctttacagaaaaagttcaccaattactatatagacctacaagagaaattgctaagtcaaagataggcgttttcaagtttactaattacttagcaaattgatttcaaagtgccagtaaacattcaatggaagaagccagggtctctctcccccagggaaaataacgtattccttcataccgctttctcctcttttaagctattcttgggagctcagccatctgtgacccacagcaagatgtggattcttcaatccctgttttaagggaagaacttctcaaccaaaacataggatcttattctgacaaatctctcttagcacttacaaaacaaaaacataaggaggctgccttttccaaaaccccctccaggttatgacctagaaacagcagcgccctctaggccctcaaatccaaagtcacctgcaccctcctttccactggcccccaggtacgggcacagacccttctttgtgttcatggctaggaacatcttccaatggggattttaaaaagaactttaaacatgcacacagggtgctctgggagcaggatctggaagcccagccatttctaaaatgattcaatcaaactgcagagtatttgggcgaatgcagtttttcctcctactcaccatcctgtgtgcaggctccaagaagatttatgatattcttgtgtttcccaatcatcttcatcatctccatctctgacaccagatcagaaaggtctttctctgtggcatcatctatgaacagtaggcatattcacaaatcagttcatttcctctaactcatgggcagctactgttagttgccaaagacttagttgaaacagcatgaaattgaatttcagaatcagaaaagattttccaaatcatctccctcattttatcgaggaagggacaaaggcctacacagggaactgcctcactctgtgtcaaagagctcactggggggccaatggggccaagagtcaggacgagagcaggggcttctgacactaatgccaattctttcctagaccatgagataatctcatcctctgccatatctaaggcgtctcagaaaaccacaccaaacttcatggtgcctgaaaccagcgaggagaccgagggtagggccatttcaaatcactacagacttgctcccgaccaagcattcttaacccagcccctcgaggcccttagagcgttccgaggtgggttcagacggttccccataaacagggccataaacgtgtgtgcatgtgcattctgagcaggtaaagggctgcgacttctagtggcttctcagagggcactgcagttcccatcctaagaaaagttacataaacttccgctctgtaatttcaagcaagaatggcacaggttccacatacgcgggctcgcagttagcttctcttagattctcctaagtggcaagactttcccatgtgccctccacctcaagctaattcagtatggaaaaatctgggtttcctttaaaaaaaaaatgaaatatgggcatggataagaaccatgttgcaaacagttttttagcttcacaaaaggaagatcaatacaagtgactgtgtgtgcaaaatttacactgatgtatgtgaaggagggagccacgggccatgaggagggagggagacacagccgtgggctgtaagaaaggacacgccacaatggcttggggactaatatccttctgtgtccttacagggaaggctgccagcctgggcatcacaagagaaagagaactcccagacctccctttttgcaatatcccatgtaactctgagctccattagcaaaaccagaagttccgccaaaagagatgagaagcctgggtcctccccacacctggccctggtacgcagccaggggctgcctcagtcagtggtgccatgacacctggggcaagacagcacagtgttcctccccggcatcaggctccaaggtggggaacatctcaaagcactctagttttccttgggagtcactcagataaacagccttttaaaaaacccaaaaaacaaaatgcacatcttgttgacaaagtccagcctgctacttccccttgggagggatgtgatgactatcccatgagaacccacaaaagaaagacaaagcctaactccagagcgcctgcgacatgcccagcaccatatcccaaggatgggcctctctgcctggaaacgtgggaaacactcggcatgggatcttctttccgagatccctacaagaggatttataatgtgacagttccctataactcttctcataaaagaatactgcaggacgaataagttaatggttaaaagttctttaagttctttggacatgggcatgaagcagggttggaaggttaacgtagaagtgttcacagtcccacaaacacaacacgacatttacatctcagggtaattgtttatgtgtcccaggaggctctgcaccagccctgatcctgttcactccttctcagcttctaagtgactctcccagaccagtgtcatttctgctttgttcctcacgcaaaagagaaggctttctgctcccttacgtctcttcgttccctccaaaaacacaaattttcttgtacttgtaaagttaaggtttaagtcccaaatctaacacaccaactcctagctaataaattcaattatatgtgagttgataatttctaagcacataaaaatacagagagaatgaagaattgtggtcacgaagaaggagtcaaagaataactctatgtaggaggctaccgctttctaacaaaactggcttttctttataagtacacacagctcaagataaatagtctgtccgagatgctgatttataccgaaaacttctcaacccctaggtcaactatgtgctctctgaccccgtgccatgatagagttcacatgccacaaaaggaactttcttgataagactctccacccagcccctccccgagcctcccgcctccccgctcacctttcaacatcttcacggccacggtgaccgcctccttgggcttgtctttgtcaattcccactgcttccgccatgaccacttgcccaaagcaaccttctcccaggggcttgcccagtgtcagcctaaatgtgtaaataggggattagcacatagcatctggtgatggggtgtagtgagggaaattccagaactaaatataaaaatctttcagcggcttactaaagcatggagtgcttatcatatggaactaatgagacttagggtacacacgcgcctgagtattttcctagtgacgttttagagaatgtcaattactggtggaacggctattaaatttcacattggtattctcggtttattttctttagggaaggtatccttgctagtgcggtggtcagctttcctaagtgccagagaagagcttttgatcttgagccaattaaatatttgtaatttagaatggctcaaagaaaaaacgttaagactgttcttatttttttgtccctgtaaaatggtggctttaaaattattattcaaataccaatggattttatggtcacattccttgccaagttacaggatatgcctcttaaaagcatttcaaggaatctctaattttttactaaaaagaaaattctaaaaaattggggactttttttttgacataagtttaaaagtccttatgactacataaaattaacaatgaagaaaatccaaagtgaacaccacaaattaaatttctaagattacaaggtctatgcacatcggacgaatagccatatattgtccttgtgcattccagaaaccaacaaaacgcaaaagtctttggaatacttatgaatacggctctttctaacttaagcataacacagcaaagcatggagctgccattagtaaacagtatttaaggtaagtacacaatagtttgcaaaagtgcagcataaagactaagggcagcatgtgctatgctgaggtcattttgtttctacccagaacgaaaattaaatttaacatcttggcagaaaataaatatttgcattggaaaaatggctaatttatgtcccaccgccttgctactacaagcataacaatcctttctttgtataacttctgcctccgatctaataaactgcttctaaatagccttcattcattggaaatctgttccacctacgtttgcgctaaacactgttttgaaatgtttagcactcagattttccacactcagggtaccccgggtgggaggtaacagttgggcacatacagacttccactgttgactgtggtgtcacaggtggcaaaaactatggactaaacccgaaagctgcaatttcttaaaatatgatcacaactccccagttcagttatatatataggaatgtgcacatgaacctatctgtgtatataatcacacacaaactagggctggcggagttcacaagaaacatccatttctccacatcctacaggtaaagaaaccattctttgtgttttctctggtgccccaccagtaaatgtccaattaacatgccttgagtgaatgaataagtgaatgagtgagtggtcttttcactacagtatacaaatcaactggaaattacttccattaacactctaaccaaataatatccatacaattattcagtcctagctaacggtacacatctctaaattggcacttgggaaacaaaactgatgtgacatcacgtgaatcaaaatcagaagtgccagccacataagctacctctcccttccaaatagagctcatcagatcagtctctggaagagcttatctttgcatttccaaatgtgtataggtacacatgagaagtgtatataatctgaggagctactgaaaatgtcaaggcaaacagggtagctgcttataagcaagtcaagagcttattccagtgtatgtgatgcagaagtagtcagcatttccaccttcccgtactctcaagctgtgacgacaaaaagtaccccagaagtgagtggacagccctacaatgaccactgcacttcctttcataaggaggatctaggggtcggtccctgcctagaggacgagggctaggagctcaaattctgcccactgactccatgccccacacgatgatcctgctgaggtttgcagttcagagctcccaggttaccaccacgtgaagggaaatgaaaggaaaactcgcacaagccaagaactctgctcagtcctgggaggtctgaaccaccaccctcattttatgagaatgaatttcagagaatcaggtgcctcacccgaggttgcccagccactgtctggcaaagccaggattcaaatgcagcccaacggagctccagtacgtggagttcaagcgagaccaagagatacgtagccccaacaccacccaggtggccatattttgactaaacatctgattggcacacctctgtatcatccaacaaggaaaatattatggatcacagaaattagatgtcaggtaccatatttgaagcttttcagcccaatatgacattaataaccaatgagaacagcaacactgggtagcggtccttaaggccatttatattctgcatctaatttctccacagaagtgaacagagaacagtcttgttctagtaaccaaaagctagaatgtcagatctgttttataaattggataattctacttttattccatttgacggagtctgaattgcccagacacttaaaaaatgataaccagatgccatcttctttggggaccagccaggggcaagtagctctgctttcaaggagttatttttttttttaaatccatttttttcttttccaggagttggttatttagaaatacaatcttactcctgctgacatcatcacaccaagacctttgtggctaagggtcataaaaagaaaatgttaatccaatatccccatttatagctgagtctccatcctgggacatggccaagagaagtactcacttatctcttggaaactcccattttgggtcctctggaagttcatactcggagacccctgccagcatgggggtgtctgccgttgaagagaggcgtgttgttatcctcaccagcggggtgttggagttcatggaggagctggactcagccgaaacctggatacaaaatgcaaagacacagatgtaatcctggctccatctgagaaggctggaagtcagccagagcccagccagagtatcgaatcttagaaaggaatgggttgggggctggcagaagtcagaaaccaaattagaaaaccactggaatctaactcctctgccctccagtccatgcagtaccagatttcatccaaattttatgttcctatgttcaggtttttctatgaaatttttctataccatctgatcacaatgtaaattttctttctgtcctaattcctccagagagtcacttgaggacatgcagacagtcctctctggcttcattagtgcctttatggttgtacctgcacctgtactggagccctggataatggatcccctctcagaccacccggatcatggatcaatgctgtgcttatgaaattctacgaaaacttttaggaaattggctctaccatatttcctctgtctttggaaatgtaaagtggaatatctcaaggaaagagttctaggacttgaatgtggaagacattcagtagctccgagtccctttaactcaaaataaccccagaccccagcattgggggccattctttgtttctccccagtccttctggaaacttattgatggccaggctattcagtggaaatgggctgcctcttgtcttcggtttcagaaaccagtgcactaaacacgtgggatgaagcatcaatggaaagaaaatacaccttttcccataaccacacaagagaactcctctcccacctggcagtacacagggctccaccgagttactttcttgtttatcctgatccatttcagtgtgtctgataaaatgattatttcttaaatatatcactgtcctttggctggtttctatggaaaaaaaaagactcacacagagcacactggaaggccacttttgaggatgactacgcaatcttagtctgaccacaggctgcttgaacactgtcttattctaaaccatgaacaagactttggcccaagagaacaagaatgtgaagttaaccacgatccatctccaagcaggcaactagcccaccctgggctctgtctcctgcgtgactgcccaggtggatagtactcctggatgtgcttacaaacgccttcaatcacactggcaaagactgagtccagatgaacaaatttaggtgggatgaactttcacagggtgggtcctgggctcttctcacagggaaccagaggacctgtcctgtttgaaaagctttgaatctcgcctttgtaaacccagacttccctcaaagcaggctggaaattcaagaagatgcccaagaatagattaggggaagaaaatcattttaggattaggaagttgttttcagtattaaaataaagaagtgggccatttttcacatagaattcctattatcttttaaaacgtacatgagcacttcctgagccttccattcaatcttttggcagggggcagttattcctaaacttcattatgcagatagtatgagcaacatttattcattgtatggtcaaaatgttttaaaagcgggaactaaagaatcattaattgtggagctgagatcctcacacccaagtgtctgggttgcacaagcaaatggcagaagcaagcgggaaaagacgagaaggtaaatgtgggtgctcctggggaatccgtcctgctccccactgaggtcacagactaggcataagccccaccctggatgaaacagacaactttaaagtccccgccatgtggtatccaacctcactgtagtgagctaacctcgtctgcgggacacatcagaagccaggaactttcagagaacatcaagacttccagtttgcattggtccacaggaacatctcaagctccacctacagagctcagaaagattcaggagcgggtttaacggccaatgatgcttccccaaatctttctgtcctcctaattcattctgcatcagggccgtgtgctgtggatgcttaagtacgcaggtgttttcaagactaagaaggtcttctgaaagttcttccccatgaacaggcaaaaatcaccactcattgcagggggaccttatgcttgaggatatcatgggcaagaagctccagccaaactagtaagaaccggccggccaggcgcggtggctcacgccgtaatctcagcactttgggaggaggaagtgggcagatcacttgaggtcaggagtttgagaccagcctggccaacatggtgaaaccctatctctactaaaaataaaaaaaatgagtcggttgtggtggtaggcgcctgtaatcccagctacttgggaggctgaggcaggagaatcgcttaaacccaggaggcagaggttgcagtgagctgagattgcaccacagcactccagcctgggcaacagagcaagactccgtctcaaaaaaaaaaaaaaaaaaagaggcctagcaatgggacgacttccgcaaatggccagggtctggcaggttgtacagccagaacactctctgcatggcctgcagcgtagcccctcatcactggataccagtttccaggattccactatggggtgcataggaagctgcaatcaatagaggagtgggaaccgattaagcaattgcttgggaccgcagtcctggatgacgttaacacccagcagaggcagaggcatggctgggcttctgtgcctcctccctgaaaatcaccgctctcatcagcgaggctcacagaataggatgtggggaaggcagctgtcccacagcgaggtgtgagaacaagggcacttaaacgtttctggaaggatatataagagacttagcagtgatcacctgtgggcagagagattaggagttgagagagggggtagaaaatacattttatttcagaactttctagaccatttggattttatgaccatgtgtatgtaattcttttatgttctagaagaagtactttatttaacaaaaatattttttagaataataaggatctgagctgaggcatgaacaacggaaaagaaaacgaagggcatatgcttgaaatatgctgacttctaaaatgagtgaaaacttacaagatcactgctttcggcccttccttctgctaccaggctaggttttgtggcatctctgcatccttcgatgtgggcaacagccaatcccgttgctgcccttcctgtgctcatcattcacaacatgaggccccgcattaggcaggctgcatcctgaccaactgcaataacatgggactgtgcggtcagattgtcagggtccctgtcccagtttgagcactcactcactgtgtgagctttgggaaatcacttaacctttctagacctgggtttcctcatctgttaaaaacaagacaggggccaggcagagtggctcacacctgtaatcctagcactttgggaagccaaggtgggcagatcttctgaggtcaggagttcgagaccagcctgaccaacatggtgaaaccctgtctctactaaagatagaaaagttagccgggcatggtggtgagtgcctgtaaccccagctactggggaggctgaggcaggagaattgcttgaacctgggaggcagaggttgcggtgagccgagatggtgccactgcactgcagtctgggcgacagagcaagactccatctcaaaaaagaaaagaggagacaggaacaggtccaactgcacagcattaatgtgatgataaaatgagggaaaaaaaaactgatgaagtgcttagtgctaggcctggcactaagagctcagttaatgtctgctaccaacactgcaatattttctcttagtccctttagaatcatttgctgcccagatctgagagaacagacaaagacacttctctctgggtaacttggagcgtttggagcctagggtggttctgtgtgtaagatacagtcagtcctccatatctgtgggttccgcattcatggtttcaaccaatcacagatcaaaaatatttgaaagctaattaataaaaaataacaatacaacaattttaaaatacaaataaaaaacaatacagtataacaactatttacatagcatttacaacgcgttagttattacaggtatcactagaaatgactaagtatatgagaggatgtacacagttcatatgcaaatactacaccattttaaataaaggtcttgggcatccacagattttggtatattcggggttgttagaaccaatccccaacgcataccaagcgacgattgtactgtcaaactgtgtgcaaccaggaagataacccagtgacattaaaggctgactgcagaagatatgccttagtgggcatgtctgatttgctagatgaggccctctgctcactgccaaggatgggctggggttctagtaagcaggagatgaagaatccaggagtcagggaatcatctcagggcaggaggaaaactggacagtaagagggtcctaatgacaaatatggcttaggggttacctcagaagagaaaaatttaacattcagtctgaagttcacccctctatggctcacccatgaccccaaaggaatctgcatccacaaacccctggcaaaagttcacatgtatctacaccatcccccaaacagactgtctcgagaagattttcatgtgacagcttttcaaatggaaagcctaaaaataaataaataagaaagcctttatcaactttattgtcattattattagaattttaaaaatgaggtctacaagaaggatgacttacgggaattttgttcagatgaagtacggagattcagattaaatgtacaaacctggaaaatacttttataagaacacgaaacgggggaaaagggtaagaaaacgtgcaaagtctaagaaactatagaatttgattgctctgtctactgaggtatatcttaattttacctccatgcatttttactatgcttttaaaatcccctctggggctataaaatacggctggctttctcttcattcccttccactccaagagcgagcctgtgttgggggcttggcccggtcctgggcaggccattcccctgtgggactccatgttttactgggcatctttcctctgaatcaggaacctcaaataactcccactgctcatctctgaaatccttctacttctttagcactattaaattctcttttcttttgcacaaaatcataatcttccttattcttcaattcctacctagaaacttcaattccagagtttcattcctaaccaattttaacatattctcttgttagtgataagtgagttacttataaacaatcaacacgaacactctagtaaactgttttcccactcccgaatcttggcaggcatttttttttaagcatgtattttcacagactccaattccatttcctcactttccggaatctctccagcatgtgccataagtcaagcttttaagtaaatgtgcttttcgtacatttccatagtacatatgggagattaagtgaggaagtgttttttttttttcctttctttttaaagggccaccaagaaacagtgttatctgtttcttttctttttttttttttttttttttttttttggtttgagacagagtttcactctcattatccaggcacgatcttggctcactgcaacccccgcctaccgggttcaagtgattctcctgcctcagcctcccaagtagctgggattacaggcatgtaccaccacgcccagctaattttgtatttttagtagacacatggtttcatcacgctggtcaggctggtctcgaactcctgacctcaggtgatccacctacgtcggcctcccaaagtgctgggattacaggtgtgggccactgcgcccggtctaacagtgttatctctttatactgaattaaatttaccatctagaggggatttctcagagaacagagcaagcagaagcaaagatgttccagggagaagagacgaattaatatttgtgtgtttactccccaggactgacaaacacacttggaccacagcctgccaaacaggccctgtgactcttaggctgcaaaccaccttcccccacaagaacacgaggctggcattaacatacttctgctctaatataagccttgcccaccactcccctatggccaaacaaaatgctttcaccaccgcaagctgggtgcctgagataaaccttcaaaggcttctgaagttgcatttttaattcctccataacaaaatttaggtaattaggcaaggcagttcatcagacactcacttttctcccatagcgagtctctgcctcccgcaggcctttccctgggactctgtgagtaaacctatcagagccatgacgcaccagccccagatgcgctggctctgctcgagagatcgcatcagccaaggtccaggtcagatcttgggcaaactgtcatgtcctttggaggctgagagaggagaaaagggagcagcgaaataggggcagggaggatgaggtgcccacatgaaagggcagattccagttaagtcatccgtgaccactctaattacccaaatgttttctggagccggtaaggtttagaccacctgattgaccaaaatacagagaatattcccagatcatgatgttcagctgccaggcagtaaacgagcttctgggagtagaacatccatcccccttcccggaatttggcatatgtttgaggatcactaacactggacctgagaactggctactgagtcacacattcctcccccgaggcacccgctccgctcctcccccttcatcttggtcctattcctaacgtccccaggaatatgccatttgcctcaaaagtattgctacaaaaggtagccttcactgcccttgatttattttattttattttattttattttattttatttgtgtgagacggagtatcactctgtcaccaaggctggagtgcagtggcgcgatctcagctcactgcaacctctacctcctgggttctagtgattctcctgccttagtttcccaagtagctgagactacaggcatgcatcaccacacccagctaatttttgtattttttagtggagatggggtttcactatatgttggccaggctggtctagaactcctgactgcaggtgatctgcctgtcttggtctcccaaagtgctgggattacaggcatgagccacggcacccagtctgctcttgatttttctctggttttcagcctacctatatcagcagctgagaaggtgaaactaaagtctgaaaaaaacaaaaaaaaaaccaccctgcagcctcttgtaccatgctgacggcagtgagagagggtgtaagctgcacaggagatgaatttatctggacggagccaaccataagacagttaaatctccatcctaccctatggaagcttcaagccccagagaaagaaactgatgtgctcgatgtaaaactgattcagcaaacccagcaacaccgcacgtctcctaaacaggcatcctcagtttcctctgcactccatcctccacccacccctacaccttcccccaccacccaattgatgtgtggaaaacacagaaagtaatgctgccccctttaactcacaaaggctgcttcacactggtcactggctgtccagcatacctgtaccagaaccaacacgctcacaaagatgcccctctctgggctggctgttgttggtctcatttaactcgctgggcaccaaaggagtgggagtgggtgagcagtgtctggcacggtgcccaagccctgacactgaatgtgacatgagcctccatcaaaggacacagggagatgccacctgccatctgcctcccaccacccaaaagttgcttctccttcttcaaccatgtgcatacaaagtctcaaaaaattcacgcttactaggaaatgattgcaaggaatttcttctttggtactggaaaaaaatatttttgctcaaaaaaataacataaactgaaacgtctgtgttacaccagtaagtctagtgcaaattaataaatgccaagaaggaaaaactcacaggaggaacgaaaacccaacttttcttgtcctgaaaagagaacaaggatggactgagggacctgagtgagacgctgtgtgtgtatgggtgttggagagggaaagagtcagggccatggagacactgagtgatccctgtgtcctagaggagactggccaacacagaataaaaagtggcctcataaatgcctagaaacaacccatccttgacacatctgattagaggctcaggtaaaggcatgcttggcatccctgtggtatttgctctgtcatcaacgtatctgcaggcctttctggggcttttcattccagctccagtccaataaccctcttttatccagatacccgataagcatctctttctctaccaaaggggccatgcgtactgatgaaacattctttgtgaagatccaataatgtaccccacttggacatgtagaaggagctgaggtgtgtcaacattccccccaaataaattaatctcgcagagatgtacttttccagggaactggtatttgccccctttcctctgcttctgttatactcctcggccctactgaacacaagccaattacattttcttttttttcccactttgggtttttgttttgttttgttttgttttgttttttgagttggagtctcgctgtgttggtcaggctggtcttgaactcctgggttcaaaggatcctcccgcttcagcctcctgtggagctaggattacaggcatttaccatcaaataaccttggaaccactggtgaatgtgacaggctgtgtcttacatgtaacctgatttataccccgcacttagtaaattatgatgaataaataaaggaaggagggaagaaaaagaggaaggaactctgatgttccctctggtaacacagggaagagaggaaaaaggaccaacttaggctgaattctctctctttttttttaaagacggagttttactcttgttgcccaggctggagcgcaatggtgtgatcttggctcattgcaacctccacctcccaggttcaagtgattctcctgcctcagcctcccaagcagctgggactacaggcatgcaccaccacacccagctaatttttgtacttttagtagagacgaggtttcaacatgttagtcaggctggatggtctcgaactcctgacctcgggtgatccacgcgcctcagcctcccaaagtgctgggattacaggcgtgagccaccacgcccggccaggctgaattctcttaaagaaaaaatataaatggtattgcatgtgagtatacatataattacttaatttagaacattcttatgtcaacttccaatgtctgccctcttcttagtcctcaaggatccatccacaagcagtatatttccaaatactatttttctcaaactgtattcttagatggacagtgaagaaaagccagctggcactggggaaagaaaacacgatgactgtggctgagtcagggggattttaagggcatcttacccttctatattaagtaaaaagaaaagcattttaacagttgcagaaaaaaagatgatgagataattaaggggcagtggcctagctatgccaaattacaagttgcctccagaagttaccatttttccctattagaaaaaaaataatagaaaccatgtaagagttatctcaggactggactcttctagaaactggttggccaactggcctcatctttgctttcctggccccaagaaagataatcatgtcactcaaaatgacaacagcattcttggtggcagacgtgacccaacaggcccctcttttccatgctgttaacacaatttggtcattcgcctacgcttgacacacactttaaattctatcctccgtctccacaaagaaagacctgcttgaaacatggctttagagaagttaacaaggacccattcagccaggagtttgaagctgggttgtgaacaaccagacccattccaaaaccactgctgaccaactggttcctaatccttcctaatgccttgtccagaaaatgtcattcctacctgaagtcccgggagaggcatgcctggaattaacctggagtttctcaaagtgcattctaaaatcaccatagggcttgtgtaaaatgcagattcctggccctatccaagatgactgaacaagaatctctggggctgagacaaaggaatctgaaattttaacaagcaccccgtacattttactaaaatacacactgaaatagagccaatgagtttgctgttttacttgctatttcaaaagaaacctttatcagaaccaagtttcaaatgcttttgtaaacgttctgcatctacatctgccttccgcttccatctctgtgaataagcagaaaagagctgaggcatttcctgtcccacctacctatgcagggctttggtttacaccagaggctccatcttgccccatctcccccaaagcaaaattaaaccaatcaggaggcacacacaagcaaaaagcaaccaccaaagaccaagttggtggttaaaaacaatctgttgctggttccatacaaatattctactaataaatccacagccacacctgtgaactactaacaatgagacataatagatgcatacaattctattgtaaattgcaaagaggttaagccaaaattctgtgtagaaagttattgtgcaacagtttaaatcaaacagttcagatgcacccccagggcataagatactgatcttgactttaaaaaataagtcagagaacttagagtctctttcgtactagtggcataagtcccaagcgaatgttcatgcttatcttaaaaaaggtattagatcacaggacacgaatgtggctaaagcttcgaagagaccgctgtacttgagtctgatcaaacacacacagggggatttgcctccagttatttccagtcctgctgattagttttctgattctgacagtattgtcctttcttgcccttggaactggaccccattgatccaagcaacgcaccatgactagactctccaagctccaaacactaactgggtgaccgccaagcatcacaccagaatcactcgcacatggaagctcacagaagtcgatggcatcaaagcagaggacaagatccacaagctggctgggtcatgggggaggagtaaatttctttaaactctttatctactttctgttacctgtctccgcagggggatacgtttggtcagcttgtgcacagccggctggctgctgaagtctggcttcttggtcgtgttcttcattcggcacaggatgactgttaccaccatacaggcgattaagaagacccctatgcagtaaatggctatctccaggtagtctggggaagctgtaatctccttttctcttccaggcgctagattgcagatcacaggaggaggaacagataagcaggccatagagttagcacaccagactgacgcatcatagcacaaccaaaggaaccaaaaggcgacgaccattctcaaggcaaggtgggcttcccaaaaactcccaaatgaaaatgaataaccaggggtccatcatttgaccaccaggacccaggtagtcactgtcactagcctcagtgggcacctgcaatccagtgagtggttgacacccagttgcacagggcaggctatgaggccacattttgttagacatttcagtggaggacgaccaactgtacccacaatgaaaggattatctttcatgatcgtctgtgaatgcaaaccaaataaaaaattctgaaatatcaacgatgcccacttttgtttctaaggagacagtgacaatgcttcagtcttacatgggtaggctcttccaaaggaagactccacaggataatttaacccggatgaacacaattccatatgaaactgatgttcatctagtaggctggtctgaaaaagttttggtgaattccttaataccatctagtccataaacaaaccaatgcattaaatacacagattgaattgcttataatatagaaccattagatccataatacataaagattataatattctttaataaccttttaagtttatacatatccggttatattgttatgtcactacagcttttctcttaaagaaaaaacataaaggtattatgtgtgagtatacatataattacttaatttagcacatttttatatcaacttccaatgtctgacttcttcttagtcctcgatgatccatctacaagcagtgtatttccaaatagtgtttttctcaaactgcattcttagttaagtgctagcactgtcaggcaaactggttaagaagtgccagttaggcaccacagaatgcagtactgcaaataaaagcaagcttcaacataagagacatctctttgtttcaaagcaaatattcacagagcagattcgcaacaaaaggaaaaacggatgcaatggtattattgaaagcttatacattttaatcagaaaaatacttgcaagatagtcaaaactctcagcagcaacagcacaaaaatgaaacgatctattttatttttactagatgtaaaataagcatgcaggtaagcactgtactctaaaaacaaggaattaataactggagtggaacatcataagctagcaaaccacagtctctgcagtttcacaaaggaaatgacaaagaggcagatgcatcagagaggacagtgtttaatttcaagaaagtttcactagaatagagatgtcggttaaagattcagacagcagcaatgtttaggcaacagggctgcaatgatgtttatttctctgtgaggcagaaataacatcaagcccaagatggcaggagcatgctttgcaatgaaagcaaaccgaaagtccatcctatcgcaacatgcagcaagccaccgatccccaaggtaggcaacacactgcttctgtgcatctgacattcagaggtgccgctccccaggctcctccatacacatccctctatttacatctcgttaaaaatacaaagtgggatgaaagcaataaaaacacatacaggattttagcaaaatggaatttgaaatgagaataaattactttgaattttaccaaagtaatggcaacttgttccttaagagaaagggggatgggctaatttatacattggctcaatgactcactaaaaatatgagatcccttcaggttttaagggtgaaatttcccttgatcataaatgtgagtgtgggatctcactgtgtgtgaatttccaaggcagttttcttatccctgagggatcatttttaacattttttatatctttatgcaaggataaaaggggccatttctgataacagaagctgtgttaattttatagcagtcaaccaagaaaagggaaaaaaacccagagagaaagaacagtatatacctggcagaactgtcaaccatgcagagtgaaaggatatcccaatagaattacccgccaagcacgtatattccccagcgtcctcaaaagttacattccgaatatagagaacctcaatctctttgtccgtggtgttaacaccggcggcctagaaaacaagggaagcaaaagaaaaggctagacgacacaggaatgattgtggagggggctgtggaaccacaaggcgtcgcaccgggggcttcagggggtgctggccactgggagattccgactgcagcccatccacaaagcccacaaccgagagacacggagcaacactgaccagctcacctccacaggcccgtcaccacaccggcttcacctcctacacatgcacgcaatcaaacgcatggaaaaaatcaacccacagaggtccgttctcttggcctgtgctttggtttgcatttaggggtggttttccaaaagtatggtgcccagaaggccaagctggttctggtcctgttggctgcagactcccaccaagaggaaagggtagttctatctaaattgctgtgttttaagacaacacactgcacataagcccagatggacacctcacccatcctcctggccctgtgggaaccaattggggtggaaggttgtcttggttaccaggctctggttatttttacttctgcgataccatcttgccctacatagcattgacaaaaagaaatggaagcaagcatcatcttggtaaccaaaaaaactgggctttttctcttttcattaataaacatttggatgtgagtcatgacaaacctaaaaagtcaaccttttgcctttagtagcgtccagtagtacattcattaagatgagctcccctcaaatttggtgcaacaaggtcaagaacagcaactcataaggatcaaccatgcaaccaaagaaatgatgctttgttgaacaaattgcatcttgccaatatttccctaaaaacttgaagtagaaggagacaaactctgctgatactcaaatgccccgtattaaacaggcatggaagcgtgtgttttaaatggtgttaatgtgcagtaatgatgggaaatgtgcagcctaaacaagatcaaccagaaggaacaacttaaaaactgggtgggggtggaggctaatctctagaagaaattggagcaagcactttgaacgttgtgggcatttttccatggctactggcatcataccagctgcatcaccgaagaaagattattataaatataccaaggccacaagagttatcctataagctgcctgcagtctcccaaagcaccaagtcttttcagcttctatatccagctttctttttaaaaaaagacaaaaatgaaagcattgttaccttgctgttttggcaggacagtgagccaggcagactggttggcctgccctatataattggagaccttacatatatattccccagcatccgcctcggtcacattgaacagagccagcacttctgcattggaactatttatccccgagtgctagaacagacacaggagaacaatataacggccaaccaggaaggtcttagcattgtctatggtcccaccaccaacacaccgcaagaaaacaaactccattacgtctaaacagcggcattaaagggctgcggattttaaagaacaaaatcagtccagtggtggacaacggaaagacctggtggagagaagggcaggagggtgtgagcgatagctaactggataggtcgggtgggtccccaggttggtcatcttttcccaatgcctttgatccttggaattattagctggtgagaacacttcattggctgaaagttcttagctgggtcacctatggttctactggaagaatgttcttcttaaggacattcattctccatgagcaactagacatgggaggcgtggtaggcaaggagttaagagccagctgtacagacttagctgcccctgtcctcagtctcctgaagagcaaacctagatctaaaaaagaggcagatgctatgaaaatgggggcttgcaaataagaaataaggagggaaagatattttccttgttcaacatttcactggtgcagaaatatgacctagagtttattgtctaaatcacctctgaatggatttcaaaggtcagggttttgttttgttttgtttttgttaaaaaaaaaatccaaattgtttctaaaacgtggctactaaaattggatcctaatgtcctattaatagaaaacaacatcagagtaacaatcaacactggcacaatgccttgagcctacaaagctctttccatccactccatcccatttattctgcacaaccgccctatgggggacagagtatcacgatctctacttttatagaggcgcagctaagcctaaatgtctgcgatctcagggctgataaatagctgaactattctctctccaagtttagtagttcttccccaagtttagtagttcttcccctactccatagttcccttctgaaattctactagcaagtgtaatgatctgttaattccttagaacactctctgctggctagtcaaaaaagagaatcatcctctctcaactccaacaggaaatcaaagaacctgtggccaaacccatgaaggagaccccagttgtgggtacctttagattcagaaagtcctcaccttgagaaccttgaggtagggcagcccgtcgggcccgtatttactgccgttcttttccacgtgcttgatccactggatgtggggctgggcatcactgtaaaccttgcagacaaactctacgtctcctccgaccactgtggaggcatttgccggcagtccggcttggaggatgggccggtgaggcgatcgctctggtggagagagggaagaaaggaggagtggggatgggagaatgagagaccaataaataagctgtgttgtccagagggctgtcagtgacctcatgccagaaaagcctcaagcctgctggctgacacctttgaaataacactgtggccccatgaataacagaaacgacttcaaaggagactgccggagcgcgacccttgtaaaaagaacacttacttagaaaattgagaaaagaacttattacatcccaggttattggctgtccactgccacctgatgaatacgggaagaaattctactctgacaatctaagtgacaaatggtaggggagggaagcttcttcacttatcctatttgagataatctcaaaaactcacctcaaccacaagcttaacatcacaggcaaatgacaagactaactttaaagacactctgaataccaaaaatggtttcaataggcacatgtctcccaatacatttttttttcttttctcagacggggtctcacttcattgcccaggctggagtgcagtggcatgatcacggctcactgcagcctcagcctcccaggctcaggtgattctccaacctcagcctcctgagtagctgggactacaggcaaccgccaccacgcccagctgactttcaaatgttttatagaaagaggatttcatcatgttgcctgggctggtctcaaactcctatgctcaagcgatccacctgccttggcctcccaaattgctgggattacagacgtgagccaccacgctcggctccagtacatttctaagatgctctgagaagacttccaacctttgttttaaaaattaaactaaagcctaaagcccaaagttatgaacagatttgattaataatgggattcacctctttattgtggaattcactccattcattcattctttattcacccatttagctctttgatgaatatcaggtgttactctatgccagttactaaatgcacaagtagatgtttcttagcttattccaatatggcactgaatgaaacataaggagatgctggtttccaactcctggctatgttttagactgccctataaaagggcagagatggtatcccaaaattacttcctagcttcacttgtcttgcctctctctccttcgagaacacgttctcaacaaagaatacaccctctcatcttatgcctggaaaggcttctctccagctaagaggcggtctctgcaaaacttttgtggagacaatcaagccaaggtgtgctagcaaccacacatgagactcctcaagtgttaagtaatacccatggaaaaatgggctaaggacttaactatgcatttctccaagacacaaatggccactaggtgtatgaaaagtttctcaatgtcactaatcattagagaaatgcaaatcagacgagatcgggcgcgttccaaatcaaaaccacaaggagctatcacatgacacctgtcaggatgggaagaaaaaaaaaaaaagacaagtgtcggcaaggatgtggagacactggaacccctgcgcactgttggtgggaatataaaatgatgcagccaccatggaaaacaatatggaggttcctcaaaaaattaaaaacagaactaccctaagatcctgcaatcccacttctctatttatctaaaagaactgcaatcaggatctgcactcctatattaattgcagcaccattaacaatagccaagaaatggaatcaatctaagtgtctgccaaaggattaatttttacaatgtggctatatacacaacggaatactattcagccatgaagaaggaggaaatggtgcaatatgtgacaacgtggaagccatgatgctaagtgaaacaggatagtcacagaaagacagacactgcctgactccactgatatgaggtatctaaattcatcgcattcataaaatcaaagagcggaacggtggttgccaggggctgggacagggaaggaaatggtgagttgcaatcaagaggcataaagtttcagtaaagcaagatgagcaaactctagagacctgctgcacagcatcgtgcctatagtcaacaacaacgtattgtacactgaaaacttagttgaagaccaggcgcagtggttcatgcctttgagcataatcccagaactttgaaggctgacgcaggaggattgcttgaggccaggagtgtgggaccagcctgggcaacatagcaagatccctatctctacaaataatacaaaagttagccagacatggtggtgcatgcctgtagtcccaggtacttgggactgaggtgagagaatggcttgagcccaggaagttgaggctgcagtgagccacgatcatgccattgcactccagcctgggcaacagagtgagaccccgtcttagaaaagaaaaaaaacttaggtgagatggtagttctcatgcttagcattcttgcaacaataaaatgaaataaaataaaaagaattaaataaccaccagaccaccagactgctacctgatcttgtcgtacaaacttactggaaccttcctacacagatctgtcaaaagccacacaaaacacaatcatgtgtccatacatgaatacaactccatcccaacaggcctgcacttaccagcctcctccctctcttcctcccctaggtgtgggtaccactaccctaacctccagtgttaaaaaacaactgagggaaatgaggagaactcagccagctcagcacaccaaggatgtctctgcactgtacctgagaatcaccatgcactgggctggaaacagcaaattagaacaatagatatctacatcattggacctttcagattaaaacatcatctagtggaatttgttggacaagagccagaccatgtgcaaattgactttactgcataagcctgttgctggtctttaaaaagaaagaaaaagtgctagtggttactcttagcacatttcattccagaatctcccatcactttacagacatctatgttttcacattataaagataaggatactggagccgcaaagaaatcattcatctgcccctatattgcccatgtaggctgagcaaagaacctgaagttaagacttctggtgttggtgggcagaaaatctcaaagctgggccccttcagacgtcaggtgaaacccttgctctctggctcatacaatgacccagggatgggccccagcaagcctcctggtcaggcctagcagctggctggacaccccagggacctgtccacagcgggcagtgaccgaggtctgatttaatcccagctggcctcatccatgtgggaagggcagagttaagtccgcgcacgaacagacacacgctcctctcctccccaggcctcctaccaagagacttcacagcacgaggggaagctgtcctctgggctagatcctgccagacaaggtcacaaactatgctcctatgcacctagcaaatagtaagaaggtttattccttcacacagaaatgtgaactttagtatcaattcatgccctggctccgttttccagttttgcacttgtacatgcatgtgtgtgtgtagtgtgggtgcgttttaagataaatatttacagtgggcctacacatctattcttagaaacaaaggtcataaaatcttaaatgtcataagccagatcaactgagtttcaaaccaagtcctctttcttaaacatatttgtttctaataaatcgtttcacaagtaaacattgtgcatgcagtaccaaaccatgatgccccgtgaacaatgagtgctttcatcccgcctgacatctctggcctgcgccaggcttcggcagggaatttagtcactgaggcaacactggcagggcccactacagagctgcagtcttgttttccttgtggtcaaagtgctgctgagctccagttattaagttattccaatgctatcccggctatgtatacacacacacacacacacacacacacacacacacacacacacacaccccaagtttgcaatggtttaatgttattgcatttgcaaattacagcataccaaatgttacacgcttgcagtcttgaattcatcttttcaaattttctcaccttatacaaaataacctcttaaccacctccactccccctccgccctttctcacttctggtagaaaaactgcaagcaggattgttctgtaatagaaaccttacactgtcttccaaacttattacagctgccttcagtataaaatgaaaccttagagaatgttatttaaaatgtttttaaaaagtcagtaggtctcatgtttcatttctccacatcaggctttgatttcctttgcaaccttattctctgcccttaaacaagtcggaggaggaggcctggacgtcttggaaaagggcccaggatgccagcatctgccgaacgctgcgctcctcctctcgaacccttcagcgatccaccacccctcggaatccctaagaacctcagaaacagtgaacagtaagtggatgacagcgcctggactcctttcctaacttctgaaaaaccgaggtgatggcagggtgcagatggtggacgaggatgcaggctgggcagagtgggggcccccttcgtggcctggcccagcgggcactacggcagagacaaaggggacgatgacccaaagagctcatgtgttctccccaccaggaacctccccggtccctgggcaaaccaaacccctcaagtttgcaacttttttgcaacaaactgatataaaaagaatcccctgatgtattatctctgggcgagagactaaagcccagtgctagttcatctcttcttctatgtgataacaaaaatcacatcttctccaccaggaaggacaggaaggatttacagttttaggcaagattctcttctagcatgtttaactctcagatattatataaaacagattttcctttttacaaagggagtgagataaacacatggaaaataggctgatgagtagctcctctgtttactgtaattttaattacatatatacacatataagaatagacgttctgaggttcagcaggttgcaaatgcacagtgcatggacctggaacaagatgagaaccttcaaaagagtgattggaaggtggctgtgtgaattccaaattaagacggaatggaaagcagtccaaagggtgcggccactgctgccgggacagttggctgcactgctggaatgaggttccaccaaataaacgcgtagtaaacacaggctgaagtgctttaaaaaatacattctctcccagcgttctctctctctcactctcggtctcgccccctttcttcaagtgtccactctactaaagcagaaagcccagctgctaagaattgaaatatcaggatgggctctgtcaagccctgctctgtagctgggagccataacccacctaaagactgcagcaggaaagcacagcctgcttccttccaagaggtcattattgagggagagagagagagagagagagaggaaaaaaatacctgagtgacaaagaataaatctttgttaattgaccattgaaattttataacatgccagtcctcctctggacatagtaatatgtttgctcataagagatctacaacttttgctctgacatagcaaaggccataaaaaatgtccaccgagccgagaggcctcatgtctacaggctcagtaaacatgcatcccggggatcagaaggagaaccaggctcttaaattacacctataaattaatcaagcacagagtggctggtttcccagctcacactggtctcctgagcatttctccccaaaagttaggcagtacttgccacaaagagccatttcaaagccacctctctccggcagtcacacaccaagagactcgaatcacacggagttcccagtattgatctggaaacagccagtctcctgctctcaggcccccattcatgtaaggagcgtggataacctcgcttgctctgtctttaaattaaaatcaaaatttaattacctttcctccaaaatggcagtctcttagcaacgccaaagagctgaaaagggaaagaacattctgcgatttggaggacaagtgaaaacaactgagaattctttttctaaagcctgcctagcttttttctaaagagtaggcggtggttgcttttgttgcataaaaacgcactaaaccagttagcatgaggcatggttattaggaggaggaggaggccgatcaaagctctctgaagtctgaggagcccagaacttgctaaaggccccacgctaattacaattagtagaatgagttcattgccttgtcaagactccacctaacgcactcaagcctgacaggctaaatctcgttgggttctgagttttgttttgttttcccagaaatacgaagctttctccagcttctgaagatcagcacaaaggaaggtcagaactaaaaatgattagcagaaaaagggaacgctatgacggccaggaagaccaccttcagaaagagcccaggtgcccacagccagtatcttggcttgtcacctcctagaatagatgagtgggctgggatgctgggcacccagaatcacctgttttgttttgtttaaacacatttctgtggaaggtcactggtttgttgccctttctccctcacaggcttggcacatgctcgttttgttctttcctcttcgctgtctggtcacccaggtgtccgcatcttctgtctggatatctgactctcggaagtcttgcagaatcggctggggctcccacttcctctaaaacacacacgtctctttgcagagagagtgaagtctgcggaacaaacttgtttgggtaaaaatgaagtgtcctccctccagcactaaagtcacaaagtgacttatggaggctgcaccctgtgaaatgctagaagcaaaacaccactaatgcctttgtgcttgctcgatgaagtgaagaagagagtaaagtgctggctgggctcagggcctgggaagaccaaagcaggtggaggcaaagtaccttccctaattaatgttacaggctgtattattagtaccttccctaattaatgttacaggctgtattatttggcttggggttgagtggcttctaccagctgggtatcaatttgggtcttcttgggcgaattacaggagtagggctgtgtgttatttacaccccaagtgtttaagacactctgagctctctgccttcaaaaagtttcaccagaactgaagattctttggtaaccagagagttattatgccaaatttacgttcgaaattggtctcttttgctaaaaggagtcatggtttggggatgatggaaaagtcctggagatgaacaataatgataattgcaaaacaaattgaatgtacttaatgtaaatgaattacacattcaaaaatggttacagaggtatattttatgttatgtatattttaccacaatttttttttaaaaaggagacataacaaaggtgacaatatctcagagtgaacaagatcaatttctagggtcatggaaaacctaccttctcaatcagcgaggtatattgaccttgtccagtttactcagtgagagcttttctatctcctgacccacacacactaggcaggaggtccctccctaggttgtgcttgggttttgacactgatgtaaaactcaggcgtcagtctcccaggctccctcccgaggagctgaggtaaacacagctgagagcgttcatgcctgggagtcacgtcagagcctcagcagccgccacttgccataggggtgcaacatctttcaggaatgcaagattatcagctggtgtctgcatagctgggtttccttcaggggaagaaaatgtttccttcgagctggaaaagtttgttcttttttaatgtccaggaattaggtataccctcttattacaatgggtgaactcccaattagagtatcttctctcaaatgatttgcaaagaagctaaaaaccaaaccacaggggagccctccgtcaaagacagcaaccactccaagtaagtaaggccccttagctttaaaatgtttgactgaaatctatcaaaaatgatccagttaaccaacctttacaaatctgtcctagaaaaatattcacacagatgcccactaaataagtgtggacaaagcttgtcgctgtagggttttttttactggaaaacaaaagatctgcacaacaatcatattgtttaatatgattaaacgaattgtactacatccgtgaaagaagagcatattggccactagtaagaatgaaggagattgagatgtgcagacatagagggatgtccattgtaaaaatgctggcaggtttcatcaaccttcaccatctaaaaagcctttcttctagagaagtctagaaaatctatcatgctcatctctctcacatgccttgttttgctcctagggcggttcgagcagaagtaaaagctttcagcccatctgagcaaacaagaaatgcctccctttgataggaataacatgagaggctgaacaataaatcccatttgttttcttggagatgaaactcagaaactgaaaataatcacggttctagatacttctaagtacagcatgacctaaagagaaacttcaaaatagtcacccagatcacaaaagccttcaatccaaacgccactgctcttctcactgtccaagccagatgggaagcctcaagtcaggccccagccccagtccctccctatgaacactcggtgagagtctcacatacagaatggttttgttttttcagtccaaaatgtaaaatttatttatttattttgagatggagtctcgctctgttgcccaggctggagtgcaatggcacaatctcagctcactggaacctctgcctcccgggtacaagcaattctcctgcctcagcctctagaataactgggactacaggtgtgcaccatgacgcctggctaatttttaatattttaattttttttgtttgtttttgagaaggagtctcactctgtcacccagtctggagtgcagtggcacaatctcagctcactgcaacctccgcctcccacgttcaagtgattctcctgcctcagcctcccgagtagctgggattacaggcacacaacaccacgcctggctaatttttgtattttttagtagagatgggtttttaccatgttggccaggctggtctcaaactcctgatctcaaatgatccacctgcctcagcctctcaaagtactgggatttcaggcgtgagccagcacacccggccaaaatgtaaaatttaaagggctaagtcctttacctttcagtttcagtccagagtgtacactgaaccagtaaaatgaaaagttcctttttctaatagagcataatttccaaaagatcctactagaataatattcaatgtttgtctctcaaaagaccacaatctccctgatccagtggggaatatgtctggggcaccatttgacctgtagatttgcatacttatttgggatggacagaattcctgccagccttgtttgagagaatcctgtaatccagaggctttgagaaagagagaaaaagttggagttccatcaagatctagaaatttccatcccaatttatggtcttcgacctcaaaatgtgacctgaggaactccatgagggcaaagccttatacctcattcaagtgactgtcaccctctcgaccacataaaggctgcgtgagcgtgccacgtgcttcaaggatagagaattaaccactgcaactcagcaaatacacaaaatcccagctagagagctctgctctattttctccctccaagccaaagcaatgaggctcccattgcctcatcgcctcatctgtctcttctcagaagaggaaacagaacaacctccccacagcaacaccgacacccttggccatctatttcccacagacacccacatttgaccagctatcatgaaagacgcacagtggttctctgatgccacccttccaaatctctaagtaaggagcacatcctacctgtaggtagaaccctacagcatcctaccttctctgactgtgaaaacaaaccaagcatgaagaccatgaatacaacagccgggtctcctaagggagagggaatccgtgaaagcaaaccaacagacacatcttttaaaaggggaagaacacacagcattccacactcacatcttaacaagagttggcaggccaggtgcggtggctcatgcctgtaatcccagcacttcgggaggcctgcgcgggcagatcatctgaggtcaggagttcaaggctagcctgggcaacatagtgaaactccatctctactaaaaatacaaaaattagccaggcatgatgatgtccgcctataatcccagctaccaggaggctgaggcaggagaatcacttgaacccaggagacggaggttgcagtgggccaagatcatgccactgccctccagcctgtgcaacagaacaagactccgtctcataaaacttcccaactgaggtctttcggtttacaaaggcagccgttgataaagccacatgagtaaatgagtttagagagaaactctaatttcttgcttcagaatttgcaatgttaagaaccacaaaactccaaatataagcaacttattaaactgttttttgattatttcaattcagcacacgctgatagaaacctcgctaagttccagcacattactgcacactcttactgccatcactaaattgacatttcatggcaagtttatttgcccaagctctgacagaagcagctttctctctgccccatcctcacctgaatctccaggtaacctcttcttacataaaactgtaagatattaacttgattttaacacttctacatcctctttgcccacaccataaatgaaatgccaagattaaatgccagaccaaatattagccctctctccagccacctcacccaggccccctgcaagaatcgaaagcaatcaataaggcttccttcctcaatggtggggcaaaggacaacgggtagcctgcagagaatgtgacaaaaaagctgacatcgcagagttctaccatgccccatccaggctggcgtgtgcctgctcccaccccagggagctggcacccgcagaataccacctgctcccaaaggcttcttgctggggtcagttctgcgggagagtctgtatttgccagtcagtacgtttggagtgatctagctgccactaaccagcctttgccccccgggatccctgttgtgaaacaggaatgaaaagctgctttgtagcaatcaaaagctcattaaacagtagctaccaaaggaagttttgaaatctctatcctggaggaaaggacaggactgacccctcctttcatcaggatgggctcagggtgcacggctctgtctggagatgcaagaggaagtatgggaccaacgcacaataacgactaacagttgcatggtactattatttaaaagcgctgcctctcctaccacctcctcctccccatagtgctacaaggaaacagtcatcaccccattttacaggcaaggaaactgaggctcagaggttccatgccttttctaaggccatagagttagcaagggtggaaacagaacttgacacccctctccacgtaatttccacctgaacctccagagagggcatctggcacagagtagagacccttaggggttgtctgtgacagcgatggtttataagaacaggatgagatggctgctggggacacgaaagcggcaaaaggaaggtgcttcctcctcaactccgctccggttccgtgatctgtcaactaaataagcccacttagaaaggctgtcgctgtgacccattacctggcacgccaccccaatcccttctcaacagaggggctttctgcccccctccggtgagatttcgcaactctagagctggcatgcagagcccgtgtcagggtaggacaccaagtcttacactcagagcaagaaatggaaaagaattcactggcagcaaagtcaggagtatggaaaatcaaatgagccctggccaggaagcctctaagtcaagaggcttcaagttcagaaccccacagggctctacggagccgagaccttgtgccaggaacaggtacaagcatgacaacctaaaaggtaatggtcaggctttcaatatcctaacgtctctggacgtgcagaatcatgtcatttaaatgatgccaccacagccactccttatcacacacagaaacaaaaattccatccagaagccacagtgtgatggaagccgagactgagatgcagccttccatcacgagcaagtgagcaggaatgactgaatcttgacagcttcagtaatgaattaacaggttaattaattaactaggccaccgcttcttcatttacttaaccactactttgttcccaacccaggagacagtccaaacttcacactccagctgtggtttgagggactccgccgtgcctccgtcccctggccccagctcagctatcacactggagcctttgtcttcctgggacagaggctgccccaagcagtcaacaatttcagccattcctccttcttccactggggatgggctgccaaaagctcccaaaactcccttccaggtgtcaactccacattcgagcttatcagtcagtgcttggaataaaagacgcttcattcttgaacacacacctgaggggggacttcgctctggtacggattcctgtgcgctttcaggctgtgtcctatcatgtctggggctgagttacaacagatttatgtcaagggctagttgacagtgccatgctgatctgccgccatcaagtcagggctggtagtgatgcctgacccatccagaagtgacatgcggcctctgatgggcccccaaacaacaactgcctgctgcttacagctttcatttgaagggatgcggacaggcagggggaacaaatttctggaaagttaaactgataaaagaccgggcacggtggctcatgcctgtaatcttggcactttgggaggccgaggcgggcggatcactccaggccaggtgttcgagaccagcctggccaacatggtgaaaccccatctctactaaaaactacaaaaactagctgggcatggtggcacatgcctataatcccaactattcaggagacagaggcaggagaatcacttgaacctgggaggcagaggtttcaatgagccaagatcatgccactgtactccagcctgggcaacaaagcaagactctgtctcaaaaaacacaaggagtggagagaagacatatctggccttgacaaaaccagaggcaccatttccacttccactgtactttgcccccaaaatatcaaatgccaggcaaaaagcttgacatacctgagggtctctggaaatgcagaactggaatgcccaaaagaagcaataattcacgattcaaagccaaatcgtctacatgagtgaggaagagcaactagtcttttaaggtcccatctttctcccgcacattctgtcttctgcagcaaagaactgaaagcagggtggggtgacagcagcacctccttagagtcgggctgtggcagtcactactgaaacacaccacagtgaacatcaaatgaagaagtccgcttggagagcaaggagcattcatacagataggcgtggagaacacccagatggaggccccagctccagaatgcctgctccaagcccttacttagcaaatcacttaccccagctgaacctgaacttcctccactgcaaagtgggggaggggaggggtgggcgtaaagaagccaactccatgaacttcaagtcctcaaactccacacccctctcctgcaagtccaacagccaaatcagtctcaggatggccttgatgacagcattaatcaaaggtggaaacctcagcaggaaatgtcaatgtcagcctctggccacgtctgtaggtcccaaaatggctttttttttttttttttttttttttgagacggagtctcactttgtcgcccaggctggagtgcaatggcacaatctcagctcactgcaacctctgcctcctgcgttcaagcgattctcctgcctcagcctcctgagtagctgggattacaggtacctgccaccacccctgggtaatttttgtatttttggtagagacggggtttcaccatgttggtcaggctggtcttgaactcctgacctcatgatctgcctgcctcggcctcccaaactgctgggattacaggtgtgagccaccgcgcccggctttcttttttcttttttgagatggagtttcactcttgctgcccaggctggagtgcaatggcatgatcttggctcactaccacctccacctcccaggttaaagcaattctcctacctcagcttcccgagtagctgggattgcaggcgcccaccaccacacccggctaatttttgtatttttagtagaaacgaggtttcaccatgttgaccaggctggtctctaactgctgaccttaggtgatctgcccgcctcggcctccccaagtgctaggttacaggtgtgagccaccatgcccagccccaaaatggcattctgtttgtttaataagacttctgattgagactaataaaagctattaaagatccattctaaccctcaaaagaatcctggtttggaagggaggaaaccagcatttgttgctggccacctacctgccagcctgatgttttcatctgctaacccaactgatgcctcgtaactaatgtagtgagctgaagggtgacctttgagaaggtacgtccacgtcctaagccttggaaactaggaatgtgaccttatttgaagaaaaaggtctttgcaaaagtacttaagttaaaaatatcaaggttagctcatcctggatttacggtgggccctaaatccagtgacaggtgtcctcacaagaggaagacagaaggagattttgagacacacagtgagaacatgactacatgaagatggaggcagagattggagcggtgcctctacaagccaaggacagctaccagaagctgggagaggggcgtggaacttgccaacaccttaattttgaatttttaggctccagaactgtaagagaatagatttcttttgttttaagccaattagtttatagtaatttgttaggggtaccctaggaaacctaatacaaccatcataggaatgaggtaagtatcatcattccgattttactgatgataaaacagagcctcagaaaagctaaataatttgtcccaattcactaggggccccaggtatggccacggacaaacctgctgttcattccacggcataagccgctttttttgttctaacattcatgagttccagttccttcatttttggacacaaggaaagtgcaatgagtcatcccagcattgtagcttcacagtgacaggacctcagtcagaatccagggctctggtaccactcaatgatgaacgatggtgaaggctcgccacctcccggagccacagctactttaggggagcccattttattatcgccacaattaccaaaacgtggagcatcacactaattttcccttgcagtaaatagctgaaaagtaatggtgtcaattttaatgaggatcaagccaggctcctaaaagggctcccataaatgaaagcatttcccttacacacaacaatggcttgccgtttaattctagaacacaagaatgtcacttaaattacacggcttttacattaaagtgcttatgggaatgcctttccaaggaagaatttcaataaaaagatctcacccatcttgatgcttcataatatctgaaccacaatctatgtatcatagaaacaaaaataaaaccccaaagaatgtgggcaagaatgggacttcgctttcactgggaaagggtttctgattttctgtgaaacagagaggtggctgaaaagctgttatcacacagcagtgtatcacatttgggcctgtgggctaccagaaattcactgcttaagcttgaatcctttttgtttccacttgctgagatgttcagaatgactgccaaccctgtacgtctatatgagcctctttagctgactcaattcttattttattagtgcttcgcaaagcaattactagggttttgagcagagatgagagtatttcacacttccatctttactgaaaatgccttttactccactgacttttggcttctatttataaagaaggttcaaggcttggaaaattattggagttgagctttaatggatattcccaaccagcattgtgtcattattggcccgtgtttagctgggcgatctcccaaatttgtgacataatcaggcctctctctgcattactccatacactccacgctctctctacattacaccactgaatcatacgctcttttcaacaagactgattgccaggggattaacattagacagcacaattccattattcagcagcccaattcaaatcccaaccctaaactctaagagagatttcagggcttcacagggatgagccgccagaaagctcaaaggggaggtggggtgaggggcttttgaatgttttacataacaactcaacctaaaacttgctttaagcaagagcccagaccggagtggccgccatctgactccacgatgcctagaatggccccagcccagcctaatgaatgatgtgtagacctatgcaaagctataatcccaaaagactgctatagctcaattattttttcccacaataaattacttaatttcaaaattaggtatttagaacatttagcccaaaatctctctttccctaaatagaaatagttttacgtcacattcggtacacacaggaacccaggtaaaggccaagtcatatgctctttgatcaatggatttacagtgtatcaatgccaacacaaatgttaatcattttcttctcaaatttgagtgttacttctctttttgtttgttttgtaaaatatctgaacatggtaattctcactaagaaacatgccacatgttttctctatggggaaagagctctaaaactcactcttttatgaatatctataggatcaacattattcaaggacctatcaaatttcacatgaaggcttctgaagaacaaaactcaaatcttcgaataaacactattttccctgaatgcttatatgcaaatggaagtaatggttatatcatgctttctaaggcagagtgtctcgtagatccaattccatttaacttgacagaaaatcaaaatagttttgtttacttttcagttaacctaaaattttaattaaccaaatctttgcaatttggttaatcaagcttttggattatttttttagtggctttttgggcaattccaatatgtaacggggtctccctcttcaaagatgttttattgaaggagacccacacatgagatgatactaggcacacacgcacaggctatgatgtaggagacacttcgtttacagaggcacagtgggtggtgtgggcttgtggaattaccaacagtcacattacggcaaaacgtgagtgtgaactgagttgagtctacagcagaagatagcaacctgtatttaggggaggacaaaccaaaagaaggctcaaggtggcaggttgaaagtcaaggcacatgacaggaaagagaaaagatggcccctacatggaagggatcttaacctgccatcctgcaacaatgaagtatgtcttgggtagagttccatatgttagcaatcctccaagacacagaaacctcctttcttcattagttacaacaaagccccatcatcacaggcaaaacctgggaagaaacttgaatttccaagacaacaggcgaggtggtcttcaatgtttaattaaaatggcctacttatctgtgcactctgacaaaaatgtatttataagctcatatacatggttccctttgcacagaggaaatagatgccaggaacagacactgaattggtaccgtctaatgactttcttgtgatggaagtgaagggccctcaacattcacctttttccagccagccacaggctcagtcctcagaccttttcctttactcttcagctggccttctacagttgccctgttggggaaatgatgcttctcttttaaaaccaaaggtctgctacagcacatctgtacccttttcacctgcccaattaacattttcagagtaatctcagcttccaaaatgtcagacatttcataccacgtccactttacacagatgacgcttgggaaccatgaggatcatgcaaagctcataaaccctggctgcctggaaaacagaatattgtcagatgacagaagcagccttgtaaaatgatagtagaaagaataagaatgaaccaattctcctgaaacttatgggagaaacaggacttaacgttcatgctttcaaacgagtcaagcaagaatgggctggtatgcagccgccacacgaggagaggcaaactcacccacaacatccaggtggtacgtgtgattgatggacccgtattcattctccactacacaggtataatttcccttgtcagatgggaccacactttccataatgaggctccagtgctggtttcgtacctgaaaagatcaaagcaaaggcggttatttaacaatcctagcacagaataccaagtactgtgctttcttgatttaaaaagaagctgaaggaggcaagaaaggtatggaagaatcacctaaattctaaattgataactgtcattaagaatcgtgagaaatgaaaaccatcatcatcatcatggtgaacacctgtgaagcaaatattgacatattcagatctgcaggagtattcggcagtgtacagcgtgggtctgttaccataatggatttgagggctcctctaggagaggccaactggccagggagcctgaacaccagccagcctggtaccaatggccacgggcaggcgagctaccagtttgcccatccactaggaagcctcagcctctatggcatcacagaaccatgtagaactaacatttatagtgagcatttactatatgccaggcactgctccaagccctctgtgctgccgtagctaattcatttctcctaaggggctcatagttctcagatgttgtctggatgtctcaagaagtttcagctgggaacatcagtctgcccttcccatctctggttgtggctgaatagatatacatgttcctcagagaaatacccagaattccaaatatggcggcaatgaatccttacaaaactcaagttgtatatccgtccgttcacaaacttcttgagacttttcaaagataagcagcacatgtgaaaatcagctgttgtgactcctacccaaggtaccatcaatacacaaagagacgccattcttatgttctccccctgcttttcaaatatttccatagactcaaattttcaaacttgcgagagttttccttaccacaaaatgcaacatcttgtatcttcagggtttgaggctttagtatttctatctgaatccaagtcattctctacaggtgttttggacaaggcactccagtgaaacgaaatgaaaaaataaacagtcaaggcctactaaccttagctatcatttcaggaatttcaactgaccttctgagccatgccctgggcattgcaagtgtttttgggttaatcacgtaaaaaacaaatacaggcagagcatctgcaagcacatgagtgatataagaaactagagaataaagaaaatcatctcgtaaccactccactataaaaacaggagggcagagcagctgtccactttgcaaagcagcgccagtgattagcctgccaacagagttaagagatgcgaagagcacactggagtgccacggttttcatgtcagccactcagttctatgcaagccatgactgcagggtggaggtactgctgctgagttctaaaacgaggtcgctgctcatcactgacagtcttagaaaggatcactggatgaaggttggcctccttcctccttaacagagtacaagcagtgagttaagatagttctggtcagccactttgctgggctgctgcagtcatcgacaactacgaaggtagtttcagagtctaacagcctggagctggtgatgggaaactgatcctcactgtcgcaggtaaaatgtctggcagaaaaatgaatctacgggcatctgatcgacagtggagagtctttactgtatgacaaagactcgctttctgctcttggttgagccgtagacttgtaacaggacccagacaacatgctagcgcgtctccccttaagagagataagcaccttccatgcagaatgtgtcttctgaaggaggaggagatatggatgctaaatcttccagcgcaatgagaattccctacctaaatcctggatccctgggtgctacaacggcatcgttatgctaagagcatgggacacataggtataagctccttgattttacttgaggtccacagacccaaaaggagaccctcccttcacctcaagctctcaagggtaacagaaatgattctctctttgcctacggggaaccagtcatgtggcaggtaacttagggatgtagccacgggtccccacgtcaccaagccatgtaatccagcatttatccctgctgtaaatattcagttctttgagcccccgctcaaatgtcatgcccataagcccttaatcacggctagtgcctgtctctggaccccattcaaactgtcaatgtctttcttgtgcctggatccagatttggcacatggagtattccaaatggagctgaacctgaactgcacagggaggggacatcgcctgactcggctgacacattaaatcttggcatatgcagcttggctcactgctccctttttttaaccccaggggatatggtcagctcaagtctctcactggggccatggcattccatacaagatccctcttcaagagcacgtgctctctgaatatttacttcctggagatgcactacaaatattaataagttaacgtttataaaaatgtttttacaatgagaagcacaattaccaaacagggtgtttctgtccatccagaaatcttggtactagatcaatattgccccatgcagtgctgttaatatttattttcttacaccattgctccagtatttgatttattgacccaaattttatgagctgtagcattttccaaatggatgctcttaaatccaccaacagtgggactgctggacacttttgtaggggatatcctaccattgattagtggttgcttaatagcaagctaagaaactacaatagttaactttataaagatggcaaacaaaagcacaaagtttgggggttttttttcattactctatttccatatggagattcagaataaacctaaagaaaccactcttccgacgtaatatatacaacgcgtgtttctaaattcctcagattttcagtgctacaattcttttgccagttaggccaaatgcacatacaccgtctttgctttcagagaagagggaatgtaaatacccaataaacatatgaaaagatgcttaacctcattaacgatccgggaaatgcaaattaaaacaataatgagacactgttattcaccagctgattaacaaaaattagaaggatcaatgttattcagtacttggtgaatgtgtagggaaataaaagattccaattgagaatgggaacataaattgagaaaaacctttgtgtaaaataacttgctggtacctattaaaattagcagcacacattttttttgatctagttaattctacttctagaaagctagcccacagaaaatagcacaattacttcaaggcacatgaacaaaactgctgcttcaagcactgcttgtaagagcaaaaaactgtcaaggagagagacattaagaatgcatagttcatcctgtatgaactgatggaaagttcattcaaacagcgtagtctatagtcataaaaagaatgaagtattatgttcagacctggtaaggtatcattaaacagttattgataaatgaaaaacagttaattcatgattccaatttatttaaaaaaaagaaaaaagcagacacatttaccaccctaaagatgcatataaaactgaaagtataagcctgactataaacacagctaaaatcagaaagaaaatataccaaattgttagcaatgtactttatataattaagcagtgggattatgggtattgcctacttttttcttatttctacctttcaaacaaacagaaatctcaacacacacaacaaaaaagtataataaaacagatccttagataatcattcaatagtagctaccccctgcagaaccaatggatctggcaaaacaaacacaaaagccagtgagagaagaaattctgcaccaaccaacacaagcacgactctttttctttcctgctcatggccaaatctttgtggaattcatcattatttttcatctgccaagtaacagaacaggagagcatggacttcaaaactatgttcactaaagacttttttaaaataacatttcaatattgaaacaaagcagactgaagcaaaatggcctaaactcccaagtataatacaagaagcggattccatgaacattccacaccctatccacacaaagacacaaggtggcccagacaggtttttcggaattcttctgttaccttcattcccccaaaatgcctattaaatcccaggctaccctcaggtgacaactgggaatgtagatttagtttgttgacaccaaaacaccgcagtgaaaggtgaagggtgaaaggttaaagacccaggctgtcacctggatatttaccttccacattgcaaaaaaatccagacatttccaaatactcaggtgttcgataacaagcagaataaacatgcagaaggtgatacaaagttttattctgtgccaggtagaacgctgtgtccatgtgatatcagaaagatattcccaagcctttctcccgccagtatcagcacccaattttcccaggaagacagcaatctcttgtaatcctggccttcacagaggcacccaccccatgaacagatcagttcattcaacaggtgagttgccattaaaatgcaaaaaatctgccaggtgcagtggctcacgcctgtaatcccagcactttgggaggccgaggcgggcagatcatttgaggacaggagttcgaggccagcctggccaacatggtgaaactctgtctctactaaaaatataaaaattagtcaggcatggtagcaggtgcctgtaatcccagctactcaggaggctgaggcaagagaatcgcttgaacccgggagacagagactgcagtgagctgagatcatgccactgtactccagcctgggtgacagagtgagactctgtctcaaaacaaaacaaaaaacaaaaaatgcataaaatcttattctcccatcccagtcccccactttcagcaggtgcctgggggacttgaagccatcctttctgaaagcatttgtgccaactaaccttgcatgtcaaggacagaggtacctgctgttgctcaccaccatgcagatgtggaggcaaacacctgttaatgcttaaactccaacattgatacaagaagtttgcttttcaggaggtgtccagagaacagggccgggcaatctgatcctcgggaccagtggcagaaactcttccctctgctcggtaaacaaccactggatctctccagaggaggtgggaagtgaattacaacaagccatgttttcttagaggcccgttgcttgtcggtgctcacaaaggtggctgcggcaggacatccaccgcctgttgaacttagctctttaaaaatgtcacgatcttccccatttttgcttttgcaaaacagacaaatgccatatggtcctgcaattccactcctaggtatataccagagaaacttatagcaaggactgggacagatacttgtacaccaattgctacaatggctattcacaatagccaaaaggtagaagcaacccaagtgatcatcatcagatgaatggataaacaaaatgtggggccgggcacagtggctcatgcctgtaatcccagcactttgggaggctgaggtgggtggatggcaagttcaggagatcgagaccagcctgaccaacatggtgaaaccctgtctctactaaaaatacaaaaattagccgggcatggtggtgagcacctgtaatcccatactcaggaggctgaggcaggaaaatcgctcgaacctgggaggcggaggttgcagtgagccaaggttgcaccactgcactccagcctgggcaacagagtgaaactccgtcttaaaaaaaaaaaaaaaaaaaagtggtatatccatacaatggaatataattcagccataaaaaggaataaagttttgattcatgctacaatatggatggacttttgttaagtgaaataagccagacacaaaaggaaaaatatcctgatttcacttatataaggtacacagaataggcaaattcatagacacaaaaagtaggttagaggttaccaggtgcagtgggggaggggaaatgagtacttactacttaatgggtacaaagtttctgtttggagagatgaaaaagttttgaaaatagtggtgatggttgcacaacaccatgaatgtaattaatgcctactaaacttgataatgacttaaatggtagattttatgttatgcatatattaccacaataaatgtaaaaacctcataaccagctgggcacagtgtctcaagcctgtaattccaatactttgggaggttgaggtgggaggatcacttgagcttacgtgttcgaagccagtctgggcaaccaagtgagaccccgtctctacaaaaaatttaaaaattagccaaatgtggtgccatgcacctgtggtcctagctacacaggaggctgaggcaggaggatcacttgaacccaggaggtcaagactgcactgagccatgttcgtaccactgcactccagcctgcgcaatatagagggactctgtctcaaaaacaaacaaataaataacccacagaggtcttggaagttgaaagaacagcatcatatccccaactttgctctcaactgtataccatgggctagatctttgcatgcttttggggagccattactttcattatgtttctcattcaacagcaacagtgtttttacaaaacacggaactacatttgaagcaagcagtttagcaagagcataaattctggtgcaaaaccacgtaggtccaaatggcagctgtgccacctatgaggtaggggtagggcaagccctcaaatgtaaaagggcaaaataacagtgtctgcctctttgggctgtggaaggactgagcaacttgctccatgggaggcacctggtaagtcacgacgcaggggagcagtccataaacgttggctaatacaaacatatacctgtgtcctcatcaaagactgcttgatgtgggattaaagctgaaatgtcttcactgaaaaaaaatctccataaagtataaacatgctgataagtacattagtcatgatttctccccctaaacatacttgtggattaagcataacatttcatcaaaaagtctttaaaatgacatctaagtaactaacctagaaaatgtaaatctaattaacctatgcttcaaaacaaccagtttagtagtgattataacaaaagttttaaaaatcatcttttcttagatctgaaatatacttggttcatgctcaataatgctttactctctgctgaggggctccaggggaacctgaacccctgtaatacccaacgctgagggcttctgtgccaatttcacagtcacgttgaatgagccctctgtcctgcgatctctcttggtctatgcaggcacttcgaagtggcataaaagatggtttttaagaaccccctatgcctaaataattacctacgaaggaggtgagaattgaggtggtctattaattatctcagccagcttcttgcttttctgcattaaattgcaataactgtcctgagccctgtgaaatatctagccatgaaggtaacctctttattaaaaaaaaaaaaaaaaaatctgtgctgttgtttaagaagagaaatggctgatgctacacgatggtgatactattaaattatggttctcagagcctgaagggatcaggattattcagccaatcttcccattttaaggcaagggattctggggcacagagagctgaaaaaacttgcccatggtcaagactgacgcaaaagcccaggaataagtatgattagggagatagagttatgattcaagtcctttactattatatcaatcacatattaataacatccagcaagactttgctcatgcactttaaaaataataatttgattcttaatcacctaaggatggctcagcatgggttctttgataaacaagactgaactgccgaattccaaatagttctattggtcatttgaatgaaaatgagctttctgtcacatttcataattctctttgactttgttttgctttttttgtcttccctcctccctttataggccgcacatgcatgccatttcaaaacaagctgtaatgcaggggatggctgccgaggtgcccaatccataaacgggtagaaagaatgagatggacaggccaccaaagcacaatcatagtttatggaatgaacagaattataaaggaaaaagaaaaattgcagaaataacacacatttgtttgaagaagtttttcaggtatttgctttctggaaaaatgtatcttggaaaacttgacattttgcttcttcattaaataaactggcaaatgggacgggtgcagtagctcatgcctgtaatcccagcactcgcagaggccaaggagggtggaccacttgaggtcaggagttcgagaccagcatgaccaacatggtgaaaccccatctccactaaaaatacaaagttagctgggtgtggtggcgggcacctgtaatcccagctacttgtgaggctgagacaggaaaatcgcttgaacccgggaggcagaggttacagtgtgctgagatcatgccattgcactccagcctgggcaacaagagcaaaactcagtctcaaaaaataaaaataaaataaagcaaagtggcaaatggacaggagtcaggaatgaatcagttagatgtcaggccctctgagtttcaattaggtctctttgcttttgaggaagtgccgaggaatgaaaataacaatatagttccctgaagtcaaatgtgcaaaggtaccttttttttcttttttttttttttgacagagtcttcctctatcatccaggctggactgcagaggcataatcacagctccctgcagccccaaactcctgggctcaagcgatcctcccacctcagctgcttgagtagctgggactacaggtgagcactactacgcccagctaatggtttaaattttttgcagaaatgggggtctcactatgttgcctaagttggtcttgtgctcctggcctcatatgatcctcctgcctcagcctcccaaagcagtgggattacagtgccactgtgcccaacccagaggcacatttctttaagtctacgtaggtaacgaagaaaatatcagagagaaaacccaacaccagggaccattctccccaaagtctgccttggtcaggccccaacaaggactctctgaggcaaacgcaggccatagccagccaaggagctccccatgggggaggcccacaggtgggaatgagcctctttgagctccagtgactccaggacctggggttggcttaacacatcattagcgaagatgatgccttaggtaactgaaggaaccttcccaggagatgagaaatgtgtctttccttttcaagtcccggaagcccttgggactcagtggaatttctaagagtttctggcatctccaaaatgaacgttcaatgccactgctgttgtgaaaagcccttgatcaacctaggctgaccacctctgcaactagcgggccaacctcccaggccgccccaccctacagccatagcctttctccaccagagaaccagaaaggagaggaccacgccagcacactgcatccaaatgtgtggccctctgccgcttttggccttttttttttttttttttttttttttttttttttggtaaagcaaaatatattttaggtttttgtcccacacactgaaattccatttccttttccctccagaaacggctcagcgtgatacaacaaaatcactttggtcatctgcactccacaggggcaggctaaaggctttctgctgggagtcctcattttgcttttagaacataggtgctcttcatctagcgaaatgttggaatcaataattaacactgaactgcacctgttaaaaatcaggcagcattttctcattaggccctcttagtctcttagcatatttgtaatcactaattcagatttgcaaaaagctccttccccataataatgatgtcggttccatttattttgagcccaggggtctctggagcctcatcagctcctctttgtacttatttacaaggctgtcttaattgacaaaattagttaaccaccaggattttgaccaccattctcacactcagattgtatttaaataaatcattggaactgcatcaattatgtgagtttcagaaagcatttggtggttaaaaacaatcccaggggccgtgattttagtggcttaactcttcctttctaaccagcatccccccatgaaatccttaacttttttttttcaaaaagatttcttttaaaagggccaacctttgaatctcatcgtatctggtctaaggactgaactaagaacagaaggacaaatcaccccctgcctcctgcttccaccaccaagtaggagttgtggaaaacaaccaaagtatttctactttcaagcttcaacagtacccacctgctagcagatctgcctcataactgtttcacatgttcactgcccaccatgcgttcttagaaacttactcataggctgtccccattttcctctgaattttggcctctagatgttaatttctaagtgttaaaacaaaaaggcaaaaacttttgcagaagaaaataatcctttaaagatgaataactgtctaagaaatttcagaaaagggttgcagggcatttttaggtggaaaggaggctcatttacctacagcaatgatggagctaaagtgatgctggtgtgttaaagacacgtgagacacagtcctggacaccccactgctgctactgaggaatcctccctacctggctgtaaaggacctgaggtctgagctaaagagcgtcttctattcctcccaccatgcagttttcccagatgggttccggtgatccccttgtctcctggcattcaggtccttgggcaacctcctccctagtgtcttgcttaataatggaaaaaagcaaaagtggtggctgtcccttccaacactaggttacaaaaggctctgacttctgcgatcctgctctctctctctctggctcctcctttgctcaacctgatgacagcagctgccctatgaagaggcccgtgtggcatggaacagtgggcagcccccagccaacagtcagtgaggaactgaggccctctgcaaggaagtgaatcctaacagcaaccacatgagcagttccttccccaattaacccttccaatgagacctcagcctcaacccttccttgcttacagtcctgtgagacagctggagatggaagacccagctaagccacaccttcattcctgatccaggcaacaatgaggtaataaatgttgcttaaagctaccataccttggggcaatttattatgcagcaacaggtaactaatatgcccacttatgttccaaatgcatcagagaatttcatcataaggtttccttcagtccttttcatatgctcaattattacagttctctccttccatactaaataatttggaaattccatctctctctttctgagacatctttccttccaactcagacctgaatcctttcctgacctcctttctccttattcttccaaacgccaatccaatatcacctttccatgtacatccatgggatgcaacatgctcctgcaacttcaaccaaacctgtgtccctcccattgccagagttctcctctgcctctcctgctggactggactaagagccccttggagctggggccatgcctcaccctctcatctccccagagcccaggagtgtgcctggcacacagggtgctcaatcaatgtctgctaagtggatgaacaaaggctagaggagcatgcgcgggcatctgcagggagacagctgccaatttcaaactccctagggagtgatgagactaaaatttcatggcattgtgtgacgtgctctcaagaatccttcaaggaggacagcagattgccactgtcatctccacgcactctcccttaatgcatcatatttcatactccagtctctaatccaagtcccctcactattcatgcaatcctgctctgacagggaaactatactgacgcttctcaaactccacacccgttttagttttatacactataaagcatatagaaaacagactctcaactttcgacccttctgttattaaactctcctcatatgaagaacaacacaaacgggaattgtactttaaaattacacgcaagtccggggtaatatttttttttaatatcaaaccctgacatgggcaattgtgacaattattgattcttgttaaagtattccttctaattcctgctaacttttgagcacttcaaaaaataaacaaaaatgtagggctgggcatcgtggctcacacctgtaatcccaacactttgggaggccgaggcaggcggatcacgaggtcaggagatcaagaccatcctggacaacacggtgaaaccccgtctctgctacagatacaaaaaattagcgaggcatggtggcacacacctgtagtcccagctactcgggaggctgaggcaggagaatcgcttgaacctgggagatggaggttgcagtgaaccgagatcgcaccacggcactccagcctgggcgacagagcgagactccatcgcaaaaaaaaaatgtaaataaataaataaacaaaaatgtaagaaatgtgatgttctgaaagcttaattctaccttgtagcctccaatgcgatgctcctgcttaaactccttcccgtttttcagccaccgcatggttggcattgggttccccccggctgggcagcgaaacttgacagtgttggccgcaggcacagcatggagccgcttttccatcttttctgtgttggtccagtatggtgctcctgttttggaaaacagtattagaatgtatactgatggacagcttcccctccatgagtaaactccaaacaggtaagatcatttcgctttgcatgtaaatgctaggctattttttaaatctttgggtaatatttacatttggaaaatattttcagaagtctaatccagctggctgagcagaaggtcccagagagggatggttcatgtctaccaacaggaagaaaaaaaaaaaagtgtttgaggccccttctctctcttgttcttgatgccagaaaataatttcatgccaaatcatgttttaaaatgctattttataaacatatgaacaacatatacaactgcgacagctcagtcctccaaaaatagatcattttggattgccacacctattaaatgatcacatatacacactagtaaaagcaagttgttctcaaaagccctatcaacttatccattggagccttactttaagggcaatcaatagtataaattgtcattctaatataataaaataacccagagagtcattcgtacatttctcagaacttatatacaaacaaacaaacaaaaaaaaaaactgtatcactaaatacatactaacttttttaattaaaaaaaaaatttctttccaatggtggttatgaatgccataaccctaccaccccacctaatgataacttaagaggaggctaccaattaaatgatatgttaaagttatgccctccagatgtccccgaaagtcataaatacaagtgattttttaaagtcaagaaaaaagttttaaatcacaaagtaaagtatattttttctaaataaaagccacaacatcaagccagaataccactgtaaattcttcatgtctgctaataatggcgaatgactactaccgactgaaagcttctactttgccaagcactgctcaaagagtttttacatgtcaacacattaatcttcacaatgcttcaacaagaaaggcactatcataatcttggcttccaagtggggaaactgaggcacagagcagttaagtaacctgccaaaagccacaaagcttggaagaggtgcagccaagatttgaaccacatcagtctgatgccagagcccactatcttcaaccctactctccactgctaagaagatgcagcttctccacgaggttggaatccgtaccttccaccaatctgatgtttaaggctgaagtccgggaaagccagcctgggtcaaggcacacgtcctccttttttcctgtccagaacctctactgtacagcaatttaactattcacatatatgtttctgtcttagcaaagtagtaaccaaaatccctgtattcctctgaaacagccaccaacagggacttgaacattgtagaaggctaattcataactatgcttatttctgatgaaggctagactgaacaacagcacacacagttcacaaacccaaggcaaaatggccctaggcaggggctttgtctctgatgcatatttagaagtctcctctattctacgggtgtagagcacgtccctgggggataaggatccccttcacttagcagccagactcagggtacaatcaggaattgaaatcgctgcatccaaacacctaccccaattagccttcacgcttgctcttgaaacctgttgtcaaaggtagagctgagatttctttacaaggccatgctgtatctttatccctgtgcttatctaagtgtcaaagtgatgggatttaggtgcacccatatgatgctgaaacagtgggaagaggggcaaaactatcgaagccaggagagaagaagaggaaggaggagaaagaaggaacaggggctgaattccttcctttgaatccagttgcatttgcaacctgggtagacatttggctctgggtgttgaatgcccataaacgcacctattcttttgagggttcaccagggagtacttgattcccattcatcccaagactctcagggcctggcatatactgaaacaatttcaataaactttcattttaaaagcttctacttagaaaaatccatccacagccacagccactaaaaagaaaccattgagagcacaaaacaaataatgagctttgtcactacacaaagacgtttacaaatctaacctaaatgaaaagcatacctcatgctgtcaggtgtctgcactcatgtcatttgtttaagtaaacacaatagcctattcatatgaattagctaaatattaatgcagtaactctttcagataacatcaattactgctgagctgatcctgtggaatgtcttttcttttttacataaaagaaatcaacagatatgtgcttacataccattaggcatgatttttatgttccctaaaaaaaaagtgggatttagctgaaggaactaggaatgttgttcttttctgccctcactgggccaagccatgggtgagtctgtaacagcccagggaccggcccagaccacgcgcacctatgcaggcctgacctgtggcaacagcccatgggcaacccgcacctttgtcttggtgcctcgggagtgatttaaggactaaggtgaaataatgttgctggaatttctggcaggtagccacttccctcgggtgatatttcaatcatcaaagctacacctataaaatctgcttctgcaaaacacagacacagccatacagcagggtacgggtgcagtgctgctcatctaggtctcagagatccaaggttgggggccaccataaaaaatccaggcacaaccctccacccaggctcccatgtgtgaccagccccaccctggtgactgctaacatcacaccagcacacagcctctctttaaatatcaagctcacaaatatgtttaatgaacttgatacgggaggggaggaagtcttttttttttttttcctttttttgagacagcgtcttgctctgttgcccaggctggagtgcagtggcgcgatcttggctcactgcaagctctgcctcccgggttcacgccattctcctgcctcagcctcccgagtagctgggactacaggtgcccgccaccatgcccggctaatttttttttttttttttttgtatttttagtagagacagggtttcaccgttttagccagggtttcaccgttttagccaggatggtctggatctcctgacctcatgatccacctgcctcagcctcccaaagtgctgggattacaggcgtgagctaccgcgcccggctggaactcttttataattttacaatagctcttcctaaaatacactagctttatgtgaaccttgaatctgtaagatctagaaaaataataatactataagatagccctactgtgtttccttcatcagcagccttgtgtcctctgtatgtttttgcagttggaaaggacacacatggaaatgccagggcctcccaagaactgcaaaacagctggagacaaacaccatccaggcacttagaacgggctcctctacctaaggaagccccttttataccaaggctcgtgaacagctttaacaactctcatttggagaaggaactcatgtaccaaattaaagatctactgaagcagagatcagccttgtccatagtagatgcttaacagggatgtttactcaacaatcttatctaaaatgaatctgcaggccaggcgcggtggctcacgcctgtaatcccagcctttgggaggccgaggtgggcggatcacctgaggtcaggagtccgagaccagcctgaccaacatggtgaaaccccgtctccactaaaaatgcaaaaattagctggacatggtgacgcatggctgtagtcccagctactagggagggtgaggcaggagaattgcttgaacccaggaggcagaggttgcagtgagccgagatcatgccattgcactccagcctgggcgacaagagcaaaactctgtctcaatcaatcaatcaatcaatcaatcaatcaaatgaatctgcaagctaaggacacatgagtttccctgaactttatataccttagaggtgtatgaagagcgggcttaaagtcagctaatagagacgtgtggtataaacttccaatggcattcaaaatgaatgacactaatccacctgtaaaggaaacaaattaacctcgatgagaggtatggttcctttggctctgacattcttagaccttctgatgtaataggtaccacaagaatgatgttctcctaatcatcaaatactaagaatgagctggttaaagaacagtcagacctagccacaatcaatcaatcccatcccatcaattaaatcccatcaccagcatatagcatacctactcattatcattttctacactgtaacagtcattgcacattagtaataatattaagtagaattttactttaagacaacagaagtcttttaagatgcaatgagttaaagagagatttataaacccacagaaacttccttcaaaggactccaacacagcctttattattcccaccctagagccaagttattctttctcagggccccttctttgtgatagatgtgtgcttccaacattagtgtctctgtactgaaaaatactccttctgatgctgaccaacaacagtagggcacctggagggtacagctggagttgtctttagcctatggagtaggcactcaagcgttattggatggatggatggatggatggatggacggacggatggatggacggatggatgactattaaaagctttagctataaaatgaagtagttgcactgattaaggtccccgccagttcgaacatactttccaggtatctatgtgctagacaggtattgattctgtcaacaaatggtaggattatgtgatttcttttgaccctgcaatttaaacttagtgagaaaccataggctgctgggcctgcccccaccaaaacccttgcacatctcaatgctgacacctaaggtttataatctactctctctctctctctctctctctctctctctctctctggaaccaaaaaacagagaacacggcccaatgatttaaaggagaaacatggaatcatattaccaggctgtaccaaaagagacctcggtgaccatctggcccaacgactgatgatatcaatgtcatccagaaaggttaagtgatttgatcaaggtcacacagccagaggccgggctgaggccaggcccatctccagctccctgagcagtgttccttcaaccactccagcctgccctttgaactctcccatggtaattaagtcaaaagttcaagatttatgtgagccgcggccaccaatgactgccaactgtatttttatggatgcaaaaaattttaaaaacacagcctgttccagctcctagattaagtctcacaaactctctaaagccccactaaagcctctgtctcgagtctataattagggcttttaaaaatatcactaatcaggacatttgaatgctttgactcctgacaggggaaaaatgtctcagagctccccactaccctgcagttctgctttcagtttggtataaactaagagaaaacaaatctaacaaaatacggagatgtgagtgaggatatgattatgagggggtatgtctgtggctttgagaaatctcattaaaaacttgctaaccagccaggcattcaatcagaaatatatgttttcaaaaccaagcaagttaaccacaagtgaaagaactgagcccactagcagaccagttagcccatgggaattcccaagatctgccttcaaaggaaacttctccaatcattggctatgctgtttgaccaaggaggagactgagaaagatattcagtccaaccattggatggaacaccatcaacagtatttgtgataaaataccaaaagcagctttttcttctttttaagagacagggtcttgctccgttgcccaggctgcactgcagtggtacaaccacagctcactgcagccttgacctcctgggctcaggtgatcctcccacctgagcctcccaagtaactgggactgcaggcatgagctaccacacctggctaatcttttattttttgtagagatgcggtcttgctatgctcccgaggctagtctcaaactcctgggtatacacgatcctcctgcttcggcctcccaactagctggaattacaggtgcgagctgctatgctggcccaaaccaacttattgatgatgttttcattacaaagggaatttctaaaaatttgcaaagcctgtgtgggttttttgttgtttttattactgatattgttcttttcaattcctagaaacttcaacacaactaagaagcctgctgttaccaacttaggatctctaccaagtaaaaatcccaattagaacaaaggtgactttgaactgttatcggcaggttaatcaatgaaatgagtttggaatctcaggctaactaccttcattttccctaggtacttccaaaaaaaatagcctttctccctgacatggagtgtgggcatctgcaggtctcaacaggaatgaaaccaaaatagaaaattactttttctctcatcactcgagagaaagaaccactttagcagcaagagtcttgatgcaactgtctctccatcacttccctcgagttaagcaatggacctgaacttttcgtccatcatgatcttctcaaaaactaagtctcaagctcttcagaaacattaatcaccgaaacaagctggaaacaataaaaatccctcgaacaaatgggtatatgcatctacctagttgctgccagataacccattaacatacctagtacctagggaaggcaagaactagttaacttatacttttctatgcgaaaggataaattctcaacccttcaaaaccctcaacctggatgcatttcaaaaattagcatatgaaactgcaactttctttctggagaaaatgtgttgcaccgaggggcatatgtaacagcattatttcctggcaaccaggcttgtaatgacatcacaggactgttccacttggaaacatctagtgctggtaccatgtgaggtcatcagctagtcagctgctaaaatatgaccagagaatgccctgcacatctgtgatgaagaaaccaacttaaaaagatcaatcaaatcagcccatggctgggtttttcaatgcatgtacaacatgatgttaatagatacagttttttgtttttttttttttttgagacggagtctcactctgtcgcccaggctggggtgcagtggcacaatttcggctcactgcaacctccacttcccgggttcaagtgattctcctgcctcagcctcaggcgcccgccaccaagcccggctaatttttatattttagtagagatggagtttcaccatattggccaggctggtctcgaactcctgaccttgtgatccgcctgcctcggcctcccaaagtactgggattacatccatgagccaccgcgcccgatctttaattcttcattgttatttttgccattgtatttggcacccaagcttttcgtactctgtacagaatctaaaaaacactctagcaggcagctgagcttgccttcttatgttaaccaacaaaattagatcaataatctagcaaatcagcagagggaataacctgcaatatatttttccaactggaagatacagaactaaattttcaatgtctcaatccaaaaggagaaaaaaaaaaaaaaaaaaaaaactcaaaaaagcccaaaaacgtcaccatcaacacagggtcactggagcatcatttgtcaaagttcctaaagaagaacatacaaacacaccccagtggcattttcagacaatcagaaggcaccaaagaaatcaatctggacacatgagtgttttccaggtggctgaaaatacaaagaatttggtgcttctgcaattttccctattaatcgggtcaggcatttgacacttgaggtggcaaaaaattgttttaatggcaacgtcccctttcctgccttgccaattaccccggccgtggcattcctctgtccacacagaccacagctgcttaatctcagccgccccaggctgcacctgtgaatcagaccagcctaatcacactaacagatggcagaggccaagtagccagctaagaaccgctatcactttaaatagcatctaatgtttcacagacaccaaacagaggcacctcctcacagcagtatctccctggtacagctaacactagcccttaatcactgcagagcacccatttcaggggcagagttgctgtcattcgagagctaattacaaaagaaccctgcttgcaaggtgaaggcatggcaagtacactgttggttggcattcatcacatgggtgctctaccccctggcccttctgcatgggcgctgggcagttaggaacactgttcacaatgcaaagcataaggtccacagcatataatccttctgaaccactcagcctgcctgtcatgtaatccataccttgctgttgcattctattgcttcacatggtttcacggtaacctgctattaggcaggtagccgacaaccaggacaacgcagttccccaggcatccaaaaaccaagctgacagaatctgatgtctcaatccatagcgagggcacccacatacagtaaaactggagagctgtaaacacctgtacaagcattctcactccacccccatcgtgaccctaggatgctctcaggcaacaggcctacaactgaaacgcagcccttcttttgcttgctaagccacaattttccattcaataaagcaagaataaatactctctccacctgatcgggttattggtggcatggacggaaccagcagccagcacagagcctgtctagtgcaggccctcagcatctttgcctccagcttcatgccagagccactggccaaaagaagtgagtgggccaggtgccgtggctcacgcctgtaatcccagcactttgggaggccgaggcgagcagatcacgaggtcaggagatcgagaccattctggctaacatggtggaaccccatctctactaaaaaatacaaaaaattagccgggtgtggtggtgggcacctgtagtcccagctactcgggaggctgaggcaggagaatggcgtgaacccgggaggcggagcttgcagtgagccgagatagcaccactgcactccagcctgggcaacagagcaagactccgtccccaaaaaaaaaaaaaaaaaaaaaaaaaagaggcgagtgacatgctccacttatcagtgctttttattaaataacaataatgataacctctttagaaggctggtacaaatcacagaagatacttccactcaccttattatccactgttttacgaacaagaccactaacagtaagctcccattcagggcagacctccacgtgcaaattctaagccagtggttctcgcatttcagtgtgaatcagaatcagccccagagtttctgaggcagtgggtctgaggaggaacctgagaatctgcatttcgagggagttctcaggtgatgctgatgctgctggtccaggaactttactttgagaaccactgccctaagcttcctcttgacaaaaagtaaaaactgcaccaaccaaaatatttctcttttgccccagctgctaggagactcagggacaaatctaagtcttcacttaagtaactcatttatccgaggcacctaccaatatctattttatctttttcctttaagaagacaggccgggcgcagtggctcacacctgtaatcccagcactttgggaggccgaggcaggcagatcacctgaggtcgggagttccagaccagcctgaccaacatggagaaaccccgtctctactaaaaatacaaaattagcggggtgtggtagcatgtacctgtaatcccagctactcaggaggctgaggcaggagaattgcttgaacccgggaggcaggggctgcggtgagctgagatcgcaccattgcgctccagcctgggcaacaagagcgaaactcccatctcaaaaaaaaaaaaaaaaaaacctaaaggacagtcttttcaacaaatagtcccagaaccactggacatccacaggctaaaaagtgaatccacacacacaccttacatcctttacaaaaattaacttaaaatagattacacacataaatacaaaatacaaaacaataatactcctaggaggtaacataggagaaaatctagatgaccttgggttgggtgatgacattttaggtataacaccaaaggcaccatccataaaagaaaaaccagactacatgaaacttaaaaatttctgctctgcaagagacactgtcaagagaatgaaaaggcaagccacaggtgaggggagaaactatttgcaaaagagatgtaataaaggactgttatccaaaatatacaaagaactcttataactcgacagtaagaaaacaaacaacctaattaaaaaatgggccaacggccttaacagacatctcaccaaagaagatacatggatggcaattaatcatatgaaaagatgcttcacatcatctgtcatcagagaaatttaaattaaaacaacaaaataccattacacacctatcagaatggccaaaatccagaacaccaagcacatcgaatgatgtggagcaacaggaactctcattcattgctggtgggaatacaaaatggtgcagccactttgcaaggcagctaggtggtttcctacaaatctaaacatactcttctcacataatccagcaatcacactccttaacatttacccaaagtaattgaaaactatgtccccacaaaaacccgcacaaagatgtctgtagcagctttatttgcaactgtcaaaacttggaagcaacagagtttgttttttttttttttgagatggagtctcactctgtcacccaggcaggagggagtgcagtggtgtgatctcgactcactgcaacctccgcatcctgggttcaagtgattctcatgcctcagcctcccgagtagctgggattacaggcatgcaccactacacttggctaacctatgtatttttagcagagacagggattttgccatgttggccaagctggtctcgaacttttgttcccaagtgatccacccgcctcggcctcacaaagtgctaggattacaggcgtgagcaacggtgcccagccgagatatcttttagtaggtaaacgggtaaataaactttgatacatacaaacaatggaatactcagtgctacaaacaaatgacccatcaagccatgaaaagacatgagagaaacttacatgcatcttactaagtcaaagaagccaatctgtaaaggctacacactgtatgattacataccctaaagtcaaccacacactttgggtgataatgatggcagtgcaggttcatcaactggaacagatgtaccattctggtggggatgttgataacaggacaggctatgcatgtgttggggaagattatatgggaaatctttgttccttcctctttattttgctgtggacctgaaactgctcgaaaaaataaagtattgccaggcgcagtggctcacacctgtaatcccagcacttcaggaggctgaggcgggtggatcacttgaggtcaggagttcaagaccagcctggccaacatggtaaaaccctgtctctactaaaaatacataaattaggctgggcacggtggctgacgcctgtagtctcagcactttgggaggccgaggcaggtgaatcacaaggtcaagagttcgagaccagcctagccaacatggtgaaaccccatctctactaaaaatacaaaaattagccaggtgtagtggcaggcccctgtagtcctagttactcgggaggctgaggcaggagaattgcttgaacctgggaggtgcaggttgcagtgagccaagatggcgccactgcactccagcctgggtgacagaacaagactgcatctcgggaaaaaatatatatatatacataaattagccgggtgtggtatattacttaggccttgtttaaatgtaccaaattgactaaaatccttttaagaaaaatgtagaatataccatgtaagcagagaatcccaataccctatgtacaaacactttaggaacattctagccaagtcattggaaaatgcaagtaatgctatattgtattttgtgtattgaataaacatttgcaagcaaccactcttctgagcactatacaactaggaactcatgtaatcctcataacaaccccagaaaatagtattattattattactcccattttataaagaaactaaggcacagaagtgaaatgagcaactcagaagttgtggagcaagattcaaacccaggttgcccagctccaagaggctacgccatgttcttcctcgcaagtaaatggcctctcccatgttagcgctcagtgttcatggccctcattaagcaagccacccttggctcccttttcaatcgtggtctacaaagtaaggcacacgtccttcattttcactcagcatgaggtgtgtgttgtaggaggccgggtttctcaccctagggatgattgacatcttggaccagataattctttgttatggggctgtgctctgcatccctggcccctccccagctaaaggccaccagcaccccctccctctgttgtgacaaccaaatattgcccaatgtgccgggagagcaagaataggcaattgccccagtcacacaccactggattaaaccaagcacaatcactgattacaaggaaaaccaagatgttacatggttctactattcttatgtctctgaatagggagaagtcaaagggaaaagggaaaatcaaggaaagaaaagtagtaactgctttgaaaaacgaatgaccagtgacacgagaagaaaggacaaacgatagagaaggctgtgcagcaacactggtttattctcaggtttgaaagtcaggaaagtagacacagcggggaaaggcaagggccgcgggacacagcatggcgcagaagagtcgacaagaagacaggtgacaggcagaacttccctccatgctcctctctcggggaccatcggagccgggcagttacttactcttgttgttactgttctcactgacaaaatcttccgcaccatcggtgtcatcctcatcatctccggatgagatggcatctgtatgcaaaagaacatattccatggatgtgttttttgcaaagcaaaaaggttgcaattatctacaactgagaccttctccatagcaaagtcaacaacccaggaaccctcgcaaagagcctgggattgttttcagttaagatagttttaatggcttaaattttccctccatgatgacagttggtctatgttatgattctcaatgttttctgctttcacgctatttaaacaggctataaaattggatatatgagaactggatttcaagcttcaaacagtattcaagcccctgacaaatttaccaattgtgtagcacccaaagactctttttccaacattaacctttcagtatgcggggtctccttgaagagagaaattgatccctaacaaaactcagtccctgtgtggcccttctcatcgtcaactaacattctgaaagcagaactttaaactcggccacaaagggggcctgttctgtcccgctcactgcatagaaggaaatcatggagagaaactcaaactctaataaatgaatcagaaatcttgagtatccaaatttcaaccctatattctaaatgccagagatgtcagtggtacaaaaaaaaaaaaaaaaaagcatgtatttacttaaataaaagcgtactatcttaagaaaaatgttactttgtgcacaagaattctatcattcttaatgatcggcctttctggtgcaccaggtcccaaagaagaatttcaaaaactatgaagctgtatgcctggcatccaattacaattagagatctcactaccttttcacttggccaaaaaaatgtaatggctacagagaagagagagcatagtgctggcgggccaactcacctgtgacattcaccatgaagtaccaagtttcactgtctacagtcctactggcagtacaagcatagaggccggagtctctaggcgtggcgccctttatctgcaagtactccccaataagcactgtcctattgttgggccccaagtgcaccccatccttagtccaactgatcacggcggcatctttcaacaggcagcgcacctctagcgactcccctggcgcagccacgtacacttctggttgagagatttggtatttggttggtggctctgcagaaaggtgggagagagaagacggagacagatgggaaggagggagaggagagaacgtccaacaaaggtcagtggaggcctgcttattcccaggagaagctgttcttgctctgcaaatggccccagcaggcatccacctctccccaagccccaggaagtcaggaagtatctggaagagcaaccagaggatacccccagaaaatctgtcctgacttagtttccacatcctatggggctttagaaacaaaccaaaccatagcatggaagaatattccacaagaaaatgtttaaattgattgccaaagcgtgcttgcactgtaatacctgcaaaaatctgttattgtggtatgttttatttgtaagaatgccgagttttacacatttgtacgtgaaacgtgactgtgcgccacacacacatacactctttattatttgtgctagacttggtctgttgccccaaggccaagcttcttaaaatgaaatgtctcaaactcaaggaaaactaagggatccctctacaagattttttgccatccagagttttcatgagctctcatgttcagatcagtactttgccggtttagagacctaattctgtgctgggtgagctgagacctgctgttttcccaaaatgataaaagcctagaggccttaacaccaaaaacaaaaagagcaaaatgcccagacagctgcaaggcagtctccgttgcacttacaggggtcctgaaatgaagccgctgggtgctgtgtgcccccgactccacacgacaaagctgagtcccaccctgctcaccaacacccaccacacatgtcccaggcttcttctgtagggacagtccttcctccctctcttccctgtcatccaccctccaagacccaaatcaagcagggtcctccgtgatgggagtcaccttgcatcagtccccctgggcggaagagcactggctccctccccctccaccatacacctgcccactttgccagctcatgggatgcaccatattctcatgaatgcatcccatctccccacggagacaccaagaccctagagaaaaggcgtgggtctcatggttctctgtgcttcccgccaccgaccccatcctgcttggcagacacatggccatgtcaaacaaggtcacagttcccagatatgcagcacgggattggacccacaaggatccaacccacacaacctctccactggagttgagaggacaccactggcatttattaataacaacagctggagcggccagctgggatggccacgagggcccaagaaggaggctttcatccctccagtgagaagtgtgaatgggacccagagttccaggcctagaaaatgcaaagcttcccagcactgagacagcaccaaatcagggcaggatcaaaggcaactgttttgcctagacacccctcagaagaacaaatctcccacaggagactgaaatcaagtcaatctgtgtttcagtcccactgtgaaaggagcaagggccacatgcattggggacaagaaatccccctcaccaccaccatcaacagccacacaggaggcccggggcttctcaagggggcatcaccaaaggcatgcatgccaagccccagatgccaactagcacgtgaacacaaagagagaatcacaacaaaaggaggaaaatagaagctaaatgtaacatggacaaatgcaccccaaagcaaggaaagcccagctgacgggcaggttatgtttctaacatttgttttctcactcagtaattatttactgcatgtctactatacaacaagcctattctggaagctccgcagcaagaggagacaagataaagaccctgcacttgtggagcgtccattatggtgggggtgacagacgatagatacaaaatctacaaaaaatacagtgttcttgcttaagcattaggaagaaggacatggcaaggtacgggcacacacagcagtggcagaggagggctggtcccttggcaggaggtggcggatgatggcccgcgggccaagccagccgcagcttgtttttgtaaacaaagctttattagaacacggccatgcccattccttattgtctggcgctgcttttgtgtgttacaagggcagagttcagtcattgcaacagaaaccctgtggcctgcaagccctacaatatttgcagtcttgcctttgcaaaaagtgtttcaatccctgttgtataagacaatcagagagacttctccaaagaacaggcatttgagctgagaagtgaaggacaaagcgaagtttaaaagatgttgggaacttagtttgaaggctcttagagcaggtctctcaaggctggttaagtcaaaatgcggctgaattgagtgactaatagaaatactttaaactatggagaccaaacagaaaaaagaaaggaagagaaatatgagaaggaggagaagacggcagggattcagtctggtcccaaatcttggcccatctcccactcccaacatcctagagtcacagattcactcaacatgagagctgaaggggccccaaacgctattggtccaacccctttgacagctggctaaggcaaggaccagatgtcctttgagtcccaggtctccaacaactcattgctgaaacagcacccaccatgttagaatgaatttacattggatcagtctgggtcataaaatgatcaatgtctattatgacaacatcacatgatcagcaagtcaccagaaatgttatggaatgtactttcctcttagccagaattgatcaccagggcagccgctgagcagaagcagcaaagcttccctccctcacagggaaggcacctgggacccacacaccaatctgctccatcctgaccctcagataaggtgcaaccatgtccctatgtcacgcagaggaatgctctaagactccattagggggaaaaaaagaaaaaaaaaagataagcaaggcatttgcaattgtgatgcagaaaaaaatctctctcccggcaaaggaggagttatgatgtatgatttcctgtttttaaatgaaagtgttttcattgagaatcctttccttcacctaaaatcagtaaaccccaaaatcttgctgaaactgggggtatctgagctgctggactaccacgtgctgttctagaaggaagtacaggggacagcgaggacctgtgtcttatttggagctggacatgggagatgcctggtgaagggtgctgccctggacgagaagaggatgaagccctgagttcccacgcctctccattcctgcttaaccttttggcctggtgttccccatctgttgcagggtaagagtacccaaatactggtttattattggtaagattccaatgagccaacgaagatgaacctgatcatcaactacaacatgtcgggctaatgactgtcactattactgttactcttcaaggcggaagatgcttgccgtgattttttaagcaccacgattttcagaggataatcacagaacatctgggtttctttttcttttcttttcttttcttttcttttttttttttttgagacagagtcttgctctgtcacccaggctggaatccagtggcacgatctcggctcaccgcaacctccgcctcccaggttcaagtgattctcctgcctcagcctcccaagtagttgggattacaggcgtgcaccaccacacccagctaacttttttgtatttttatgagagacagcgtttaccatattggccatgctggtcttgaactcctgacctcgtgatctgcccgcctcggcctcccaaagtgctgggattataggcgtgagccactgcgcccagccagaacacttggattgctatctccagatacaaagtgattttacaggagtcccatctcaatggacagttaagatgacttgacgtactaaaactgcttttgatcccagtaaaaccagatcaaaactgtcatctagatatccaagcttcaaggatagtaaaatatcaccccctaaaatacaccaatgagataatgatgtttatccataaaaatcaagccatcctgtcttcaaagtctcaaaccagtaactgctgtcttggtaaactgagaaagcaaggactcctccctccaccccttcagtggtcatttcacaaagggcccattttggggatcagcggtgcctttagtaaacatgccagtaatacccctgggtatcccagaagactctgcaagcacatgttagggagaatgcatgaataaacacacaagagagaaagaggttggggagaataaaaagaggaggatgtaagtaagaagagaggcagggatggggtggggccatacgctggggaggggccaaatgccacactggtagcctcccaggccacccagtggccccccaagcccagcctgcagggcccagcacacacgacacatatcaaagacaaccccggccagggggccaagaacacaagcacctaacagctggctcagtggaagcagctctgtccctgcccgtgtccttgggtccatttgccgtccacagggcttagcttctcttctgggtttgaatgctgcaggtgacctgacccgctgcccactccctgcaaacatgcactccctgagccctccatgttcatccccacagttgtactgacctggccccaggctgcgcggagccaggacaatcagagaatcccctgtgcctgcatgtgcaaaggggcctccctaactctggtcaccccccatggatggacaacctctccctgactccaccaggctgcacagcctgctctgtgaaagagcaaagaattccccaggaaatgtacataactccttttatagtcatgtgagcacttcctggatttactttttcccattgctgtggcatacttttcacctttcctgtgcgaatccaccaggggtgcacagcccaacatctccctcatctcctgccaaaacgcaatggggagaaggttccagaagccgccttgctatgcacaaatgctctttcagaggcttccacagacagagaatatgtttccatgtatttttcacaatatgaattaaaagtcgaaaagaagcaagcaagcttcacagtagtattggccaatctttgtcactgtttcctaaaactggtaaacaaacaaggcaccaagtctccttcctgggacacagctcaacactcgtttctactgccgtggccacactactgcagccctgctgcataaagctcagttgcatccacgtgaattttctcccagaagtttcaaatacttgggaagtaccagcagcgtgttagcaagcagccttttttttctttttttttttgagacggagtctggctttgtcgcccaggctggagtgcagtggcgcgatcttggctcactgcaagctccacctcccgggttcacgctattcacctgcctcagcctcctgagtagctgggactacaggagcctgccaccacacctggctaatttttggtattttttttagtagagacggggtgggtttcaccatgttggccaggatgatcttgatctcctcacctcgtgatacgcccacctcagcctcccaaagtgctgggattacaggcgtgagccaccgtgcctggccttttttttttttttttttttttttgagacggagtctcgctctctcccaggctggagtgcagtggtgcgatctcggctcactgcaagctccacctcctgggttcaagtgattctcctgcctcagcctctggagtaatgggattacaggtgcatgccatcacgcctgggaattttgttgttgttgttgtattttagtagagacagggttttaccacgttgcccagcccagtctcaaactcctcagctcaggcaatccacctgcctccgcctcccaaagtgctaggattacaggtggtagccaccgcacctggccacaagcagcttctttaaaaacaaacaaacaaacaaacaaacaaacaaaaacgactggccgggcgcggtggctcgtgcttgtaatcccagcactttgggaggccgaagcgggcggatcacctgaggtcaggagttcgagaccagcctggccaacatggagaaaccccgtctctactgagaatgcaaaattagctgggcatggtggcgcatgcctatagtcccagctactcgggaggctgaggcaggagaatcgcttgaacccagaagctggaggttgtggtgagctgagctcacgccattgcactccagccggggcaacaagagcaaaactccatctcaaaaaaaaaataaaaaaaaaaattgactgttttgatactttaaaaatgagagagacaggtacttgtacagctaatcaaaaaataaatgggccaggcacagcaggtcatgcctacaatcccagcactttgggaggtcgaggtgggagaatcacttgaggtcaggagttcaagaccagcctagggaacatagtaagatcctctctccacaaaaaatgaaaaaaaaaaaaaaaaaaagccgggaatgatgataaacacctgtagtcccagctacacagggggctgaggtaggaagatcgcttgagccccagaggctgcactgagctatgatcgcgccactgcattcctgcctgggtgacacagcgagacgagaacctgtctccaaaaataaataagtagcccaggcacagtggctcatgcctgtaatttcagcactttgggagaccaaagcgagtggatcacctgagatcagaagttcgagaccagcctcaccaacatggtgaaacccatctctattaaatataaaaaattagctgggcgtggtggcatgtgcctgtaatcccagctatttgggaggctgaggcagaggagaatcgtttaacccagaaggtggaggttgcagtgagccgagaccatgccattgcactccagcctgggcgacatgagtgaaactgtctcaaacaaaaaaaaaacacaaataaataaatagtatgaataacaacaggcatctgcacatgagctgtgagtaattcctgccttgacctggccttccttccctaagaaaaccatcctgttattccttgggagctcataggacctctgactggggagagagagaaactgaggcaggggctgcctgactctccgagcccctcagcagaccatttgacatcacacagagtgccactagccacaagctgcatgaatttacctctctataagtaaacagagagaaaaaaatcctcgctgtgtgtgaagatagccccaggagggggaaatcttgtaaaagtcaaaaaaggctgtgacttatgtgacttcactgcacacatccagctggacttctcacccatctcagcgggagggttgtcttgagacagttgaaacagcaaaagggtttggaaacggtaagctatttcaggtaacactttacgttgccaaaccagcgatagcagcacttcagactgtcactttttataatgtttgcctataaacttttcccgtgtggtttttgaaatggcgcccaaatgcaaacagagaacagatgggaaacctgagtcttgccccgtccaatcacttcacggagaatggacgacagatttaaactgttaaggaagaaaaaagcagtttctaccaacggcacagctccctccattacttttcacaaattaagccttttctggggtttcccagggatggtgtcttttccaacgtctagatcatcctagttccaaggatgcggtggggtcgtcctggaacccatcccactgaggtttctccctcctccaaagtcagaggtgtccaatccctaaacacattcctccaggaagaagaaagagagaaagaaatccctgaacagactcctctggaagagacagaaggatgaaagagagggagagggggaaaaaggagaggagagacggagacaaggaaaaggaagggagagaaacagagggagggagaggaaagaagaggaaggcaagaggaagaaagagaggggaaggggagaggagaaagagggaggggcagagagaagaggcaggttaggagcacacccgggaggcatgtcctgtcagggttgtgggttgcaggaagaaacccgtttgtacctggaggcacagctgggactcccacaagcactgtaacaggagcgctgcgggaagggtagtaaaatggccttcggttcccggtgccctcccacacctcctgccaccttgtacagagtaaatgtcacggctgtagggctgtagggctgccagtgtctctacaggagaaacacagtccggctgcaaatgtcgctacatagtcactgcacacaaagcacatggcaagtaagtggccgccactgtcctccctggtccagtaacccccaactggccctcttagtctggaagatgtcctgtagtggccacgcccagtcccagtaagaagtcctcactggtcaatacccaattctctgtccgtaggaacagaagagagatttctgcaagatagggtttctggaagagcccagccccctctttcctatggcacaatctgggtatcactggcatcagaacttatcagcagaaagaaataaaggcaatggaggccaggtgcggtggctcatgtctgtaataccagcactttgggaggcccaggcaggtggatcacttgaggtcaggagttcgagaccggcctggccaacaagacgaaaccccgtctctactaaaaacacaaaaattagatgggcatggtggtgtgtgcctgtagtcccagctacacgggaagctgaggcaggagaattgcttgaatccgggaggcgggggttgcagtgagcccagatcgcaccactgcactccagcctgggtgacagaactaaactccatctcaaaaataataataataataataattaaattaaaaaataaaggcaatggagtcccgccattgaagtcagaaccaaccacctttgcatgccctgccatgagggctgtgtacacagcaacgaagacagcctgctgcagcccagacatcctcaaagcctcccctctgcaagagccgacttgcaagaagaccaaattcctcacatcaaacagagaccttataaggcataggtactacgtgttctttaagggggcgaggaagggacaaatactccgcacaatataaaggtgaaagttctctacctcgagaaatactgccaacataaaaacggagaacaaaaagaagtcaaagcaacaaacaacagataagtacgcaggatgaaagggtgcagtcctctctttctaaccagttgtcagggtgtctggtagacacaagtcgggactgaaacctccctggtcgctaacaaggatgccggtaacaacagctaacagccgcctctgcagcggtagctggatttctccagaaactccagactggctcatgttcctagtcatcagatgggatcatggctaatgtttccaatatggtaaccattaaaaattatatatttaggcacacccctcatatcatttaagtctgcctttgagaaacatgctggatggctcttcatgtttgaaagaaattatattgttgcccatgagaaaataaaaatgcacacagagtaaagagcctaagaatgcacttactgaggagtgagtcaccgtgtctcccaatgtccccacccacagtggaaatccgcactccctgttttgtcagtatccctcttgcttttgatctgatgttttcggctgttcatgacagtgttctccaaaaaaagatgcacagagggaaggttttctctctggtcccaacacgtgtattaaagtcatatttcatgagtgaaaaattcctgatggaccactaagacgcaggtattgaatcagtactgtgtgcataaactcctagatatgggcagctttgcttgcataagaacttcaaaattgagtcctggccgagtgcggtggctcatgcctgtaatcccagcactttggcaggccgaggcgggtggatcacctgaggtcaggagttcaagagcagcctggccaacatggtgaaaccccatctctactaaaaatacaaaaattaagccaggcatggtggtgcacccctgtaatcccagctactcgggaggctgaggcaggagaatcgcttaaaccagggaggcagaggttgcagtgagccgagatcgtgccactgcactccagccgggtgacagagcgagacttcatctcaaaaaaataaataaataaataaaaataataataatttaaaaaaataaaaggccgggcgcagtggctcacatctgtaatcccagcactttgggaggccaaggagggtggatcacctgaggtcaggagagttcaagaccagcctgaccaacatggagaaaccccgtctctactaaaaatacaaaattagccgggcgtggtggcacacgcctgtaatcccagctactaaggagggtgaggcaggagaatcgcttgaacctgggcggtggaggttgccgtgagccgagatcacgccactgccctccaacctgggcaacaagagcgaaactccgtctcaaaaaataaataaataaataaatcgagtcttttgttcagaaagcatttcccaaagcgacaggccattagatcatgtagcgcccaggaaatagatacttacgttacaagctatgttgaagtcctgcacgccccggcttggatgtacaatgaggagtctgtgtgcctggctgcctggccagcccagcccgagcctcctaccttctgaaaatacacttgctggacatagcagagaaagctggtacatctccagcccttcagggcttcttgggacacactgttctggggaaaaccctttcatcaaaaggcatgtggggggctcacaaggaggtgaaggagtgaataggatgtgcctggcctttaatgacccaatcttagggtgaagagtggccctacagagttgtcactctgtaaaatgaatgcattgtgatctccagtcctgaaactgaaccctctggtctcaaaacacttccattccctgagtcctaatgacagtgctcagccagaggcagctctcttcatcttacaaagtagtaaagcacctgtctcaacagacagctataccccaagcctctcatggtcccttagcagtaaggctatggcctcatttttgtcccttctctggtgactcttcagaaaaggctgggggtgttaaaggtacagaccaaggccgggcatggtggctcatgcctgtaatcccagaactttgggaagctgaggcaggtggatcattcaaggtcaggagttcgagaccagcctggccaacatggggagaccccatctctattaaaaatacaaaagttagctgggcatggtggcaggcgcctatagtcccagctactcgggaggctgaggcaggagaatcgcttgaacctgggaggcggaagttgcagtgagccaagatcacgccactgtgctccagcctggatgacagagcgagactccatctcaaaaaaaaaaaaaaaaaaaaaaaaatatatatatatatatatatagagagagagagagagagagagagagagacaccaaacagacctgtcactgacaccgagactatgccacttacaaatcgtatgaccttgaggcaagtcctcggagcaggaacaataataaatgagataggacacagaaggcacccagcacaatgtctggcacttacacatctgccatcagaaagaccttccggctgaaatcctcactcctccgctaaacaggaaaaaaagcaaggctgcctagccaggtcttctcagtgtggaaggtcaggaaatgagagaggagggggcagggctcctggtctatttctcaatccctaacacagaattgggggttaattatcttcggttagcattctgcttcctgctggtgcgtacatgtgcgtatgtgttcttatggacaggaacatgtcaaggaggacttctcgcctttctaggaaatttctccttccctgccacccctcctgtatccatggatatacccagaattctacctctggctcttctggtcctttccctgcattccagtctcctgggcacgtgtggcttttcccacctcctccccgcagatgccactcaagtccctgcttgtaggttcatatttccacctgcccggggggaggaaatacataacctggatgtctacagaggtcgtatccaaaacaagcaagtgaccttcaacctcctcctcctccaccagcctcttctcttacacgatgaagggagtcacaccactgaactgccgcccaagctccaagtcggccctgaagcccctcttttcctctggcccttcctctgatcagtccccacaccccttcacctattaggcctatccctgatagaaagcttagctctgaaagaaagtacaggcaaaactgcatcccacaggtctcctccagtcctccacaagacctctgcaatgcgcctaacccatcacccatggtgcgcctcttgtagccaccgcagacccccagaggaatcttctgaaaagcacatgatctctactcttttaaaaaggcacagaccactccaaagtcagagagaataaaacccaaagaacatcatggcgcattgaggcttggttgctccaagccccacatccctctctctgacactctggcttacctgtccacatgggcactgttccctctacctacaagcccacccagctctgctgcctggcaggctcctattcagcccagttccaacagctcctccgtgaaaatcccgattcccattaagacactgcactgctcccatctcgtcctgttcagcctctaggacatgcacagccaaagacagtctgcgtccccagcccactccacccaaaaggtgtacggagagggactggagtagggatcaatgcaatgtttctcagactttactgtgcgtaaaaccacgtggtcagtttaagacagcttccttgctcccacttccaaagatgctgggtcagctgggcgctgtggcttacgcctgtaatcccagcactttgggaggccaagacaggtgggtcacttgaggccaggaggtagagaacagcctggccaacacagtgaaaccctgtctctactaaaaatgcaaaaattagccaggtctggtggcaggagcctataatcccagctactcgggaggctgaggcaagagaatcacttgaacttcggaggcagaggttgcagtgagccaagattgtgccattgcactccagcctggacaacaagagcaaaagtctgtctcaaaaggaaaaaacaaaaaaagattctgggtcagtaggcctgcaggtgcgggctgacattctttatttcccacaggtgaggcctgatgctgctggtccaagacccacactacaagaagttcagctccagtgtccaaggatgagactttgagacccgcctctgccagtagtgaacgtgtcagcttggacagcctcacaccgctgagcctcagagtcatgctttagagaagagaaaaacatctccagtgctgcctgctgcagggcaaggtcaccacaaggacacaatcaaaggctgcctaggaaggcctctgtatatttaaagtgaggggcacgtctgagagcaagcactcctcatcctggcgggcggttggaggtagtggggggtccccatcctgcaactcagccctggccaggagggcagtcctgggttcctgtttacggggcgtaactggcctgcagattgctttttccaaccatgtgagagcctctattcgcattcctctgacttcaaaacaggttttctttcaagtgaacaaataggtctcatcacatataagttacctaaatgaggattcctggaatgttcccagagactaaacatctgaagattttgtgagattcatcattatcaacacccatgtatgatgcctgtttaatttacaaagaggcctgtggcttcttaaaataccttctactattcatccatccaacacatttgagagtagctgatatttgcatgtggggcacagtaacacaccacagaattcccttgagatgagaaccccagcagggctcaggagccggataacttaccctagccccacagcatgccgagaataaccctgcaaacaccaaaccatgggcaagagtccccacagctgtgcctcacgcagtccacagagctaagggcctgcgttactgcgagttggggcggctggcctgcattccagagagcataccctaaagcctgactcattccagaagcaggttttcagggacagtcaccttgccacacttactgttacctgtggctcctagaagctgctgctgggacaagctcacctccctgatattgatgtaaacattcaataaatggtgcatactccagcggatacgtttgccctgtatggccctgaaaggtcagatagatgtccagatcccgtttgacattttcccccaagcccatagagcaggccctcccacactgcgcactttctgaataaagaaatacttttaaagtggccaaggctacaaaagaaaagggaaggttaagagttattccaggagggcaaggctgcctcctgctttctcaactcaggaccttctgggggtactgtttggcaagttgatttaaagggctcggcctttcttctctcagcaggatctcggttccaacactccttcagagtctgcagatgtgtccccgcctgatcccctcagcagcatcccagccatttgcaaatgaagcagcagcagctggagactgggaaacagatggtcttcctcatttgaatgggtttgaacggtctgcttgaggctcaccaagttcaggcctggccagcatctcgaaacccgtgcagacgcctgaaggcacagagttgtggcctggggagccggcagcaatcagctgaatgggaatgacctggaggaaaggttccccacactgccttcgggtgggcgggacacggtcccagctggttttgcaccgcaggacccaaggaaggcaggtcggagccacagggatcacttttctcctgtgttttgcagaggaaagaaaaactctccctcaggggatcctgagccagaggactgaaacccacattaattcaggacattccacgttaagagccggcgccatcacagttaacctttcttccctgctccaaaccgcatatttgcatagaggtaaaagcttcaagaaaacaaacaaactttgaagagtcactacctctcacaatcctccaaagcagcattcagagggaagctttagatctcagaagggctgtgcgccggctcccacgaatgtaggctttctgggacagggcatcccccaggcgaggcacctgggaggaggcagaatcccatcctgcccacacctggcctgactcccctggccgccctccggccatctctctgcctccacattgacctggcaagaaactctgccaattagaggtagtaacagaaaagagataggaagcaggctgaaatgacccactcaaatacggcctggaggccgccgggatgcccttgaccggcctcctcactcgccacaccttcaagggcaagcacctcacaggaggggagaagaggggcctctgagcccagctgcacgcattcactcaacggcctctgctccacctccatcaacatcaacaggtgaagccagcaagggacagcagagaggctaggccctggaaaatcacctcactggacaagggtcaacctagcaggcaaggtggctggtactgatgagggtcaaccttgcaatgcaggtgggtttgctggggaatccaggtgggtgccacctccttaaggggaagaccagcctcaggtgtggtggctaacacctgtgatcccagcactctgggaggccaaggtgggaggatcgcttgagcccaggagtttgagaccaggctgggcaacaagtgagaacccatctctaccaaaaaaaaaaaaaaagaaaaaaagaaagaaaaaagaaaaatcagcctgcgcctatagtcgcagctactcagaaggctaaggtgggaagaccgcttgagcccaggaggtccaggatgcaatgagctgtgattgcaccactgcactccagcctgggtgacacagtgaacagagagagaccctgcatttaaaaaaaaaaaaaaaaaaaaaaaaagcagcagcagcagcagcttcatagtcccagtccctgggaactcctaaacatggggcacatgcctccggcccatgcttttccttcacagaatcttcacctttgactggacctagcccttcattttttatttttgtttatttattttgatttttttttttatttttgagacagagtctcaccctgtcgcccaggctggaatgcaatggcgtgatctcagcttactgaaacctctgcctcccaggttcaaagattctcctgcctccgccccccaagtacctgggactacaggtgcctgccaccacccccggctaatttttgtatttttagtagagaccacgtttcaccatgttggccaggctagtctcaaactcctcacctcatgatccgcccacctcggcccctcaaagtgctgggattacaggcgtgagccactgcacccagtcctagcccttcatttttgcaattatttgacaagagcctgtctcccccactcaactgttcattgcttgctattccatccccacagaacctggcacatagtaggtctcaaaaattatttggggagcaaatggatgaaaaaactcaaagaaaccacagcaattaccctgcaatctaaaaatcatgtttataccatcttgcctctgccaagctctgaaagttgtcatcgcacggggagctgcaaatttaagagggaaatttgcagcatctcctagtcaagaactctacggccaggtgcggtggttcacacctgtaatcccagcactttgggaggctgaggtgggtggatcacccgaggtcaagagttcgagaccaacatggtgaaaccccagctctactaaaaatacaattagccgggcgtggtggtgcacatctgtaatcccagctactctagacgctgaggcaggagaatcgcttgaacccgcgaggcagaggttgcagtgatccaagatcgcaccactgcactccagcctgggtgacagagcaagagactctgtctcacaaaaaaagaaaaaaaagaaaaaggaattctacaactttcctccaaaactcaactcccacttggaaatgcctggaacccctgagtgttctgcaactgctgtacaggtagccaagaacaaagttcagctgcctaaaccagcctcgattcacctacacattagctggtactggagttcactttttatttttaaataccaaactgatctttgcttgctttaaaaatgggctccattccctggcctctttttttcccctaaggacaccctttctggccaagactggaagaagagtaggtgtttctgcttttggccttttcattcttggaattttttcttttttggctttcttagtctctcctcctaatctctgcagaaaagtgacattagaagggtcaggtagtccttggtgcttgtttccatgaccacagttcgtgggagtcccaagtacaggggtctgtctatgcaggtaggccttgacttcatacccagtcgtaaatcagaaattctgggaagaaaagcttgacataatatccaagtggcaacagctgagggttagcaggcactaggacaaaccagcagaggcatctgggacaaggaataactggggacggcctgctctgctgagatggctcatgcatcaacgggcaacagaggccagcccttcttgttatggactcctacggtgtggcgcagcctggaccaccaactgggacccagtctcccattggtctccttggcagcagtcagggttagcctctttccaataagtcacatgccaccagaagccattctagaagaatcacaaagtataatcattaaacatttttattgtctggaatttttcttcaaatgtctttaggagaattcggtatggatgtgtgagaaagaaacagaatcaaccagcagtgtccctaacaggtttaatagtcaaacgacagatttaggaaagaatgaggggtcaccacattctccagcaaaaaaaaaaaatcctcctgctcaggaagaagggaaatttttcttacaccaacacattcacccaaagacctgggcccacactcactaatgatgaggtcctggaggagtcacttgatccccaagaatttcagttaccttgtccataaaataagaacaggaaaacccaagatgttctgggttattaagatgagagataatatatgttaaagtacctagcacagagtccaaccatgacaggcactcaataaatggtagccagttatcatcatcaccatcatcatcatcatcatctcaaggaatgggctaaagaaacgtgacctcatccatactgcccctacttcatagcctgtcctaccaagtaacctccataggggtatcatgtgcaaatgcttgttcagctcctgtccacttcagtactgtgggtcccatcacaatttccttgagctcccttccatgcagacaaaaatctcatctaggagtgttcaggggaggtcactacaggcaaacatggcaaggatgaccataccatgttatggagctcacctctccagcctggccaaaagcagaacacaccacaccgcaccccaccccaaccaatcccataacccctctccatcccgcaccccaccccaacctatcccataacccctctccatcccacaccccaccccaaccgatcccataacccctctccatcccgcaccccaccccaaccgatgccataacccctctccatcccgcaccccacccgaagagatcccataacccctctccatcccacaccccaccccaaacgatcccataacccctctccatcccgcaccaccccaaccgatcccataacccctctccatcccgcaccccaccccaaccgatcccataacccctctccatcccacaccccaccccaaccgatcccataacccctctccatcccgcaccccaccccaaccaatcccataacccctctccatcccacaccccaccccaactgatcccataacccctctccatcccgcaccccaccccaaacgatcccataaccctctccatcccgcaccaccccaaccgatcccataacccctctccatcccgcaccccaccccaaccgatcccataaccctctccatcccgcaccccaccccaaacgatcccataacccctctccatcccgcaccaccccaaccgatcccataacccctctccatcccgcaccccaccccaaccgattccataacccctctccaatgttcttcgccgggcctaatggcaatgtggcagagtattttgtattttgaagcttcaaacagaaaactcttttgccaaaatacattgttcctcatgaagtatgtgtctgctgttattattacagagctgcaactgacttttttcaacagaggggaaaaaaaatttcaaccttgaaccatttggactgcaagcagcaggatgatcccatttctaaaatccatgggacttgcaaaagcccaagataataaaaagggttggacaaatccagggcctagagccagttttacattttaattaatgtaaatgcttctcatcagacaattatcactatacactgtagagtaaacatcttattggtccaggaaatattggtaatattgtagagtaaacatcttgttggtccaggaaatgttgacaggaagtgggacagggaagaaatcagcatttaatgaacacctactctgggccaggaaattcagtaggggctttacatttcatttgcatttaatctgcacattcacccttcaagatagatactatctctgaggctcagagaggttatctaacttttctgaaatcacagcatcagtagatagtagagagattcaaacctacctcccaaggtcaagttccctctgttagtttatgtctccagaaagcataccacatgccatccaaaatgattttattcaattctatttttaagaatggctgatacagaatttagattaaatgcacagaagattcttgttcttttaaaaatttgagtggttttaaatttgaaacatttataaatgtccacgatatatattcagttgtgcgtctattgcagccaggtagaaatgcaacatgcattggtggaaatccaggaggcttagcaggacaagaaggctccttaaggcagccacacatctttgggggcaatcccactgtcaactgaaaatctgaactttaagggtgttcaaagagtttaaaacctaaacttaaccattgcaatgatcttgacattcattttatagtacacccccctgagcacatacacacaccatagatacacacagttggccttttcaatgtctggatacttttaaaatattacaactggtcactatggaaaatttaacagtaaactgtcaggtatacaaatgggtcacatatagtaatataggagctcaagggttcgaaaataatcacgataattgatatagagtttattaacgttagagctcagaattgagtcctctccaagaaaggcgctacataaatcatacaaataaatacatcccttgttctcgttcttgaatctatcagcattttccttataagctatttttagcctcctcataaaacacattcagcataacctgaaactctatatgtgtgcattccattctgaaatgaattggaatttaccattctttagttagacaaggggttaaaggaaagaatatacaacagcttagccccctgacttggtactgtcaaaaagaatcagaagtttttgagagtggcatgatgtggccaaagtccacaatggcgcagaattacttacagtattccaaagtggagtaaattacacattcagcatctgaaagctcttccatggtaccggtttcccaaaaccaaaattactgaaaatctaaagcacgcctattttacttgacacacactcttcaaggatggccatggcttgtcccaatgattcatacttgtgtataaatatttaaatggtaagagcttgaagttatataaatagaagtcagctaccacatacaaatcacagtgaggaaagagaaacttgtaaaaagtgtgacttttgtctattacagaaggagacatcttcaagacgtgaaggatcaccacaatgacctgtccagcatcttgttcaatcagacctctccttaaaagaacttagcctctgaatagccaaggcaatcctaagcaaaaataacaaagctgggggcatcacattacctgacttcaaactatactgtggggctacggtaaccaaaacagcatggtactggtataaaaacaggcacgtagaccaatggaacagaatagagagcccagaaataaggccacacacctaccgcacacctacgaccatctgatcttcgacaaaactgatgaaaacaagcaatggggaaaagactccctattcaataaatggtgctgggataactggctagccacatgcagaagattgaagctgaccccttccttataccatatacaaaaaatcacctcaagatggaagaaagacttaaatgtcaaatccaaaactataaaaccccggaagacaacttaggcaatataccatcctggacataggaatgggcaaagatttcatgacaaagacatcaaaagcaattgcaacaaaagcaaaaattgacaaatgggatctaattaaacttaagagcttctgcacagcaaaagaaactatcaacagagtaaatagacaacctacgtaatgggataaaatatttgtaaactatgcatctaacaaagatctaatgtccagcatctataaggaacttaaatttacaagagaaaaacaaataaccacataaaaagtagacaaaggacatagacacttttcaaaagaagacatatatacgtcccaccagcatatgaaaaaaaaagctcatcactagagaaatgcaaatcaaaaccacgatgagataccatctcacacaagtcagaatggctattaataaaacgtcaaaaaataatagatgctggtgagattgcagagaaaaggaaacacttatatactgttagtaggagtgcaaattagcccaataattgtggaaagccgtgtggcgattactcaaagaggtaaaagcagaactaccattcgacccagcaatcccattactgggtatatacccagaggaatataaatcattctaccataaagacacatgcacacaaatgttcattgcagcactattcacaatagcaaagacatggaatctacctaaatgctcatcagtaacagattggataaagaaaatgtagtacatatacaacatagaatactatgcagccataaaaaagagcaagatcatgtcttttgcaagaacatggatggagctagaggccattatccttagcaataaaccaaatacagaaaaccaaatactgcatattctcatttataagtgggagctaaatgatgaaaactcatgaacacaaagaaaagaacaacagacactgaggtctacttgagggtggagggtgggtgggaggagagagaggagcagaaaaaatagctattgggtactgggcttaatacctgggtgatgaaacaatctgtacaacgaacccccatgacacgagtttacctacataacaaaccttcacatgtacccccaaacctaaaataaaagctaaatttaaaaaaaaaaagaacttggcctcaagttcttgaccaaactacactaagaaggcaagtcagggaggaagatggtgtggtaaagatggggtatgattagcaacaccaagcatttcaatgctaggaaagctaaaaaaagtagagccatctctaaatctcatgggatacagcaaaaatctctaaatcatatgggatacagcaaaaagatggaaaaaaatgcaaaacttaaggctaggacaggtgtggtggctcacacttgtaatcccagcactttgggaggccaaggctgccaggagttggagaccagcctgagcaacatggcgaaaccccatatctacgaaatatttttaaaaattatccaggcctgtagtcccagctactcaggaggttggaggaccccttcagcccaggagtccgagggtacagtgagccacgtttgacaatgcagtgagggtacaattgcaccattgtactccagcctgggtggcagatcaagactctgtctcaaaaaacaaaaacaaacaaaaaaccaaaggctaaaatcatctctcaaggaaaaaaaaatagagaccataagcattttgcacagttgcataaaacctactggatcagaattatctgtggaatagcctaaaaaacttccaaaaaataatttctgaactgcctacagagatgtccccctggcgagaatcggaccagtacagtggagagtagcacaccagctatatttcctacctagcttaacagccaggcacccaaaaatcaatttcccatgttttcctttaatgactaaaattcgcttccatggaaatgtaagggtaagctagattagagggagtttttaacaattaccctggctaaacaaacacctaaacaacagtctgcaaactggaagactagtggatacattttattgaaactacgaacattaaacaaaacacttccagtttaaacacgaccccagttatttcatagccatgtaattatttgttaagtctgatattaaaaacatctcatattggattgctgtggttttgtgaattctcaccctcaactgggtcagaaagacttgaaaggaataaagtctttacttatggcttgatgcggggccattggcatagtaagtgctctgtcttttaactggttgaaataaacagacaaaacagaaacacacacatataccccaaatttgaatcagagagagccagtataaaatgatacaagtaccagttctctgggcttgccagatttctgctctataagtaatattaaacatggctcttggtctatgaattgtgaaacactttatatactaataaagaatgtgtacttcattgtgtatttaactgcgtaagcctgtatttggtttaattgaccaagaataagtccttgttccaaagctaactatcaagttacagtcaactcttaaatattaacactcatattgaaaaacaaagatgcagataatacgaaacagaagattattttaaatcattcactcttggtatgcggatatattctttcttcctttcttttaacttgcaattaaatgcgtatggttaatattatggcatttacaatacttctaacaaaggacttaaaccatactggaaaaatctgacttagggaggtctctgtgtagatcctgtcctcgacgtttctgctactgaactctggaccaactcacgttggtccaggagagcatcacctctcagaagattgacaaaaaattgctacacaaactacattttttttcaggttgttacttttcagagtcacactctgtggagggtgggaaagtaattaagggtgtagggttgaaaagccctttcattttagctcctactgggttggtgtaaacaaagatgccattaatgtcaacaatgacttaattaaccagagtaggtgacaatgtcaggaagaacttgaaagtaagagttgccccctctcagggtaatcaagcttgactagacttcaaatatttataatgttaatcaacagaatagtacttggcattgaggactgccccccttcgagtcaataaccatgttttcactcctctgctggtgccctataacaatgaatgaccaaaaggaaattaacaatgaatgaccaactggaaaactcatatttaatctgaaatattaaaaactaaaatcttctagagattattttcttaagtcaattgagtgggcccaaccccactgctactatttcagaacgtgtccagaagacaaatgatatatatgatatatgatatgacatatgatatgatacgatattgcacaaagccaagatgactaaacataacctttccctgaggggccaaaagaaaaggaccctctagtgttagggcccaggcttcttcctggaacttctcagtcacatttttctcctatccaatagacattatctaaactgagcttccaaataaattagcaaaccaaaaagtcttacaagataagaccttggtgcacagaaggtcaaggtggaacttactgctaaccaaagctatagtagttctaatcatggagaactgatggacaggggcacaggcacgcacgcacgcacgcgcactcgcgcacacacacacacacacgcacactctctctctctctctctctcttccaattcaccagcacagagcctaaacctgagcccattttcagctgttaaaaactcctttctcatctataattcaatgaccttcctaatcacctctgacaccaaagcgaactcctgcaacagaagaactggtcttagggctcaaatcagtggccagtattagactaacagatgaggggaagtggggaccctacagaaagcaaacacagcttcctggaaacaccaagggcctcctccatccaaaaacaactttcttctcaactgtctccaaaagcctagatgttttttgacattgtggcacctggcacagccagcccacgggactgggaagacccatgttcccagctccctggcgacaacggcgacaaggccatgcacccggtgcttactggatgccagcccctgtgctaattgctctttatgtccaggtcaaatggaaatctcctaacaaccttttggtggaagagtcagaagacttctgaggacattaatattcaatgactattaatgaagagaccctaaagatcatcttcttaagccctcagacgacagaaagggaaactgaggcctgggacttgtatacttttccaaagcctcttctttgccaggttttgcaccttcctctaagacatcttttcttttccatctcataattctggatgcaaatgaactcatagctcatggaaactataaacccataaaaatgcacaaaaggacattaacaaaatattacctaaaatttccagaacttcatcgacctccttcctgatccataagtgcatccacagatcccaggttgagcaggcctgcttccaacaatacccacattgttggatgtaaattcttacacaaagactcactcggggaacttcgtccctttccacgatttcttccctctgcctcacctgtccctccctgcatgtatacacaattttaaacttccttcaagaattaaatacagtaaaacaaatcctctgggaccattttacactttatgttgaaataaactcacaataacgctgccctgaaaagccaaaatgaaaaatgacagtttttccctaacctgggttgctcctaaagcccacaccgtaggaaatcccagctcagcttcctcagtttttgccgagccacgcactcaagggaaaaccagcaatcacggaaacatccattttaattattagcaaaattaaagacgtacaggcatgactttcagaaaccaggaactttttccctcttacatgaaagccctgtaaaaatgcatcaccactgcaaattacactcatcctggtgtcccagcacaaatcaccaagaggcagttccataatcggcctgtagctgtagctatacaagcctcagacacaaactcctaccagattcccttcccagagacgcagggagatgtcaccacacctgttaattatagagctgccatccctctgtgtaacgaaaagttccccagtctcacacgattgcttcaggtgataagtgcttcggtcctcatccttcaatgacaagtgcctggggtcttcctggggagcccatgtctctcagaactctcatctcagatggacgcaaccctccttcctaaactgtcctgatccagctaaggaggctgggctctctgtcctctcccagcctaccccactgggtaagtgtgctgttcattcaccccacgcacgagatgtgttcccagagcagctcagcttaccccagacaccactcggactgctgcgggttcctaaagccaggcaggcaccaggtggactctccacaaacaggttcattaagtggcgatgagtgctgggatctgccgttttattctcggattaccactcgaaaaataactcagctaccaatattccctactgatgacagatttcagtgcagcaccaagtagaggcttggctcacgttgtctccaaagggctgggagagaggttccaaatctgctaagctgaataattcagcctcatgtagtcctcgtaattggacttacaccttgaaaattaaatttccaaagctgtgacaccggcgcatgccctgtgatacttggaggttctcggagctggaggagatcccctggcacattcactttcaagtttacctaaactagaatctgccactctgtgatgatgcattgcttaagtattatgaattacaatggctaaaaaaaaattctgagatgtcaagcctctctctctgtgctaaacttcagaaacttcttttctccttaaacaatgaaaataagatgtcagcatttcagatgttggcaatttcttttagtggttcatcttgtccgaaaatagcaattctttacattgtaagcagtaggaatgatgctgggggagactagagatgacattcatcctcccaaggttcatcccttccacagctctctcgggcactggataaaggccaactcccagctgtctccctcacccagcacagagaaacacacacagcaagaaaccaccaaactataccatcctgcctgcagtgctgcggcaaaggaccttctctcatcagctctgccttgccgggagccaagagaccacgatctggtgctcttagaagccccatttacaatgcaagggtagctgattctaaaacaggccttaacaatctgcccccagacaaatcccaaaacaaacctgaaaagtgaaattaaatgacttaccttctggctctaatgtggtatcctcaactaaactgaaggagggccgggccagggacaaggttgccatggtgaccacgaccaggcagatgaaacgaccccagctgaccatggttacggtaccaatccccggtcctcttccatatctccatgtggacgttaatcccatctgcacacttcctctacgggcatggactacgcgcaatgccttcagcctgcggtgggctcaggaaccgaggcgctgccgctgctgctgcagtcactaaaggaaagagattggcgagtcagggaatcttccccaatgccaaatcactccagcccaagtgggataaaaccatttttcagcctctcaaatgtgcgcaaacagagttctttttcattatctgctaaatccttccatcctcacctcagagtcccaggtgataccaccagaccggtccacagaaatgtgtgaggctaatctttttaaaagcatacttttaagaaacagagataaaacagtagctacaggactcagatacgtgcagccacttcagtgaggcaatgtgtgctctcttctactatccactatcgcctccaccgccctcaatgagcagaagcaacgtgaccttagtttcaagggcaactacaaaagcaagttaaaaatgctcgggttggcataaccaacctcgttcccttctcttagtccaactgggctttagaaagctaaactgttggaggagtctgctcacagctccgtatttctgctgggctggaggtgagcagtctcccaccctcactgtcgctcttgggaagaaaggagaccagcaaaatcaaaagaatcccaggaaggctacagaaaattcccaccagtttacacttgtcaggattcattttcaaatggagaagtgtctttcagtcttccgccaagcagccacttacgaagagtgaacacaactgcagcgcattcaacgcagctgatccaaaaaggacttcgaagcctgaattcccttcccctgtgactaaatggcagtccagggctgctaaatgtcttcaacctctgtagaagggtgaggaaactgagcagatgcaaattctgatgaataatgcaggaatttattaataatgatgatgtaaattatgtaaattatagtcatggtatgtgattggaccaataactttccatatgcaaacctactggctaaattttcagagtataagttagaagaggacactcaacttaatattctgttcacccatttgatccaagggaaagagaattttccaagaaagcttaatatattccaagcaactttaaattcactcagtactctctgtgactaagggtacagtaaaatgcacaaactttagagaatgattaaaacaatcacaagaaggggctcatcaatctcaggcttcagattctgtgaaccacaggaatgaaccacattttctaagactgggggtggcagggaggcctttaatacaaaaatctctaaactctacattttttatgtacccactcgatgtttcaagttatgtcataggatttcaacactgctggagcctccccaaatctcatcataaaaactgctccttttagctttgactgaggacaaaaatggaggagggaaaagaatatgccacatcatttccaaaggaggaataaagaaaacctctgcttcaaagatagcacaggtgaaacggtgtgattcacagcaaaagcaagaaaagtatgtgtgcagtgtgtgtgtgtgtacacggtgtgtgtgcgtgcatggtgtgtgtgtatgcacggtgtgtgtgtgtacatggtgtgtgcgtgcacggtgtgtgcatgtgctttcagatagcttgaaagatttttcctcttaacttttctttcctcttagtcaagagcctcagaagataatttcggatctatttctacatacatgtgggaggaaagtacacaaacattctcattgatttactaagcatttgcagaatgcaggggaattttctacctctaacacgacttcaggaacaatcctaagtcctcgcagaggtttcaccccaggctccttccccggcctgctcgcccacctgtccctgcccagaggagcctccttggctccaggcagagaaaggtggacagggcgctccgctgaatctcaagccgttccatcatcccgctagctggcactagaaatttgcatttcagccatttccaggtccaaaccccacggcagccccctccccaaaactctggaaggcggagacctaaggcgacaggtctgcacagttcctcacaccagtggacaaaagtatggtgcgacctcctaggcaggataattaggtccccaggctcggtgttgggaatacaggcccagcatgccgctggcggccacaatcccggcttcctgccttcaataccataatccttcctggagtctgagccccagtgaaagccccagcgtgtttatttttccccttgaaagggaactctcttctcagcctgcacgcgggaggagttgtcaccctccctctgatggatggctcttctcggccgcccgccccccggtccattttcacctcggcacaagcctgcccccaaagacaggcagagtgacaagcaggaagggcttggctgcggagcggtccccatgccaggcctgtgctgggctcttcaatttaccatgacattcccaaaacccccgccctccaagaaggcagaccaatacagtgccctccgctttgggcttccacctaaggggtgatctgtccactgctggctcggccactgggatcacctggtgttttgttcctgggtagatttcacatcaggaaagtcaacagtgtccggctcctccaaagtgcagacccatctcttcgcttaaggcctccctacttctccccagcactgagtaggagcgggagctgtcaaggggtcaaggctagggggaaattcctcaacaaattgaaatctcaaaaaacacacactgacccaggaccacaaagccctcccggtttaatgcttgcgtccaatcagaacttgcgagcagcttgggggtgctccccaccaccaccccctttcagggcagcacttctttcatttgtttgcctgaaatatcctgtttttctcccccttctcggggcgctaaagagctcagagaaatctgcattttaattgacattccagggaaagagagaggggcgcctgattgcttttctattcaaactaaacaggcttttcagatgaaaatgagtcgagcccggtggaagatttacagggatttgggaccagggagacaatggagttttaaatgttgatagcgtttcacaccaaacacataatgggtgccctgagtttgaaagcaggtttgcctttaagggtaggttttattgaattgggagaaaggaaggagggtctggagaacggtctgcaagggagcggggtgcgaggagagcgacggaggctggtggtccccgagcgggcctcctgcgccaggtccgtggtccgcgagggtcggagccagcgccacgcagggccctcggcttttttccccagcgcggccccgtggccgaaaaaaatgagcgcgcaagttagaactcgcctgcgctttcgacatctcccagccgctgcggcagagcaggcaggcgaactagaaaaagtcggtccagttcgccccctagccccaggcgcactgcgctccctccagcgccgacggcggctgcgggcgaggggcgcccaggcaccggagccgtcgcctccccagcagtgccacccctggccatcgccacccctacgggatgtcaccggccccaccccagcggccccctcccgaaaaaggggtctccgcagggcctggatggtacggaagttcccaggacacacggatggggcacctcggagatgaccccgggaaccggcctgcggggctgtgccacgggcaggcgaaccttccgcccgtctgctctggggtcggagaaacgcgcccagtcagcgggaatgcgcccgccagggtttgacagggaggggggcgtcaacgccagaagcagatgtcagcatctggatgggggtagcagaggcagaacttccagaacgccggccgtcagcacgcacccacctcccccatcacctatgcagccacagagggaggacacggagcgtcctccacaatgctagtccttccgcgccccccgcccggaggacggtgcacccggcgtcccgggctcccgtggcgcccacgtccccggctggcgaagctccccgaggcgtcttgcgcggcgattaccttgaatggcaacgctcctccgcgacctgtgttgtccccgcgccccgcgtgggtcgggatggagaaagcgacgagcccggggttgcggggagcaactccaaacgcagaagagtggtccttgggtcttcgccggcgccaagcctcccgggcttcacgcgtaccccaggctgcggaggagcgcgggcatgacgcccgcgggctgccctcggatttggggaacgagaggaagaaaggactcaggcttggcgttgcctccaccaaactttgctcgcgagttgcgaaggctcagagcgcgcaggcaagctgcggcctcggggcccccggggctcgcggccggcccccgccagcccggagagcagtcgccgcgccgggccaggtacgccgcatgcagccccgcggcgcccgagctttgtggcggccgcgcgcgctccctcgcccgctccgcacccgccgcccgcccgctcggctctccaccgcgctctcctccagccgccgcccgcgccgccgccgccgcccccgcctcctcgcggcgggtcacgcccccactgaaacccgagccgtttcctggacggcggcgccctctctgccaatcagcgccgcgcgcccgggccgccccgagtcccgcgcggctcccgacgcctccgagcagccggagacaccggcccgggaggcgagggctcggccgcgatgcggccgtagggatgcagcgacagcctccgaataaggcctggtcccgcgccccgcgccacctcctccctcctccccgggcgagcgaggctggccaacggctcgctgagcgactgcgttacgttgttttatgtcaagttagaaaacaaatgaccgaaggctctaaccctgccctcccgctaaagagactttaaaatgcgcctgcttgatactgcggggagggttgccaggcagctgaagcttttggaggagaggaagccacttggaaatgttcgcaggacattgcatgtttctgtccttctaaacaatagaaatgagaggaaaaaactgaatattaatggaggccctactatgggagggtcacactacataggtgattctatttcatctgcccaaccaccctgcagagtactattcccagtttctgataaggaaacaggatcagagaggttaagtaatttgcctaggaccacacagctggctactaggacagcctgactttgaatgtggctctctcagaaaaagccaaaattgcatcaaaaaaaaaaagtgtttaataatatatgtttggattaataaaaagaaattcaaaggagtctaaagacaactctaccataaatagaccttgaacaaagtaattcctccctctgaatcttagattaaaaatcataaatgcaaaatctgattcttcaactgcacaccaagctgtaactggttaaagttcctatgtccatttaccttttcactaagccgtgtcttcggaataatttattttaaatatgctttttctccctccttattcatccagctcctgagcagccgtgcttaagttcaagaccatatagattaaaaccttaattatttttctttagaaaaggtcactaaacccagaaatgctttagaatccttttgaggcctgaagatagatgaagcattgagaacaaacctgacttggaaaacagacttttcctggatttagaaacatatttgcacctgtgtcactaacattgcacccttcataacatttacaaaaatatttttcaaggtgctacatgattagaaaatcatttttattcacaaatatagcacagaaaacgtttatgcaagttatttaaaagccacacaagtaagaaatccatttaactgcctcaggcaaaaggctataacattgtattttggaaatttgatagcaacaaaataaaaactggttcttaagcaaaattatccctctatatgcttggtgggagggtatgtttttggtcaagtcctctaacctggattagccccagagcctatacattaacggacac

SEQ ID NO: 202 - DNA, 1505097 bp, Homo sapiens
  variation 371233: note = n is a, c, g, or t
  variation 456528: note = n is a, c, g, or t
  variation 1096998: note = n is a, c, g, or t
  variation 1097227..1097228: note = n is a, c, g, or t
  source 1..1505097: mol_type = genomic DNA
ggtggaaaggagtactggtttagggttgaagcaagtctaaagccagcttgctctgggtttaagatctggcctccactgctgtttctccaaagttgggagtcagtcatattcctgtttaagataatcttaagtgatctacattgaatctctcagtaggttattctctttaatccttctgaatatgccaaatggagagtttcggtttggtgctagaattaaatgcccctctaatggtggctagcctcactttttaacacagagactgaatctcactcctagttgctaaggcaagcaactatgcagagctggaaatcatcagcattgtttttctcttatgtttatttttatgcttaacttctaattacaggtagtacttgtttttctttgaggctgaaatataaagtttaagatatatatactaaaattcaaaaagtgaatcaagtaaataatgctctaggtggtccacaaagataagaaaaatcatgacaaaatgggaatgaatgcaatttggggaacactgtattcgcccaagtgatgtttatttaggcatgtggtcagatggtaaagaaaagaaagtgggagggtagcctaggcaggattcagcatgatctgagaatcttgcaagtagaaccaagttggttggggaaatccaggcccattttggtttctgctacctggctgtagtgtgaccagggaggcaggtgctgggcagggttgtattaacaaggcaggtaaggaagaagtccagcaggcgaggaggtgggaggtcctcaaggcagaaataggccagtagataaggtgaagaggctaagaagactatttggagggtacaaggggagatgggacagggagaaggaagtggctagagaggtgagctcttttagcaaggagggcagtacacagactaagagaatggcctttagggtgggactgcctggattcaaatctgagctttgccacttaccgttggccttgaactaataatacttaacatccttaagccttagttttctcatcacttgcaagacaggataataacagggtctacatcttataaattcttagcaagtgtgttggctagtgttatcaattccagggctgagccctatcatgtctgcctctgtgcatgttgagaattgtgcagttttgcagagtgagcaccatgaatgtctttaaacttgctctgcctaagactagcttgctgctgagggaataatcacgaaagctggagaaggccaagtctatctgaccttcagattaacaatttttaaagtctagctatgtccaaatatttcataattgccctatttactaacacatttcaggggtttcatgaaccacttaatgtataaaaattcaatatgtagacattttttttgaaaagggaagaaataagcaggtggaccaatccaacgattgaatttcctttaaaaaagtaactgtaactgtaataggtttgttgcctaattcatggcaagtcaatacaccgagacacagggttgcagcagagaaggaagtttaatcataaggctgccgaataaggagacagggggaaacctcaaatctgcctgtctgagccgtttaggtctaggtattttaagggagttggagtgaccgaggtgggggatcactggttgaagaatacaggatggtgagatgaagaaactgcattttcatgctgattcagttcctcttggggagaggcggggggcggtcttcaaactggttggcaatagctcttttgctggaattcaggatctgaaaaacatcttaagccatttttaaacaaacaaaggccttatgattctaacatcagaaatcttctctgtaggaacaatgaggaggcaaatggttagcatctggtgctctgggacttttggttacgaagaagtgggccaaagtgcagcctgattaatgcttaattacaactatatttctgtccagaacccagcatctaattcttgttaaccctgtgaggatggtttcaatagaatgtttccattgtccttaaagggaggtatagttagtcccattatactccaggtaatgatgacagtcttggcaaaatcttaggaccctaagttgtttgccacctcacaacctatattatccgtcctagtcttagttaccacatctgactgctgggaagactgagggtgatttgtttggtctgtgcacaaaacctttaaagagaaatacacatgttagttaacttaaaaatccacaggtactgtggcaatagtttgtgtaacaagttagggtaaatatctttctggtaagatgtacaagggaagtcaatttacctggaagacaggaggtgtcaggcctccaggcaagacagaagcaaaaactgacaaaacaaagcctacaggaaatttgggtaataagtttgaatcttcttaaagttcttaaagtgtctagaaaaagcattctaagacaaaactcctacaattcagcaagccttgggaaaaaggctaaagctttctagcctctacctgaaaatacccactgcatagaaaacccaggagaaaaaattcaacctaggcagtcaagtctgaggtattgtcaccccatttaaatttgaacagggcactctaaaatgacatactggccttcataagaggaacagaaagaggtttgtagtcatgcccataggcctatgttcttaggtaaactaaactagcttgatccttaaaaaacgagagagagatggtgaacagtggaaaaggttcaaaataaaatatgaaagacagcctctgttatagcacttgccatatccccccaggcaactgagtgcagagctgacaaacttatgacatgggagaatgaaataagctttctagaatgcaaggatctgagtacaacaccatatttgaacaacaatagggggcaaggtagtctgggtctttaactatttagaatactctaaaaagagggctggggagagaaaggccaagtgcacatatatttaaagctatccagtaaagacttacttacatttcaaggtgaaatcagaatacaatgaatgtgttttctagctaaaaatcatgatcactaagtggttgatacaattttttccaatcaattgctaacagcatttattcactaattttgttttttatttgtgtctgatctacttctgcaacttataacatgaacatatttattcacaggtcagatgaagaattgcctaattttaatttggaattatctaattctaaaaacaaaaaagaaactatttataggagaggatctgtaactggggtccatgggagtttattaacaggtttgccagaaaaaaatacaagataccagttaaatttgaatttcagataaacaagtaatttttttagtctagatatatgccagtattgcatggtaaccctatatttataaacaaatttcagagagatagatacatttctctctctctctctcctgtttttttgaaactgagtcttgctctgtcacccaggctggaatgcagtggcatgatctcagctcactgcaacctctgcctcccaggttcaagcagttctcctgcctcagcttcccaagtagttgggattataggcatgagccactgtacctggccttctttaacactttttgtttacaggccaaacatcaccctcagtcattccagcagtctactatgtgaactgagactaggagggataatatagattgccagatagatctaggcatgagctcgttagacactgcataaaaatttggagtagaagcattttgacaaggaaattggctatagctatctttctaccagagtcttaaacctatgatctctcaacagttagtcatcattaagacaaagattaattctatcaagccttgacttttccctgtggcctgagcttcctaggagccgaacataaagggaaacatgaagggcaatttaccaaatagcaactgaagagaagagtccactcagtgaaagcagaggagtttgcccgggggcgtgttagggaggcagagaaagctggtttacagggctttgcagacagacttgagcctaagggccatgtcacacctttaagttaagttggggttgaccttttaaacaagaagttgtgcatgacagaaggtctgctttgtgaacattggattctggaggagcaccaccgcaggaaagactggagaaaggtggtggtgggctgggggcactggcttggaagaagagagtgaagaggcaggagagttggaagagactgggaggctgggaatacagtactcaagggccagggttttctcccctccagctctttgtcctttgcagccaccacccaaggatgctggtgaaggtgtttttgtgcatccccattctgagagtgcagcctctttcctgaggcccacgggagggtctgggtaatgacgaaatgcagtctttacctgtgtcactgaaagtagacccgcagagctgcggcttctgctgccatttcctcctctgatctccaagaggcaggaaagtcctccttgtcatgtttctggagctttggagaaaaaaaaaggaagaggctctttcatgggcccttgggatctccttgaacaaatttcggggggctgggggagactgaacaaaatttgcaaattagaggccagtaggtgtatcttttaattgtttcagttgctacaacttgcaaataggctttatacaagaatccacatttaaaataatcagatcatttgccatcttgtaatcatctactgaggctgaggggggtgatgatatgatataggtctgtgtccttgcccatatctcatgtcaaattagaatccccagtgtcagaggtggggcctggtggcaagtgactggaccatcaaggcagaattccccattggtgctgttctcatgatagtgagttattgggggaccttattgtttaaaagtgtgtagcacctccctccactctctcttcctcctgctccagccacagaagacgtgcctgctttcccttccgccatgattgaaaggttcctgaggcctccccaaccatgctttctgtacagcctgagaaaccaggagccaattaaactgctgttccttataaattacccagccccgggtagttccttatagcactgtaagaatggactaatacaggtgatcacagattgggatgaagtgggggaatggggagcatttgccattcccagaatctcccccacactcttctaattttcttatgtttaacaggcatcattcatttattttacttcctggattttgaaggcattgagtttgccaccaacccataatcccctccttcaaggtggcctgtggtttacctcctactctctttggtttagactctcttgcatgagctctgagcagttttgttcagtgaaccaaatttatgataatgacacaagggccatgagaactgagtaagtaataagtatttccattaaaagagggttcaagcagggaaacagtaaaaaagagattaaatgagaaaacaacttacaaaaaattaacaatttgtctcaaaattaacacttgaatcatttaaattcctcctcagattacaggcatatttaaaaaattgtgtgtatgtctcagatttacatatagagtgaatacaatttcaattctatcagagaggatgttctcagaactctcttccttagaaatgctcaattttctcccttaacctcctattatgattcaatttcattaactaaatttattgttcctgtgtgtggctctatacattgtaaaatgccgcaggttatccgttcattcttcatgggaatgcacagtgtagtattttgtgttatgtgttaaaagtcatttgggattgagacaatttaatagcaccaatgatagctagcatttatgatgtgaaaggcgcacattatttctttgatatacattatttcgtttaatccttacaataactcataaaactgacgctacttaaccccatgttactgtggaggaaactgagttctgaggaagttcataccccggtccaaagatcacccagctaggtagtggggtaggtgccagtattatccccaacaacttttgcctttttattcatcctgagggatctacagtgtccctaaagagcatcccacagatactgttccactccattttgaaaaaggtcaacttaacgattaaaatatcgactttttaaaagttgatcctttaaaaataattttgccaactcagcaaaaagtctatcaactaataaatgacttttgctatctcaggccccaaactctaaatctaacctagaggcctctaccctggcagcttgcagcagatggagaaatttccccatttattgcagctcaacattgatacagaaggcaaaacagtgagggaaccatagcctcgcactcccgctgagctgtatttccactcctggtaagtaagtttgagcctaaatgaggctcattagcatataaccgggccacagatacatttatgagggtcatggatcttcccttcagaatttggctgccagcacgctgattttacattttgccatgtagatttaattctccttagtgaaagaaaaccacattaagaagtcatttcctttcttgcagaggcaaacatgctgcagttgctacaggcaaggcaaacgggattgctattcttctactcaagaactaattttcattttgatactaccttgacgtctgttataaatccatcttatcttataacaattcaataggatgacaaagagatatgcaaagcccaggaaatatggccttcccacttctgctactgccattggaagacacagaaataaagcattaagtggcctcaacaacacagatcataccagaggaatccaaataatttagagcctgtgaatgttaatgccttcctggttattaggcaaccgtctgttattgtcatatgccttacagatggcaacattgtgccaatccttagaagaagtttttgggaaataataggaaataaataaaacaaaaactaatcatctttgcaaaaactctgttgtacctagcttttaaaagttatgagatttccctcctaaaagccccagatggaagcatgtggttctgtttagaacagcggcactcaaccctggttggttgcccactgtaatcatctaggaagctttaaaaaataaaacccaccccagggattctgatttaattggtctggggcagcctgggtttggggatttaaaacaaaacttctcagccaattctaaggtgcacttactgttgagaatcactgctttttgggagaagtgtgtagatagagcccacacacatatagaaagaatccgcttgcctttaagcacattgcttgtgatcctatcaacagtactactgctgtcctttgcaaaccttgccctagaactgcttttcttctgtttatgctctgtccatgggatgtctggcctacaaggcttgtcttagcaacactaacatgcggatgcagttcagcagcctttgaatgtttttaatctctgcagaaatagggagcctgggaaaggccctggtgggcaagacttgtgtcctagaagatccatccaggtgacttgaagactaaaaatgctacagtttggagtaaagttccatttccctaaagcaacccaagaacctggtggctgcaacttcttgcctggctaacggagagaaagccctaatgatcttaaatagtagtttatccaaaaggcagtatttgccgtgggtgaactttaatggaggagtttcacttctgataagccttctagattactttggctgcccacaggggagggcggtgactacttgttaacacacaagacagttgctctgtctctgtaatgccaggggccagacctagcactggaacactgaaccagacagactcctttattgttctcctggggcacccaggtagggaggttacacaccaaacggctgattcttagtgagatgggattacaaaatgggaaggctgctggatagagctagcctcattgcaaaggcttttgagtatcaccttggtttcacaaagaaacgttatgaaaaacagtgatggagggaaagaggttatctacggatcatccaaaaatggctctccaagaaggcgagagttagttaggtctgagcttgaacaatgagaagaacaaaagttcctttaatctctttgtgtctcagttttcccctttgtaaaatgggagtaggaaaaagagtggtgagcagtgccgtgcctgacacatagttaagtggtatttaatattccctgctgctgctactactgtcagtcattagcattatttttaggctaaataacactgacctaatgacagcgagcactaaaaattccacagaggttgtttctaggagtaaaagtatttttcatctccatggttccccagtgatctgtatcttttggacctaactaactactttgtagaaggattaaaagttatgatcagaattcagatccaaaacaacttattataatgagacactcaaatctggggaggaaatgtacctccttcagctctaaagtgaccctcactaatccctaatcctcagagctgtcctaaggagtgagtaaggtattaatcgaggcttctcatggtaaaagctaaggtcctatggtaaaagaatgtggtggaggtcaaaggtagtcaataccccaggagtatggttgccagatttagcaaacaaaaatacaagacactcagtgacttgttttaggataaggatgtctcatacagtattgagacgacatcctgatatgaaacaatgatttgttgtttacctgaaatacaaagttaactgggattcttgtattttatttgacaactcaacatagcagaccccttaaaaaggtgtcacaggaagaacttggcttgcatttggtaactaggttgttcccaaagttgcctggctgtgaatcctggaaaaaacagaggggatcatgtgcaggaagataaaattcaaggccatcattttgtgcactccagggcttattattattgcatggtcttattgcacggaatgcagtgtaaatcaacctgcactattttaattccttagttcaccagttctaaggtgcacattttttcatattttaacatctttgaaatcaaaacatgtcctataaccaaaagtgtgtcatagtttaattggcagtgtttttctttcttagtagtacataaaataacagcacttccaactgactgtgtctgggattcagtgcactatatttctccatctctcctttctgcaggtaagtcacgtaagttaaatgtgactctgcttgctctgaaaatgctcaacaccaacgctgatgtattacatactggtttccttctgatgcaacaacaatagtcaaaacggttttcacagaagctttgttctttagaggaaagtgcacgccaaagtgacaacgtttgcaaaaacttgaaccaaagtctttattcacattcaacagactgaagtctgtgatggcctctccaagcaaattctatttctgcacagctttgaaaagagatttaaaacaaaaaatctatcttcagtcatcccactttatctgctagaaatggtttttggggaaggtagtgttaacaggatttctgactgaagaactgatacgtgtcgattttgacactgtgctccctcctgtgcactgagtgtgttatcacaaggtatatggggtaatgatgaattccctgctgtattgctcaaaccgcctttgctattgacatctttagagttctgtaatggaatgcagtaggaggaatggttcacaataatttaaatgtttttcagaatttggaacgaacctggagtaaaatgccaaattgtcttcaaacgggggaaaactactttaatgctcttcttacagaagcaaacggctgaatataaacttggatgtttttataaaaacatatttcattattatcacttttataaaacaacatacagaagcagagagcttaaataaaccatttcttatgggttgacggttctgtttacacaggggtttatataaagtctcaaaaggaaaataactgtattgtttttttagatctgatcctctcttattactttctattcaaccaagttttgatgaacacatgatatattccaggctctgttctaggtcttatgaaagatgatacaaagataaataagcccaagatctttgcctcctcaggttcaccatgcaataaggcagacagattcatgcatagataatttaatactggcctaactaccgaactagaagttccatcaaagtgttcttggagtatctggggcagggggagacaaaataattcttgctggaattcaggtctgagattgacttttaaaaatcaaggacttggactgggcttaaaagatggtaatgagattttgaagaaagggtaattctgggcaatgggaacagcttcgttaaacacatgatgcgagtaccagttccccagcaaggcaacttgtacccatggtcagcttcaccaactaattacagcactgttccctgatgaatcctgacctggcttctaggcagctactaacaaacatgtatcagagttagcaagagagctgaaatttgccactttgagaagccttaacattccattgtttaaagatggaataggcacgcacaacaggggtctaaaagatggtctccggccctacaaatgcaaagctgcaaacagctttgaatcttactgagagaaacttattcccttttcagtgatctttcagtccctctgactgttcaagaataaagtctcagcggactagtacgtccttgataaggcatcaacaacacctctaagagaaagagaagagccatccagactggctagaatataataagattgttttgtttagatcatatttatttttagggacatctctcatttatgacaaatcatgtcaagtctccttttaaagtaaatttaagttaaacataaaagaatcaattttaaaaatatatgaaatgaaatggtgtgaaaatatggcattaacagcttgagaaatggcccctggggaaggaagtacaactgaggtgggaaagggtgactcaagatgtgagggtgatgcattggcctttaatgcttgtgggtggcagtttctactgggctgagttctagaaagctacatttttcatggatgcatgggagtcaaaataatttcatgttataagaactccgtcaaaaaatggtatgggggatggtagaactttgggtagggcaggcttttaaaggaaggcttcactgaagatgtagcatataagttgaggtgtgaataatgagtatttaagtaaaggggcaggaaggaatatttcaagcagaaagaacagcaagtgcagaccttcaaggaagtgtggtggttgggtaacaggctggaagagtgagagagaggacttggggggatggcagatcatttgcaccctgtgggcagggctgagaagtttggattttatttttggtgtgatgagaagataggcaaggaagtaaaaggactagaataattgctcataaagaatgtcctggaaggataatgaattaaagggagaaagtgatggcaacaatcagaagagaaagtttgggagagggggctcatttgccccataggctagttagcgtcatggccactaagtgagaggacttggcccctcactatagatggaccttgtcatctggcagctttctccctggtgcttgtctgtaaagcacacagagatcctggcttccctgccaagattgctctgaactagtgtgaaaatcactcagtttttgcccaatatccattctgcctctcttctatcattcacttctcaaagttcccgagaagccttcctggaccattctgattgagtcatatttcacgattctggatgctttcatgcttctggcacctccctggcactgtcctttcagtacatgtttcctgccagacatggagcttcctttgtctatgtgctggttactgagcagactggcgcccacgctggactttcttggtggcccaatgaatcaccaggtgctttcacttgaggcagaaaatggtcttggaccacaaacctctgcctgccacttgtgataccttagaacgctgaagttctttgaatattacttagtagaaaaatatgttcattgcttcccttctctatcctgtgaactggaccttggactaagcactagactgtgagatatctatgtgcaaacaaattaccttcaggtccttctacttactgtgaaagttcaaaagcccagttcctcctccttttctgaacagaaattcaagtaatcaatggagcattaatcatttgattagttgccaaagctttgacttaagcataacttacttgagtaaaagcaagtatttttagtgctgcctgtggggccaaaatgctgaaataagctcttatattaattagtggcatcccattttcaaggggtatagagtgttggatgtttaagaatttgtaacccccaaaagtaagtattaactagaaaatcacagtgctggaaaataattatgccaaaccactgtactataacagaccccaattgcttatccaattatacattgaagtatcacattgtcaagccgattgccaaagcggcaaatgagactttgctagcatcataatttggaccagatattactccactaactacactatgaatagtctttggaacatgctatgtaccctatataaacctccacgaaccaaggtgggcatttcaggtttgttggagtacgcccatgccatcaaaaaaaaaaaaaaaatcactggaattgattagacatgaaagttcacagttttccattgaaagcctgttaggagcatctcagcaaagagcaactgcagctccaggttctgagcagagttgatttcaattaaaatatcaaaggtagtcacttcctgtcagggagaccatcagtaattctatcctcaaatgtgtatctgagaaaaacaaccccagacactgcctcctggatctgcaacactgctccctgattgattggccaccatttagaggtaatttttttttttttcgagacaaggtctcactctgtctggagtgtagtggccagctcactgcagcctcaacctcccaggcttaagtgatccagccacttccgcctcctaaagtgccggggttataggcatgcaccactgtgctcggcctagaactttcttacaacacaacatcaggacagctgaagaacaggagcctggaactgggctgtgaggagctactaaggggttgatattcttaggacaccccattgctatgattttcttctcaaccttgtaagggattggaacgatcttgcccaacagttgggtctgatatgtcagacgaaaatcccactgtggcaagagcctgactcccagggttcagtagagaaataatttgcactcgcccagtagttctttgcttttcaagtaatagtaagccctaaacaatatcaaacttggtaaaaacaaaatcttcctgtctagtccccacattgcccagtcagagtaacatccatcttcgtatcctctcggctagctgtatctgataccagtataggaatcccccttcttcacccagtggatgcctgaaaccagggatagtactgaaccctatgtatgctctctgttttcttctacacatacacaaacctatgataaagttgaatgtataaatcaggtacaggtacaggttaagagattaacaaccaagaataaaatagaacaattgtaacaatgcactgttcacaattgcacaaacagaagatccctgcttgcagaggatcttagcaatttattttattttttttttttcgagatggagtcttgctctgttgcccaggctggagtgcagtggcatgatctcggctcactgcaacctctgtctcctgggtacaagtgattctcctgcctcacccttctcagtagctgggactacgggagtgcaccaccacacctggctagtttttgtagagatggggtttcaccatgttggccaggctggtctcgaactcctgacctcatgacctgcccgcctcggcctcccaaagttctgggattgtaggtgtgagccaccgcgccctaccagcaatttcatcatataatttgttttatttccttattaagtcaggaactttcaccttttctcttaaataccttatgtcctctttttggcatatctgaattgccagcatcactactcttatgctttggggctgttattaaggaaaatgaagggttacttgggcataagcactgtgatttcatgacagtcaacctggtaacagagatggctactcagtgactaacaggcgggtagtgtagacaacatggctacactggacaaagggaggatccgcatcctggccaggacagagtgggacggcgtgcaattttgtcacactgctcagaacgttgtacaatgaaaacttatgaattgtttatttctagaatttttcatttagtagtttcagactatggtaaactgtgaaaagtgaaactggagataagaggggactactgtagtaggttttcaataagcattggtcaaatacgtcactaaattacacttttcctcccaatatactggctatgctagctcatcatccccattttccacataaaacaaggaacttaaatcactcaaccaatgtaacatggataactcagagtggtatttgtttggatgagacacacaaacactggatccactagtggatccagacatgcagcaaactgtatgtctcatccaaacaaatttgctgtatgtctagtgctcttctgatccactctataaattcctgggaacgttctttcagttaacatagttgaaaacatgggtggtaaaacagcatagaaagcaaaactaacactgcaaatagggatcaacctctaagcccggagggccctgctggaaaacctcttctgaggggaaaattgcatctcagggcagttttcaggaattaatcgctgatcaccaacacctcaccccaggcgccatcatatctgaacccttctggtttttcagtgggtagaaaactggtgaggcaaaagggactagagatctctgccagtttgatttcctcaggcctctgtttctaaaaacatgctcactgagaaatgaaatgaaactccttctgaaaaggaggtttgtgatgaagcagacttcggagaaggaagcatttattcaaaaagcaatttccttggccagtcatgttctgtaagcctttttcccccccgccggtgtttcagatattggtgtttaagcaagactgttctcctttaatcctagagtgatgtcaacccacagtactcagaacaaggaatgggaagaggcatagggccaatttctgcctttgttggaatctcctgaacatttcatttcctatttgcttctgctacatatggcttcttttttcaaaggtaccttgcagagtcttcggaagcacagtgtaggcaaggaaactctccaaggagaaagaaaaatctgcactacaagatgctacgcaaacacacaactaagagagggaggcaagcacacagcacgcaaccaataatgcacagccacagaatccttctcaacacaacattgcaggcagcagcaactgggttgtcaagataaaacctatttgaagaagctgatctagctgggacctttgaacaatccagatccccaagcatttaaagcttgtttctctgcagaattcattcaattattcaacaaatatgaacatgtattcagtgtattttatagtgtaatagtaatcaagctggacaaggtagtgcctttgggaggcttacattctaggagagaaggcaggcagttagcaagtaatcatctatcactgccttgggagggaataaaagagggagctacctgagacaatatggtcagaaaagactgctctgaggaaaggacagtcagctgaggagtggcaagtgcaaacaccccaagggaagaaggaggcatctgtatggtctgtgcactggctgaaggcaagtgtctgaaggcgagtgaggaagttctcagatagaaggtagaagatgaggtggagaagtgggaaaatctcccttccctttagcactggaggcgaaagggctagaagacgagagactgaatgattctttcagtcacatcactcttttcaagcacctactttgtgctaggcgcagaagactattaaacaggcaaagctgtaataaatccaaactcagtgagctgaaggtagaaaggccgtcccagaacagctggacccagcactgcctctgaacatgggcaatgacactttggggctcaatgtttgcttactgggtctctcacacaccctaacatcagccctgcctataatgaactttccccagaaaagcaggtgagcagcaagctatttgcacatgtggtgactaccatggagcagcaaggatgcaggctgacctcacagacttctttctgaatgcataccatatgtttggcagagctaaaagagctatcccagcaccatctagccaggtgcttggcactggatctcatatgctggcagatgaaaaatgactaatatgaaaatctatattccaacggtactcaccagtccactggattggtcacgattccttctttctacaataggatcattctgcttctgattacaaaactgcaccctctgaagctgctactcacccgttggaagttacatgccctgtgcagcctacaaatccattaagttctgatggagctattccaacgcccttcaaagaacctggcccatgtgagttgcacaaacaaattggagccaacctttcccaaatgcctctctctatttcatttaaaaaccctctttaatgaagacataaagccttgaatgcatctgaaacgctatgcttaccatgcatgacagcagatcgtcacagaggatttcaaatgcttttttttttctaaccagaatacttgaaagaaactgagatttccttgttatgagttcaactgttcattttatatgccctataattgaccattctccagaagtcagcataggcaacagagatgtaaggcaactgcaaacacacacacacacacacacacacacacacacacacacacacacacacacacacacagctttggcacagtgaaaaattaaaatgcaatgccaggcttgggactattttgaagcctcaggctaggaaagcaataccctcacctttctcagctgcctactatgtacctaaccttccaattatttatggctgagatgcttaagatgtactggagaaacagccatggctgagagatacacaaagctgaaatattatagagagttataacttcatgaatgaaaaacctataaaaatcacttaagggtcctaatctttcagttaatctcacctcagtgccactcaagggtttaaaggagtttcactgattggtttttaaaggacaacgataaaaatgctttgaaataactaattataatttcaggtatctatgtaaaggtccagacacaaatatttgaaaatggactgttcctagaatcagggattgacacagatctttaaaactttctagcccaaacatccatgtgacatttgtatccctttggccatattgctttcaaggcttcaatgctctaggaaagaggatcttactgcagtactgctagatttaggtggagatcaaaattaccaatgtttgaaagtgatatttttacattaacttgatcaagagttagaacttggacttattactcagacagtctgatccttcattgacaagctgtgctgagaaaccattctgtgggctaaagaggatatggactcccaggattgctctggcattgcggttgagaagatatactggaataacctcttttgaaaacagtttagcattacctcctaaagttgacatctacaacaatatgactgccaggtatattaccaagagaaattctcatatgtgtacaagaagacatgcatgagaatgttcaaagaaactctgattaaaatagatagaatctagtaatgaccaacatcccaccagggagtagatgaataaaccctgatatgttcacataattaaataccatggctcaagcaaaacaaatgtttgatagtgacacacagctcatagggagaaatcttaacaatatattagtttaaaaaaattccctaaagacaataaaaatatacacactttaggaatccatagagatgcctaaaactatatgaaaagtcacaaagcaatggtgagcatagattgaggatgctggactgactccatgtgaggagacaaggggatggttttttgtgtgggactatcatactgttagatgtgggatagtagcaaaatcataggttttgttctgggcaatgggtttgcagatactcattaacatcattaaacataactacttacacaactaaagaaaaggaggctatgatggaaaacaaagagaaatgatcatccttgagaggcatgtaagattacaacatcggatgaccgcagttttcctcaagataggaatccagctcccattccaaaatgtccaccaaagttgcaacatagtagcatttgccatataaaagtactggagttattaactggattccagatgtctgaaactgatgtatcccttcactgaatcccgactaggatctattttgggtatagcacttcacacaggttgctgttcttaattaaaacttctctgccttaagagctttatgtctgtgagatagtcatccaaatgttctcctctccataaatgtgctcttatgttttattttcacagcaaaatgcttgcccagattttaataaacatgtccgcagtagtaatatacatttcgcatgctttccacatttcataatctctttagtccttttgtttatgttgattcccacaccaagaaggctgtttggaaggctttgcagctctgtctccatttcttctgcctatcattggggaatgaaacagcacactgattgctatttgggtaggaaacacagacaagacgttgaaagaagtaaactaatttccaagcaattttgctcctttctctctttttgattgattttggcaataactcaccccagttcattgacattagagtaaagcctagtagccaatttattgcttcaaaatctgtgagagttcctaattggttatcagactgtgtctaccagatgccaaaattaaatttcttttaaatcaagaaaaaagtgattttctggcatcccagatgcaaaacaaccccgattaactgttctttcacattgcaaatggctatttgggccttgggtggagagaaaactcatctacttacaacaggagggggtcagattctggactcgatccttcagccaaaatgcagataaaccacaaggaacaaatactactctatgaaaaatggagagctgggccgggcgcggtggctcacgcctgtaatcccagcactttcggaggctgaggcaggtggatcacctgaggtcaggagttcgagaccagcctggccaacatggtgacaccctatctctactaaaaatgcaaaaattagccaggtggggtggtggacacctgtaatcccagttattcgggaggctgaggcaggagaattgcttgaacccgggaggtgaatgttgcagtgagccgagattgtatcattgcactctagcctgggcaacagagtgagacttggtctcaaaaagaaaaatggagtggtgttcctggctgaaggagagatgccctcggtccaatgttggggaaatttttgctcccggaaagtggaaacatcaaaggactggagcccaacattaaggatggaataattatgttgttgttattgttatttttaatggagctctattgagtgcttgctgtctgcctggcaatgtgctcagtgccaagtacaaacatgatctcatttactcttcataagagtacctaccccatccatggtgctgtcatttccatttttagatgaagaagttaaggcttagagatgtgatctcatagctagtaggcagttgggactccagggtcccactccctttctgtctattccccctcctcatataacaatacatagcatttgctaagcaatacagactaaattgaggctctaacttaacttaaagctcttttgcatacagaatgttatttgatgaactctagggtaggtagaggcacaatattattatccccattttatagagaagggaacaaaggcccagggagattcagtgaattgcttgagtcttctgccatgttggactaaaagcctcagtgttgctctactaaaaaggtccctcaactaaatataacaggggtggcctgcatctagtctctgaattggaacatcacaactgacagagcttatatcgtgggttctcttatttaaaaagcagaaattctaggtaatggtccagtgcaatttcgactccatctcctaatcctttgacatcaaatgctctggtcctgacttactggtcctggacatggttttcttggcacagtagcaggcctttaccattttacctgcatctctcaaccctttgtcctgtttccatctcatgtgagtaggagttattctttaaacaactgccttgtatctcactaccagccctttgcacatactgttctccctgcatggatggcatttcttcccctgatccaccagcactggacttaggtggccctccaagatggttccatttcaggacacttattgtacatgccttctaatttatcttccactctataggtttcctgggggcaaaatcatgtcttttcacaatagccaatcttttctttgacttcccagacatcaatgtcatatggttcaatctaataccttaaccatgaccttataaaaccaaagctaggcacataggagaggctcactaaatacttcttgcccagataaacttatcacagtagatattcagaaggatgacatagttgtacccatcctcagtcctcaaataagagtttaattatgttatgtaaaccatatgatatactagtgaggcaggaacagatacacattgtaaaagagatccagaacaaaataagatttctctgtggccttcgccaatcttaaaatgtaactatatttactgaatcaaactcttacagcataataaacttacttacaaagaatcagggtagacagcctaaccttgagtacctcaagtctttgcccctggatcccacataacaatatccttccctcttttaaggaaagctggaaagaaaaccactctgccagcagaagggcaaataaaaggtatgtctgtgcctgcacacagaggttggcatcctaccctgatttgtgacccataattaatgtcaatttcataatttcggaggatagaagatcaacaaggaagctgacctctggctgtctcacagctaatcatcttttgaggcggaaacttgagaggaaacagaaacgacaggctggagcaccaggctgtggctcggagtgtgttttgggtgatctgccaagcagtgagaacccatggtcacgtgccctctctgtgctggccccacagtgacacctgctcaccctccattgggtaaggtgggaacctgcatcccaccctgtagaaggcttggctggacgcctgctagtctctacaaagttccttctcattgtgtgcactcttctacatggcttcttaattatgtatgtgcacaggctgtgtcgaatggagttgcctttgcctctgctcaccacgtattacatttttaatcagtatatataattacttaccgcaagctgccaggccagattttctgagcattagtctaattaacttaaacttgataattatgtttcggataccatagcagtacacacggaacggcagactttgctgccagcttatttgattccaataacgtgttttctcaatactggactagttttgattttttttttttttttgaaaaaaatggccatctgataattactttggtttcaaaatttcccctcagataaacccattctgctatttaggacagcttctcaaatgatttacacggattgaactgttatagtatgtttctgtgtatttttacacacacaaatctgtttttactaatataaattcaaactgaggagaaatgacagtagaaggaattctgatggtcaaatgacagaattgtccatgtttcaactgctctatgcattgccttttccatttcaatttgggttgatgaaaaatgagagacaaggaaaagcaaaacaaaactaaacaaaacacagaaaaatgcccagacttgtaagggagaaaggtcagcttctggttgaacgagggcatgataagttcccacactaataaggctcaattcacctagggcttaccatgtgccaggcactgcaaaaagctcttttttgtggactatctcatcgaatcgtcctaacaaccctatgtggtaattagttattactataggttgaattgcatcctcctgaaatatatgttgaagccctaatccacaatgtctcagaatgtaacttggtttggaaatagggtctttgtagaggtaatcaggttaaaagaagggcattagggtcagccttaatctaatatgactggtgtccttatacaaagggaaaatttggacccagcagctgccatgcacgcaaagagattaagtgaagatgaaggcaaagattggggtgacggatctctaagccatggaatgccaaagatcatcagcaaactcccagcagtgaagtggacacactgaacagattctcccttagagccctcaggaggaacagctctgctgacaccttcacctcgggcttgtagttgccagaactgtaaaacgacaaatttccattgtttaagccacccacccaggttgtggtacttgattacggcagccctagccctctaatacatatactctggttaccactactccccgtttcacagatgccaaggctcagaaaagctatgtgatgtgtccaggtctgcacagctgtcaagtggcagggaaggagtccacaacaggcctttcggactcccatgctcaacccttgacctcacccatgcctgtgccactctgcttctgcccaggaggctgaaagaatcaatacaacaaatcccagaagtggatgaagcactatgaacactgtaatgcttctaaggtaaaagtcaagcttagatggtgcctgttttcacatttgcacatcgcctcttttatttaacacgtaaaatgactgcttgaaatacctgcactctagttttggagggcaacaacatggaatttaaattttcttagggtgagggtagcgggattattttgttctcttctcacataagacaataatggaccaaaaataccacttaccaattacaaaagacaacaaataacagagcacaactcaatgaatcgaattgcagaaggaagaacaggtgggctttcccaagatgtcataatagatggaaggagaacaagagagaatgaacctgctctataaaggccaaagacaggaaatgagaatcattctggggaaaagatacaacctttatccaggaggaaaagcatgggaatatgataataatttttaaaaaagacaattctccaagaatatctcctggaatagatccaacggaaagcttgacaccagataaagaagggaggtcaggttcattgagggcctattacatttggggtatgtttgagggtgaaaccccccatagagtgttgtgaagtagaagctatcgcctcccactttgcagatggggaaataaagttctaagcaattaaataattactaaagggcagctactccttggcccagcaaatcactggaaatgctgacatggaagaacagcaggaagggttgtcctaagaagaattactttccttcttcagactagtagtgtctctatgtctgtggggaacgtgcacaagctcacactcaagacacagacttctcgtcataaaaaaatttcacaaattacctctaagttgctctaaaacgggagtgcttatcatttttaggcatgtcagcactttttagaatctgatcaaagctatgtatgactcctttccctagaaaaatgtgtgcacacacataaatgcatacactttacttgaaatttctagaaggtttgtacaccctcagggatccatgagtcacagctttaaagcccacaaaggatacatctgcctccaaggagcccagcaactttatgacacactaaaacaaacacataacatgcactcgcacaaccttgaccaggacagtccccctccacagtcactggcttgtatctccatgttagcacacccacctccaccactgagggggagctctgctgtgcttcgttgatctgcattcactaatctacattccaggccccacataaagcaagtataaagtgaatgttaagtgaatttgaagttagaagacctggacttgagctctatcactccctctgggtcatgttgtttcatctccttgaatctcacttttatcacccacgctattaggcagaaatcaccccggtttgcctcaccttttctgaaggattgctgggaggaacatatgcagcaatgcaggtggaagccatttagaacagtaacagtgaacactgactgtgtgcaaacactgttttaaacactttacatttattcattaatcttcatgaccatcttatcagggtggcagtgttactatccccatttcagacatgaggaagctgagcacagagaggtcggggaactggcccaggtaggcacagggctgggatgcaaatgcaggcaggctggtgccaaggccagctctcgtaaccactgtgcatagtgcctcttcaggagaggcaatgccacaaaaaatgtctaaaattatcctaacgagaaggcaaaagaaccctgtgagccttctatgaacattagtggagtttggaggtgtggggtttgcagggctttagatttagaccacccagaagagctcgatgttacatataactgcaactagcttgtgcatccacaactccaaattcagccctgtggtggtcagcgaatatcgagggagaaaagcagcagcctcatgtaggaagtgtagggccagggccccctctcaaagctcattcacatgtacttactttgactgccacaacgaacacatttgtaggctttccggcttgtggcttacctgcctgtgaccacaaagctcatatgtaccacaagtcctctttttcctacttcaaacaaacaatgctcatctccctcctctgaatttttttgtttgagagtttccaccttaaggttttcaaggggtccacaattcagttgtatcttgagtggaaatcttattctgtaaggcccctgtcttcattctcacacagtcaaagcacactagctgacaagcaggcttcgagcagagccatgataaagcttcaagccctgcctgcccagagctcacagccccggtgggtgacccggaaaataagcaggcacctgcaaaaggcctgtaaagtgctgtgatgaggaaaatatgggcaactgtgggagtcacagaaagggggtacctaatccagcatggggagagggagacactagagggtccaaaaagctgcgtatcttctctgcctttgtattgtcacaaaaatctaggagtcctcatgagctcaatgttaagtggttgcatgctttgactcacttaatcgaaaatgtttttaaaatcctgcttagacctttttcctcccactgttccctgagttagctccttctcaccctctgggtctcaatttccaatgtaattaattccctcttttcacgaagccttcctggagcaccctacactgcctggcatctcctgtgccatcttcctgcactttcttcctttcttcccagggaggcaggcttcatcttgatgtcccgggtgtggactgcagaccaacatcacctggcggcttgttagaaaagcagaacataaggccccatcccaaatgattcctcaatactttaaagctgcctcgcccaggaccttagccatcagccccatgtgactaccaggcccctgtaaaacggcttgtctgaactgagaggtattgcaggtgtaaagtacataccagatttaggagacactgtgaaaaagactgtaaaatatctcattaataattatttcatgttaattacctactgaaataatatttatgatattttggattaaataaaatattacaattaattttatctgtttttttaatatggctactataaaactgatagtcacatgtgtggttcccattatgtttattttggacagggctgccctacagcgtgagatgcgctggtttggataatgatcaagaacaggcattggcagacgacagccactgggtcaaatctggccaggtgcctgatttggtaaaggggcttttattggaacacagtcacactcactcatttactgtctttggctgcttttgggctacagcagcagagctaaggatttgcgacagaaactgaatagcctgaagagcttaaaatatttaccatctggccctttttagagaaagtatgcagaccccagtcaagaacgttcattccagaactggaccgattgacttaaaatcacgtctctaccactttttggtgtgtgaggttcggcaagttacctcacctgcctgtgcctcagtgtttgtatctgaaaacagaagatgagcatacatacctaacagagttgttatgaagattaaatgagttgatatatgtgaacttccttaaatagtgcctcatccatagtaggttctcaataaatgttagccaccattaatattactgctagcagttatcacaaattgtaatgacacatttttgctttaactttttttcctgtctgtctccccatcaaattaaagacctaggagagtggcatcattttctgtcttgttccagctgtttaagcacagttaaacagcccacacgtgagattcaatacatatttgttgcatgaatcaagtgcagaggagggaagtaattttcctaaggctccacggccagaaagtggccaggacttgaatgtggttctatctgcttgccaaactcaaattcttaacttctcttgatacaccaagtgtagtctatagaccagcgacatcagcatcacttgggagcttgttaaaaatgccggagcttaggcttcatctcagaccgactgaactaaaaactctattttaacaagatcgccaagaaattcataggcacattaaggtttgagaagcactgctctgggctataattcccagtttcgactcatgtgcttatttgttcaacaagcaattaatttagcatcaatcattccacagagccttgtgtttggaccccctaattccagagctgatgatttctattcatcccgatcaggtcctgggggtgtttagggtttgcaatgaacggcaatgtgctgtgtcagaagtgccctttctcctaccaggttcaaaccactgcaatgctggagtgacctctctgcacagaaatctgcttaacattccttacccgcctgtagtgaccaggccacaggctccggcagatgcagaaggtctgaaaatctagttgtaagtaattttcctctaggtgcctacctcagtgaattggttctcctgtgcattttatacatcagtggtcgcaccactcaaacacacaatccattcccgagtttaacagctcaggcaccttcctttttgattttataaatgaatgcaaatcatctcccactcatattataaaccaattaaaattctcctcacacttttaaaaaaacttgttacctggctcaaagatccttagctcttttcttagaaactggcccttatgtggcctgtatgtgaggatgagggtgtttgaaattagcaggaaatcttagaatggtttcccctttgtcacagccagaagtttcagattgtggtcatcagatgaacgctttaaatgagaaaaagactgattagcataattcttaaaggtctgaactctacactcacagatggcctctgagaggatggatggtacagaaaggagattaggataaatctaattagtttgggggtgttctcatttctcaagtggtgagcgatggagaagaagtgatggatggacagatggagataatgaagccccattaaagccttttttgattctcattctccatgatggagcacattatcccattaatgtttctgtgagctaacacagccaaagtttggcgctgtcacctcgaaaatgaattcgaattgcctgcccagctccttacatgtgtccacaggagttaaatgagcctgaaaactgtattcctgctgagaagcccatcctggcagcatgggctggaagccctcccctttgggaatgggccttcctcctggctggtttctaacagcactcaggccagagtcccatagcttttctgctccggggttctacaactagaatttcctctgaaatgggctgtggcttgcacgtatttccagggtactgagacagaccgctgctgttctcttcagtggaggtgacagctacaagtgctcaccatcacactctgattagggacctgagggcagggtccaaaaacaaaaagtggcaagacaggcccatgactcagtcacagagatgtgacataaataataatacaggacattgcacaggctatgtgcaaagtaagggcctgactggctccactagctcagagaacagtgagacagtgatgggccatccaggaaacagcagggaaaggggagagactcctcggggtttgaaaaaagaaccatgtgccccctgatgacagcagcctcctaaatggaccccttgcttctactcttgactccctacagtccagcatcatttaagaacataaaccagatcaaatgattctccccttcaataataatcagagctgacatttattgagcacttacttatgtgtgctcagcgctgatccaagcacattgcatatattatttcatttcacaacagccctttgtggtattaatatcatccttttattacagatgaggaaattaaggcacaaacaggtgacctggcccagtaagtagcagaatttattgacaagctcaggtttcttgacttcagaactccgattcttaacctataactcctgttccatgttcattccatgccctcccaccacacatggaataaaatctaaactcctctctgacctcattttgttccagtgtctcccatgctcactgtgctctcgtcacattcttcaagaactccaagcacggtccatgtctaggccctgtgcacttgtagttgcctttgtctgcttagaaaggatttcccttctcccatatccaccttcgaaatgtcagggtggcccacgcttgattctcagctctcttactttattctactgctcttcccaaccaggtggtctcattcaaggccatggctttaaatactatctcctatgactcccacatttatgtttctagcctggaacgtttaatgagttccaaccatgcgtgtttaatggctcatctaatctttcctctcgcatgtgtagtgggcacctatatttatcacccaaagataaaaaaaaaacccctgacttgtaactctcctaccctacttcagtctgtaaagtaaatagcactatcatccagctggttactcgagccaaaaaccagcaattcttcttagcttctgagcctttgcacccaatccatgaacaaattctacctgcttccaaggcacatcccaaagggcctatttctctccacctccactatatcatctctgatataaaccactgtgataattttgcttgcacttttacctctctttaatccagccagggagtgacccttttaaaagttaaatcagatcatgtcattcccttgcctaataccttctaactctaatgtcatgctaggccctgaagacctctaggccaccgtctgcctctttaaccacaactcctctgcctgctcaccaatgctccgggcacactggcctcccttctgtttcctgaacatgccatgctcatcctggatgtatggcttttgcaatcactattcactctgcttagaaaactctctaccccaggtttccccgggcttacagcttctcatttagttatcagttgaaatgttacctccttggtgaggccttttctaacccctctaaccaaattcatatgcataaatactttctttatcataccaagtttcatttccttctcactctctgagatgtctgtgtgtttaattggttttttctgtctctcctactagagtaatctctttggcggtctgggtctgatctggtttgttcacccctctatcccccagtgcctggaactttatcagggatcaataagtatctactgaatgaagagcaccatttatttagaagctcacaaaatgctaatggaggaggtaagattgaagacagatgataaagctgggacttcaatcctatagtcagtgggaggggaatggataaagagtaaaagtgacgcaaacttgtagggagtgggaggaagtctaaaatcttccatttgttgaatgaccataacccaggaggccctggtaatacacaggtgaacaaaaccaaaatggcccctggcctcatagagcttgtattgtagcatgtagtttaaacttttttccccattttaggatggagcaggggtaagcaaatgttttactgtaaagggccagagagtaactatttctggctcttcaggccatatggtctctgccacaaatactctgccactgtagtgaaaaaggagccacagatcatacacagacttggctgtgttccgataaaactttatttacaaagacaagcagcaggtccaacttggcatgtgggccacaactggacaacccctgggacagagacttctgtcccttctaaagaactggggagtactttaggcttgtcatgtagagaaacaggctttgaatcataagaaccttaagggtcttgtggagaaaaacatagatttattatttaccttaagttttctaaagcgcttagaaaacagtgagtggacctggagctgctgacctggggttcctgctagtcttttgttttactccttcccatgaatcaactagcttttgtaagaaacctcacagttacatggatttgaatatacttaacctgacaaagactaactcaaagtggctaatgcctataccagatggtggacctgcccttattccactgttagaaaggaagagaatgggcactactgattacttgtactgatttaagtttaagctaatagcttggcattaccctgacttcagccagggaagaaaatcacatccaagtttgcagactccatgaaacattggccatatatttgttggctcattagcttggacataaagactttctagaaagagatgccatcattaggtgccactcagactctaggggtgcttttggaaaccactgtgatcagaaacgtatatattgttaagggaagagagagagttgttctggacaggtaccgagaggcaggttccaggaagctgaagccaacagaatcaaaccttaacgtacataagccattcctgggctttgtccatgggttgcctttgtggtggttgtctgcctggtttccagggagccttcaattagaattctgagctgagatgatttatcctgtgtgctacattagctccatttgccattaacataaataaggctttagttacatgaggcaggcataaagggtatgtatgccttccattcatgaaaacatcattttttcaaaacaccagtttcttcttataagctaagttacactacccaaatatgtagtaatcagtaatacagaacaataaaaggccttgatacactgatccgggcatacgaggttatcaggaaatcctcaagtcagtgtctctccccatgggaccaatcctgtacctctttttccttcacctccattttgacttgaaatgcagtagacaacagagccagttcagtgccttgccatgctcccagcacttagcactgttcgataaatacatgagggataaacaaattgtaaggaaactcccatcccatgagaggagaaggattctaaagtgcatgaccacacggacacacaggtaacatccatctctttgggaaaaggagtaaaatggactttcctgaaacaactgctaggcagaaggtgggtgaaagccacaagcatagcctgcctcatagtagttccacgaaagtccattttacccctcttcccatagaaatggacactatctatgggtccctgtgtgtggctgtctcctgccatgtcgctggattttctcaggatccctgacaagtagggatttttggtcaatctttcatagacactcttatctcctcaaatggagacaccatcactggcattgaaatgctaaggtgagaactcaccaagacacactgtaggtaaagttccagctcagcttagggtttgatatgtaacgggcccaataaatgatagtgattggtattaggattgctttgttcttgttacagatgaagaagtagaatgtcagtggattacagtgaacagtccaagctacaaaatgtgttgcaactggaatttgcattccatgtgtctggttccttctctatgtacaggaatgaatcaggagagcacactggctctaccttcttccactctgacttctcagctttaatccctggagttccagggtggtatggactgaatgtgtgtgcccccaccacttccccaaaattcattaacaccacaatccagttaagatatttgttagtagggccttcgcagaggtgattagggttagatgaggtcatgaaggtggagccccaggatggatttgtgcccttataaggacatgaaggaccagagctctttctctccaccatgtgaggatacctcaagaaggtgaaccagaagcagggtcctaaccaacaccccgaccatgttagcgccctgatattggacttccagcctccagagccatgagaaataaatgtttctgtttaacccgtttagtttatattctcttatagcagcttgatctaaaacacagatacctcaagatggctacaaattctcctctaagtgcttcagagaggattagaagataaattatatatctattttgttttctatgctaggcctctatgatataatataaatataatcatttgtattataaactagaatataatacaaataaaattgtattataaactaccttaaagaaagtcctccttacactgaaccaatgctaatgttggttaagccaatttcccttagaaaaaggcatgtaggatcttgaaggcattggtgggctgcattccctgcactgtgagcaaggcctgacctagaatgacctgtaacatcacccctgtcatgggtcccaagcgcacagccaaaggtcttcaaaacatatgggtatccttagcaaataagagcattgctaagtgcatgattaataagccagaaaggctatggcacttgacagacggatgaggcatttcagaaagataagtcaaagtgcactgtgaggtgagtgcctcccttaactttcttagctgtgctactcggttcataaaccagggattaagtccattttcatttcaattttttatttcacctttaagcaactcctaaggcttccaggagaattttgtttgacctttagctaaagttcaacttctaccaagttacgaattttggatggtccctaaatgatcacttaagacagatttcactataattcaaagaaaggataatccctggcccaagagttcacaaaggaaggattcccagtggtcccagagatggcaaaagttatggatttcatcctgctaatgcattttagtgatattttcattgtgcaacattaattaccaatgtcagcctggatgcatttgctgggtattgaaaccacgacatttttttatctctacctggtcccagatgaagattagcttagtgcttccttgtgtcctaggccctagagaaaagatgcagcctacgggatggggtaaccttggcaagttgccatttgcttctaaagttatgatagcagtgttgaagccgtcactgagactctggtgctcaagccaagtaggagccctttgctatcatgacatatgctctagatttgcatttgtctaaaatctagcttttaggagacctctcagagatgtctcagggaggaacactcagaaaatgtgaagaggagcaatggacagagacagagacttccaatttatagtgaagaacagacctttgaagttgacttgttacataacctgacttatctaccagatctgtctgattcctaaagaagtatatgaaaatctctcaatttatatttcaaactcctgaccttcaggtgatccacccgcctcggcctcccaaagtgctaggattacagtcatgagctactgcgcctggccatcaattttgtctaatcagagttttttttcccttgaattttggattttgtagttaactactgggttgttgtgtgcctgtaataaagatagagttatttttgtccacaaaagttgaaaacagagctgccagttgacatgaaagtacaactcatttccatccacagcctctacatccattaaataaagagaaactcagtgctcatctcactcatgaatcagaacaggatatctgcacatgccatttctctaacttcccaaatgcagcaggaacacctcagccccgctctctcagtatctcagtggactggaagcacgttcatttaagaggaagggctcatagctttctgcagacagttcaataccatgatgcatccgattcagtttcgtccattctatttcttattgatcagcatacctcaggctattagttttattaattaaatgataattttggggggtgagtacacaaggagataaatgtctcacaaacagactccaagcttgcaggcaggaggcatgcagtgatttacaaagtatttatctttctggcatttttttttcccccaggaaaaagtaatcatcactaccatcttctaaaaacagagatgcttgttttctgggcaggcttggaaactagccaagacagcaggaagattgctggaatttcaacacacttgctgtggtaccatggtgctagtgacctgcccttgcagatataccttgactccccacagaagtcacctcaaagtctctgctatttagcaaatccctaggtgtctggggagtaggggtccagtctggggctgctgcctcttctgattggctgcctggctctgactctgatcccagaatacccagaggaatttgtttccatcctcctggcccacaactcacacaaacctctaatagtacacaggttattaaaagcaaataatagctgggcacagtggctcatgcctgtaatcccagcactttgggaggccaaggcgggaagatcacgaggtcaagagatcgagaccatcctggccaacatggtgaagccccttctctgctaaaaatacaaaaattagctgggggtggtggcgcatgcctgtagtctcagctactcgggaggctgaggcaggagaatcgcttgaactccggaggtgtaggttgcagtgagaccaaatcatgccactgcactccagcctggtgacagagcgagacttgatctcacaaaaaacaaaacgaaacaaaacaagcaaataatagtgtcccaatagaagcacttgccctaccacagccctctctctctgccatcaccaggcactttctgacatttccatctttctgacagggtttctcaacctcagtctctattgaggttttgggtcagataattcttagttgagagaggtggtcctgtgcattgtagggtgtttggcagcatccttggtctccacccacttgatgtggtgagcacacacctccccatccacaaacatctccacacgttgccaaatatcctctgggggagctgatttgccacaacccccacaccccaccagtgaaaaaccaatgtcttgggacaagtggaaagtgatgggggaaactgaaacctccctgacgctttggttcctgtaaggaaccacaggagactacatcattgtcacctctccctggtttgcagacattatttctgagtcatgtgaatgaactagaaaccttaaataggaagtcagaagggaagctggggaggagagtggggaccgagttgaaagatgatattgactatttgtacttttcaattagcacaggtgcaacgcttcaggattcttggccaaaaaatgatataaaaatgattggaccgacctgctctttctagggtaaaggtctgtgagtcatatcactcagaaaacatttttgagcacctatgatatccctcatccagtcaatcaagagatttaacagattcttcttctctccctccctgcagccattcttctaggtcttgccactattttcttcctcctggattctcccaagagcctattctctaccttctaccagccttgtttctcagtatccattctctcactgaaggtgagtggtctttttgaaatgcaaatcagatggtgctagtcagagggtgctagtcagccatctgctagcttccctggctttccattcttttcggataaaatcccaactccttaacaaggcctagaaagccatacattgcctttgttatttcattacttacaactgtgtggtccaactccactggaccagtcttgcctggttcctcccagagtgtgggacactaaccaccactgtgtaggtaggcacagaaggtggctttacgtagaacgcagtcacgaccttaaaaaatgttgaatcacatagtgattctttaggttcaacatcctttttcttccttgtgctctctcctagagaaagtcagttcggtgctcctttgtccttcctgcaccaaggcttattgatcaaccttcttgtgttagaaaagaacaagcctcaggctccaacatagaatctagttggcatttaataatactattttatttttgattgtacttacttttacagttaccttttgtattagtctgttctggcactactataaagaaatacctgagacagggtagtttataaagaaaagaggtttagttggcccatagttctgcaggctgtacaggaagcatgatgctggcatcatggggaggcctcaggaagcttccaatcatggtggaaggcaaagtggaagcagacaggtcacatggcccgagcaacaagagagagagaggggagttgccgcacacttttaaacaaccagatctcatgagaactcactatcacgaggatggcatcaaggggattcatgagaaatctgcccccatgacccaatcacctcccaccaggccctacccttcaacactaggtattacaattcgacatgagatttggtggggacacatatccgaaccatatcacctatttatggcatattataaatgtttccagtataacattccagaagtgattagtgatgcaatcttgcctttttttttttttttgagatagtatctcactctgtctcccaggctggagtgcagtggcacgatcttggctcactgcaacctctgcctccagggtttaagcaattctcctgcctcaacctcccgagtagctgggtttacaggcgtgcatcatcatacccagctaatttttgtattttttggtagacgtggggttttaccatgtcggccaagctggtaattccaagctgaactcctgacctcaagtgatccgcccaccttggcctcccaaagtgctgggattacaggcgtgagccactacacctggcagcatctttcctttttcagtgcatgtattcaggtagaaaaagaaagtttacttgaagaaacataaatagtagtagcagtagtttctagacatggcaaataccaggattaatgcttggtatttgggaaacaaggagttacttaaatttgcagcatgctctcatatgccagacgtccttcagccaggctaagaaggtggagtgggcaggagtaggagacattggattgttccttgtaatctctcatgcaatctttggagtttgatgcagatgtcaccccgccaaaatttgagtcagtgccccacctatgcgctccgctaataccttcaacaccccgcttagaggatctgtcatggcgcctgtgagctctgagatcatgtctgttgtgttcactgttgtttctgcagtgtctgacatgcagcatggcagaataaacaagacaccaggtaaatatatcttggcttgatgggtgaaatgggggtaaggagggaaacttatcatccttttcagccaggtctgggccacaccaaaagtgaaaggcagaatgagatgcctagataatccgtgccaataaagatgctgacccacctcctcctggacaacagagacaaaagagttaataatgtgaattacttggggtgcagcttccatctccctcaccacttaaagtgtcagaatttgacccccactggctaatgcaaaaaacacacagaagctggcaagacatgggcttgcttgtccctcctctttctttctacctggagctttacctttacaaatttgtagcacttgaaggtatgtttccctagccatttctggatcataacaattcctttttcctactgacaaaatctgaaacttagccggaagcactctcttgccagggaaagaactgtgtcagacgtgcgatgcgtgataaaatactacggtaatgtggaataatgctttcaactgttgccagggtgagcatgcatgcagaatgatggaaattgcctgcaaatacaaatggttgctctgtggctcatctgtaacctcaatgtaggaaagcggagatattcttttccctcctttgcaatttgcacagcctcttgttggaaactatggagattatgccattgaaagtaactgccatgtttactcaacacacaatttttactaatacagtctccccatgtagtcatctgtcttgtgaggttccctcaatactccagctgttcctgtggctgctgctgcgaacacctcattgaagaaatcaaggtgccaaacccaaatgctttatgtgagggtgtggaggtcatttttgcattgctgaaaatgacatccactttctaccttagaaacaaaggctgcataactgaatgggattcagtgcacccctacccccttctcagtggtgaattcaatgggaattatcagagggctggtctgtataactagaaaagccaaaattgttgggtgtttactatgtgttaggtattttgccttcttttaggtgaacctcataacatgctatatcataaatattatcctcctcattttggtgttgaaaaactgagagtcagaaaggttaactaacatgctcaatatctcccagataataagtgaccaagccaggatttagtcccaggtctgtatgactctaaatcttgaattatttccatgacaaataatgttaaactaaagccagcatttttctctttgagttgtggttaaactttcattatctgtggcctttaagcattatttgttggttttcacgtacccataactatcaggatacatgaaccaatgggaagtcacgtcctcatgaagagccagtagcctaaatgtgaaatttctcatgcataccagaagcacaaggggcaaaacacacacacacacacacacacacacacacacacacacacacacacacgtcaaaggcttctccctctttatgaaaagtaaaatgccattttctttttctacaaagggaacaagataattcattcacggatctcttgattagctcaattgttctgagatgataatagttaccatggattaggtacttactacatgccaggaatcaagggaagcactttgcaagaaggataacataatatttataacccaatgatgtaggcactactattagtcccattggacaaatgtgaaaactgaggtttagagattatgtatcctgccaaggtcactcggttcagttgggattcaaacctaggcctctctggctctgcctccatgttcttacctgctatgttatcttgttttctacaaacccttcctagctaccatctatgtgctggataaataagggaatctttttaccgtagagtgaaaatgagaagttctgaggaagtgacatagtgttctaggaagtgccctcctttaagaacaaagtaggctggtttctcactgccaatcaaagtgtgacattggcccttctggggctcacctttctagtctgcaaattgatggtagcaaaggacacaatgtgtaaggacccttcctgccctaacgttctgtcattctattaaccacattttcccctctcccatcatttctcctgggctttgattttcactttttcatggccagtagaagtcacacatacccaaggcgaggctgccctcctctagtgaactgcaatcatttgaacatcctgcctcaattgaatcatcctgacagctatccctatggctggccagtcaactcccaagcacttcctggaaatgcagatgctgtatccagggcagaaagtacttcccctgtcatctcactccctctctgggctccagccccaaggccttttaggtcttcagactggctccgtgccacccttgcaccagtgcacatgctgttcctctgcctggaacacattttcttccctgcctcctgtggttaggggccaggcaggtttccctaaacagggctaaaggcaggctacgatcctcattctagattggccctctcctatacagtacttctctgaattggtccctatttattcagttggatcagtgtcttagtcttccactatactcacccttgtgtccctgcacccagcccagggcctggctcacaggaacctctcaaaacctgttggtagaagaatttgcacattaacctgccacccacatctgtgttctcttattgatgaggtacaagaaaggaagatggtaggccaatttacagtggggttatgaggctaggtctcctctcagcccactaatgtctcagaaccacgttctttgctgagttcatatgttttttttttttaccccatctccaaacagcaagtaatcttgcagatcaatgcctgagaccaaagagacttatgaatgttaagaagattatgcacataaatgtaccactatgacagccccgctaagaagaatagtgatatcgcactgcgtgctagtttatcaacctttgctacttaaaaaattcacagccaatttaattaaaaatataacagctctgaaagctgctaaaatgactatgacaacaatctatcattttgtaatagtgctgaagatccattagggactttgcactggatgccaactttttaaagcccagatagtaggggcatttcattctgcacaattaatgtcactgcatttaaaatattgactatctatgaagaagaaaataccaaacatctttataacccacattttttatggtcaaaacttgcttagaaaggtgctttgaatttatttgttataagctgcacatttcacgttcagaaaattaaaatggtttctactgactaactcatttaatcatttagttgatttaatgaaaaacactatgcatttttctcttctccgttgctaagattaatactttctgttcattagcaatcaaatattgcaggaaggtttacatcttattctcacttaactcattgccttttatttttaaaaaattctaatagaattgaaatggtatcttttaaatcaggaattttcctcttggtaactcgttttgtcttgtggaaaacacatggctagcctgtgacattgaggcatttatgtctgaattgtttttctagtctttttaggggatgcattatagggaggaaagggagtggacactttagaaaaattatgaatctagttttcagggcccctaactcattaatacatcagtgacattctagcatcctttgaaattctgttaagaagggccctttgatttattagtgggattttatgagctacctgggaaagtgaacccattaaaaatgttaactgtaagcatctggcttccattgaataaagaatcgaagccaccacataaaagtgactctgcacaaacatggcactcctctcccatcactcccaaagcttcccattgtaaatgccacttcatcacagcagtgccatttgcagttgtagtctcatctctgttatccactgctattttcaggagtgtataaatgagcagcgaaattcctctcccctggaaatgcctgtaagagcagattctaaaatgggaactttttgtgacaagattgggtacaaaatagtataattactgtaaattgttcaataatagggccagtagtttaaaagcagcatttccagatttcctttgcttccataccaaaaagcattttcttgaaccccaattgcttcataggaggaaataataaaaggcaggtgatagcattttgtacttagcatagatacaatggtttaaggacacggtgcactgagtcaagaccactaagaggtagagggcaaattaaccatttggacagtaggaaaaggaggcattttaaggtggcatgcaatgagccagccagctaattatagtaagagcagcttccctaacttttactttctatttcaaggtgttcattgcttctctctctctctctttctctctctctctctctctctctgtgtgtgtgtgtgtataaatcatctgtcttcatcattgcattattgatattgattgattgtaggaggagaaaacaagaatttttccattttatagttaggaaaactgaaacacaggcatcagtgtgctgtaaccctactataatgctcttctctttttacgcacttaggaaaaggataatttttttttaacatttgtgcaattatttaatatgtgtctccccaacactgtaatatctatgagagccaaatcactacctgtcttgttcatcatcacagtcccagcactaacatagtccctgctatatggttggtaggtgctaagtaaacttttttttaatgaatgaatgaatattattttctgaggtcattcctattggagcattagtaaagcaggacaaaactccaggtcacattcctgtactattgttgaacttctattcacccttcaggactctggtgaaatgtcagcatctttgggaagcctttctgagttctccctgactttgcctgggctccattaatgcttcgtacttaggcctgttgtgtgttgtttcttttgcttccttctcttcacggaactactctttcatgtgggtaattatcctgttcctcaggctttggatggggttgactccatttctaactggccttgggatgggttcataatccagatctggcctctcagggaaccctatccttctggccatggttattggctcagcaatgatcctgtagcttaacttgggccagcatggtctgtgcaaagtttttataggcattactgaagcagcgggggtggggtgggggaaacccacaatctttctaccataagctagtaggatgtgagcctccggctgctggtgttcgcattaccttccctgaggagaggttgcctgagagaagcagagagacacaaagcccctaatgacattgcttgtgcccctggatccagccgcgcctgaatcaacaatactattagacttttcagttacatgagctaataaactcgttctcattctcttaaggctcttaaggcaggttgagttgggtttctataacttgcaaagggtctctaatttctctatgttgcagtctattgagcatgtactccatgaaatgtgggtgattcatttctgtattcccaatgctgagtataggccttgtccttagtaaaggcttgttgaattaaaaaaacggtgcaattctagggcaaggacatttccacaaggccaggtattttggggatgaccctgtcaataagggctatgtatcttttggatcaaactctcatagaagaaggaagacctcataaagacacccagaaagtaggggcgccaaggtcaaccagaagagagaaaatggccttcagccagtcaaggagtagcttacggcagctaagaataagacagtgggagctgtgcagccccagaatggatttcccatgcctggttttaatcatggctatggtagtctatgtcttggttttaatcatggctatggtagtctatgtcttggttttaatcatggctatggtagtctatgtcttggttttaatcatggctatggtattctgtgtcaaatggaatgactaatcctaggtgctttggaaatgttaaattgttcataagtcccttagagctttgtttctcctttgaaccccatggagggttttgggcctcagaacaggtatattaaaccgtctccatttcaactggtaattgagggcctctcaaagtctacctagaagagaatgtcttctactatagaaagaaacagatgatgcaaaattttgattttttaacctaaagtttggtcctgtctggcaaaacaattgaagaaacatgactttccaatctatttggaaggtgagggttccaagtacaccctcactgtgatctgaaaattgtgaaaatctgtactaatgagaagcttaggaatcacctagacctgggtttaaatcctagatttgccacatttctggggtggtggggtggactgacaggccctgaacagacaacgtctatgagccctagtgttttcatgtgtaaaacaggactatactgcctcacaaagatttgatgacaattaaaggaaattacagatgttaaatgcttaacaagaatctagtacatagtaagagctcaatgtatattaactgtcattgtggtgacaacaatcatgataatttcaagcttttatatccaattttgtgttggatgcttcattaggtaggaatgaacatctcaaacatatttgtccatctatcattatttctatatatgttgttcacccaaccatcatatcaaattcctgttcctttagtttggaggtccttattttttgggggggggggtcatgaacctccttgaaaatctgatgaagtatgggtgatgtgctcctctctgaagctccaatagcacctcacaggttccaccttaccccactgtacctccatccgcctgcactgtgactgcttgtttattcctttttccaggctctgggaggtcagggagtgtatctgcccagatcatcattttctttaccttgcttagctctgtgcctggcagagaataggtgtttgatattcactgaatgcataaatgaaaattgcaaagccttccccctgaccccttaaaaattcacctacactcaagtttttgcatctaatttcagaccctgtctgaggactccaggtaagaagctactattaatgactacctattgtaggtcattaaaaatgcagtagggaaattttcaggccaaataatgaagcagcctgtttttcaggccaactaatgaaacagccttaccacaggccagaaagaaagtgtagatcgtcttctcaagagaggaaggacaaagtcagaattgacactgtgttcgtgatgaaggcaacctttgtccaggtcccttgttttaccaaagacgacaagaggagccagccttgcccaaggtcacatggccactggtaaagagacttgagcctcctggcttccagaccagtgctcatcaaactcaaaccttccccctcttcccctctcgcactgcctccccagaagctcagtccttgcgagaattcaatgaaaatttccttccaagcatggtccgaagacaatgtaaggaaatgcaggatttacatgactttggtcaagtgaggggacaggactttaaaccaaagagttgatttaaatcttttaaaacctacagagtgaagggcttgcctcattgcctcatttgaaagatgaaatcattctgtctttatttttcattgatgggagtttggctttggagggaaaaagatctggcacttgagagctggcccagtgaggataggggttgtcattttctcctcactgaggcttagcaatgcctttagctaaggcccggcccatgtatccccaaaagtgacaaaggtacagtatttcacacaggaacacttggggagcatttttccatgggacacggcgtgagaatccattaatctcactgccacatactcaggctatttctcacaagcttagccagacatttgggtttttttaaaccatgaaaaaaagagccttatcctcctcatcataccagattgctccagcggataaacatcagacatggtttttagagaaatatcacacgatctgagaacatctgcaattctctagaacgtaccgttgtcagaacttgacttaaacgaaacaacagacatcagactttctttcagacgttttgcactgaagctttccattatagcacgaatgcctccttctgaaatggcaccaattgaaaacgcaccaggacacgaacattaccacaactcaaattcagatactcgcatgttattaacaatggtgctaattcctgtttcagagatgaaacttacagaggagataccagtgggttttcctccattgctacttttcatttgctatggaggccacaaattcaagagatcactcattcttaaattaacaaaagtagccaccacctggcaaaacatcaggccctgtgcaggcgctttatatgcacctttatatgtatcgcctcttttaagcccctcagtggtcctcggagacagctgctgttatcttccatgtcatacatcagggcactgaggcccagagcccaagtgatattgtaacagcacttcctgtgtgctaagcactctccatgcattttatttatagtatctcattaaatctcaccaaatcctttgaggtcagagccatcataagctccaatctacagctgaagaaactgagacagctctcaaagctaggcctagtttcctccaaagttcagtcacatttgttccatttgacagtatgagggaaggcctttttttggttaagcgtatagactctgcagttaaacctcctggaccctacccttgttagcagtatgatcttagataagcacgagttaactttaccatggctcagtttcctcacctgtaaagtggcataataatggaacttacttacttacctcaaaggatgaagagaatgcaatgcaaagcatgtagcatggggtctagcatacagtaagttctcaggcagtcattagcagtattaaaaataatactggccagtggctcatgcctgtaatcccagcaccgtgggaggctgaggcatgcggattacttgaggtcaggagttcgagaccagcctggccaacatggtgaaaccccgtctctattaaaaatataaaaattagctggccattggtgggtgcctgtagtcccagctactagggaggctgaggcaggagaactgcttgaaccctggaggcagaggctgcagtgagccgagattgtgccattgcactccagcctgggtgacagagcaagaccctgtctcgaaaaaaaaaaaataccataacattttttcttcttatttttatataaaataaggctgtattcataaaggatacagggattaaagcaaaccaaaagagaagagtgagggtaagtttaattgtgtgataaggatttaggtaagacagcctaggcaacatggcaaaacctcatctctaccaaaaaatacaaaaatgagctgggcacggtggtgggtgcctatagtcccagctactcaggagactgaggtgagaggatcatcacttgagcccaggagtttgaggctgcggtgagctatgattgcaccactgtactccagcctgggcaacagagcaaaacccggtctcaaaaaacaaaaaatacaattaataaataaaaagtaaaaaattcaggattaaggtaagaggtgccccgctgtgcagcacagagctccatcggattggaaaaagtggctgccaggggatgcctccccttattagttcagacaggcttatgtaccggtctccttgcgggaagtcctgtgctgctcagcgttgatggaacacacaatgaacttttccttgcttttgtctctaccagaactcgactgagtgcgccctgctgtgtggttttatccctggtcttgggataggtttccatggctataggaaagaggtggagacagggaatgccaccttctgagttcatcagaatagaagtgtgcacctgcagcaagacatgattctccctaatttgctttcaagacaaaactgtgtctactgattgggtagatattgttgaggcaagatgcggtatgtctagcctgtgtccaacacatatggcgttaggtcattcctttcatctcctctaatggtgcccagtacaatgagaatgaaatgcaaatcccttaccctggctctgggccacccagacccatttgcgggtctctagcaacacccccagaccctctatctctcccttggtcacaagggcttcctttcctctttaaggtccttacaccagctcctcctttgcctgtgacactctgtttccaggtttttcatgtacgttcttcttctgttgggtctctcctcgaatgtcagtcttcaaagaggccttccttgtgactccataaaccactgcagctctctgattcacttccttactctgtcttgtttttctgtctgctaaaatagaactgataatcctcgtcctccttctctcacagcatttctttgatgagcaaatgagattcatgtgtatgtgtctatgaagatgcttttataactgtgagtaatcaccagggatgcaaaggagggttcaatttctatgtcagttcacactgggtgggtttttctgggtttttctgaagcacagccctgagatgaattccaagactgcagtattctcagtgacaaagggtgcagcaatcccttaatgatgtctgacttgggagagggaattagaggcgtgggtgtcacatatttgctatctgtgccaaaaataaagtcatatattaatagaagcccaaaatcaataatttacaaatagcttcctcaaactttcaatggtacttctggaaaagtgagatttgaaattttactctccttcctttgcactctaaaaatttattcccctgatattacttttatattaaaaactaattagaaaacttcataggtttcatcatatatttaacatcattgctaaagttctaacactatttttggaaatcatcaaaagagaaaagtgtaagacagacaaggaaaacagagaagttttccatgtttaatattataagtcaccacaaagtattattttgatattacaatttttttttttttttgagacagagtcttgctctgtagcccaagctggagtgcagtggcacaatctctactcactgtaacctccgcctcctgggttcaagcaattctcatgcctcagcttcccaaatagctcagattacgagtgcccaccaccatgcctggctaatttttgtatttttagtagagatggggttttactatgttggccaggctggtctcaaactcctgacttcatgtgatccgaccaccttggcctcccaaaatgttgggattacaggtttgagccactgtgcctggtcttaacaaattttaaaaatagtgataggcaaatacatctaatgaaactagagtattatttgtcatttctttggatgaaccaatgcatgtaaggaggatgtagttctgggtttctcctgtttcatcacacagtaacccaccgtggctctctcctccatgccgatattatataattgtcaaggcattgagacagattttaattcatttaataattaggtcaataaaaaccattattgctgacagtgccattaaaagtccataatgtcaccttcatgggggaaaaactaatatagttccgttggattttttccgtgaaattaatatgatagcatttcagtgggtgtcttaaatagcttaaatagacatttttattaacagaactaatcatagaattaaaacaaatgaaaatcgttacatttgctgtgatgaggtatccatgttcacaggattttatcagcctcattcctgtgaagaacctgaacatttactaccacaagaacagtatattcaacttgcctggagcactgcttagggtcccaaagaggctgcccatttgtgttttggtgatttcctcttcaacaccatggctccatttctcagagccaccctactgggaaacatgccagaaccataacctcctaaaccaaaaaccttcttcatgtcccctttttggctggtagtatttcatctagaatatctaagacagtatttcagctcagaaaaatactaaagcagaaggggttgcacctacgccgcccagcaatgttttatcacctctccttcctcagcttaatcactaacggtagatagatcttaacatgaactaaggtaaactctagtatagtgctatacgatttaggtaaattctcactagaagagcaagatagcaggaggaaagaagattataccaagagtttcctctcagacacatgaatgctatggttctgtgagttattcaaatgtgcaagtcactgtgtatggctgcatcattgctgcttgggtacctacaactcttcataatcagatataccaggattcacaagaattcaggggtggtcaatattgatcaaaggccaaggccacagatgtagctagcacattatacactgacagaacgcttgctaatgtacacaaagaagtagcggctggagcctgtgaggctgtgcaaacagtataggctttgggtttgggaagacccgcattagatcttagtaacttggttcccaacaggatgaccatgggcaggttagctcccttcagttttcagtttcagcatctggaaaatggattgatgaagtccacagttgtttgactctgtggtttttaggatggttcgaaagagatttcagatgaaacatatctaacaaacactgtggctggcagagagtaagggctattcttcagaggaaagagtcatctcagttggcattggacgtatttaaaatatgattgggagggtagcctctgctaacctccagccacgttggtgaactctcagaaagccttgtgcatgcccagacatgctgaatctaaacaaaccaaagggaagctgcacttctccactgattactccctttcctgccctttggaagattctagaaacactaggaaatctacttaaatattttttaactcagttttaaacaacatctctcagaaaataccattcttagtagaataaaccttctttgaaggcgtacatagacttacatatgtgatatttgcaaccaatcagcattttgggtgactgggcaggtcttgggaagtgggaggcacagtaaaaatgaaagactttgtttgacctccctgagttctaagcaagatgtggtgcctgagaaagcttatgcaggtcctactgggcaagactataaagccaagcgcaacagagaaaaaaataccttagggcacggacgtttggtttctcaaggcctgtgatggggaaggccctgaaactcccctaacagggatggaagaaatctgtggatattttgttcatgagaagtagaggaaaaggggaggggagaaagtggaaacagcaacgtgtctggaaaccagctggcacctgtgccttgaagtaaataaattgggtaaagaaatatgatagctagatagtcctagaaatgaacatcctgaaatcatcccataaactttattttggagggggatagggaagagaagagaccctttcttccatttatttcatttagttggtgatattattgggcattaacttgggattcactattcctgtggcaagtacttacctttgctgaaattaccaaatattctctgaaacagactcttatcagaaaattgatctataatacataacggtgtcttgcaagaaaaaagtcccttgtgggggcgattttttaaaatggttcactgcaggcctttcacaatcacatggaaatttggagattgctcagatattgtgggaagaggagaaagggaacaaagagagacataatacttgagactttacaggctcctaccattttctagtctattcgacaagagcagcagaggttcatatcaaggaagtgaaaaccattcaggaatacaaaaattgtttacaaaaaacagcctgtgctttgcattcttttctgttacttcgacaattgccaagaagtgtaactgtgcttgctcggtattatttaaattaaattatcaaatgcaaatgctaaatatgaacctctcagcaaagcactgggttataatgccatgtcctctattcagactaaaagctgattactggttctggagttacaaacatgtcagacaataatttaattgctttgcaggtagaggaatatgcagcgttcttgttctcattctggaactcaacacgactctttaatacaacataatgatcataaacacacacaaagtcttcgcctcacacctgctttatggtaaaaagaagctattgcaaatttctgcaaagctcaaagaatgaggcagtgccagattttttaatcactaagcaaaacaggtttctcaccaagtggcccgggcttttactcctggttcagagagttacaagacacattttcaaaatgagtttaaagctataatgaatttcaggtgcaaaggaccaccgtctaacagctaatttgcttcctgtcttcaactgagctgttaaccataggcagccagcatgtgcacccctttcttgggccactggtgaagacagatgtcacaatcaatactcattaactctgggatcagtgtgtatcttcctcaggaagagaaagggggtcttaaatgtaactaggaggactttgtaagcattttctgagcattgcagtggctgagtgttaaaccacaacaggacaggagtgcaggagggggagagaagaaaggggagggtgagagagggaagggaagaagaaaagaggccacatttcgtgatctcctctgtctctggagctcttttttatcagctcgtgaaattcccaaggatcctgatcatctcccccttcccagctcatcgcaaagagttgttgtacatttctttgcaattgggtagggaaagatcttgaaaggtggatccaacttgaacattagacttttgtgaaacatgatacagaaattgtagtgttgcagagctgtacctgctcatttgctgactatgatgacccaacatttattgagcactgtatgccaggcctgtgctacctcaatgcttcacctggagtaccttatttaatccttatggcaatcccataaccctataggaagcagtcatccttttatatatgatgcacataaaactgtctgaaatgatttgcacctaatgtaatgatggtaggcttaaatgctttcatttttgtactttgctgtgttttaacaagtttttgtgatggatttgttcttgtttttgcaaaatcaagaataacttaaaaataaaagactggatgccaatacaaatctcccaagatgttaaccttggttaattctgggtgatgagaacgtagatgattgttatttccttctttgtacatttctgaatgtttagtttccctatataagtgaaaatatagactttaaaaaagaaaaacaaaagaagaagcccttcactagtgccacagtgtgaggagaatgaagcctaagcctaaattttattaaacagcagggtgacccaatgctctgtatcaatgctagatacaccaccaagcattcgctacgcataatcccaccagctccttccaacaactctgggaggtaggtgtcaccaccctcactgtacagacaagcagagtgaggtttcgagtgggtaaaggaccagcacttgaggtcactcgggtatctggcctccacttacccttctggcctgaggctccatggcatgccctctgacctttgctcataccctggtctccagccgcctgagtccttgtctttttctgaccacaacctcaaagtccctaggtccatacctaatgttcacactctctcatttacttggaaagccattttccagactacacccattcttccaaacgtgtatcaaatactcccccttccacaaagattctctgagtcacctcagccttagtgtattcaccttggtgtagtatatgccacaggctgccacatggcaggtgccaggccagctcaggcacactgaatgctctgtatggcttatgcagtgtttaaaagatttaaaaaataattagacttgtattaaaaaaaaaaaatgtgtacctagtggctcaggttcccctaccctgcttggcaataattaactgtagccaaagcgtctgccctattcagacagaagcctgtgtgtgctctagttcccaacagtttccttttaatactccttcttatccttggcccatttctcttaattcattgttgtcaggcctctgagcccaagctaatccatcatatcccctgtgacctgcacgtatacatccagatggcctgaagtaactgaagaatcacaaaagaagtgaaaatggcctgttcctgccttaactgatgacattaccttgtgaaattccttctcctgactcagaagctcccccactgagcaccttgtgacccccgcccctgcccaccagagaacaaccccctttgactgtgattttccattacccacccaaatcctgtaaaacggccccaccccatctgccttccttgactctctttttggactcagcccgcctgcacccaggtgattaaaaagctttattgctcacataaagcctattggtttggtggtctcttcacatggacacgcgtgacaattgttttatgtgcccagcacatcacaggtgttcattgagggccagaaactagtcacttcactactgctataatcctagggagagagaatggtggtctgaattacaagcagtgagaatagagaaaagatattccaaagaatctgtcctctgaaattaggggctttatttatttattggaacactttctatcttgaactgtagtgatacgggtatacatcttacctattctacttgactgactgcatccccctgaagacacgtgtcaggtgccatgcctgccctgtgatatccccagcgctgcctagctgaatggtgcatacataccaggcacgggatgaatgttggttgactgatcattcattttaatcctgaaacctggcgtttatgtttccgctacatttaaaagctggcaaaacacatctccttccctcccactcactcaattaaaagctcagtacattaattatctgaattaaagtcaagagtctgagatatccctcccaatttataaagacagggacgaggtaaatttttttcccaagttgtagggacagaaagaagactaaagaatgaggaccttacaggcgagcacggggccagcgaaggattctgttttaagatcatctcctggtgctcattagtgctgttgctcttcacctgggtgagcgggcttgcttccatggagaagagacctccgccagctcctgctgcattaacggtctccgaatgtgatttggcggcagcacgggtctcattagagtgggggatgtgcaaaggcagaaggcctcactttgagaaaacactttgcgtatgaacaaaggtggaaagatgtcaggcttttaaagggaacctgcatctcgctcctcacttagcaaagtcatcaggagattctgctaagtaaagaagttctggaccttttcaagctattaaaggtgacccaacaaagcaaaatggctttgttccccaaatttctttttgtcagttgccttgaacaaccaagcctgaacgaaacagcctaagggagattgccaggtaataataaatccctatttgcttcagtaaaggacatctcaaagaagggataaaataaaaaatatcagaattaaagaggcacaaaaaaccctgaacatccggggcatgtagatgctcggtagcaatgaatgtattaggttggtgcaaaagtaatagcgattttcgccattactttcaatggcaaaaactgcaattacttctgcgccaacataatacttggggcctggttctcaggggtagggcttccagcattttaagtagcagtctgccatcaggcaagatgtgcatattcatcattgatgtggcttgatcatgacatattctgttttcttgagcaaggaaagaactcagcaacatctcgcagagcgaccatcaggttatgtccttgtctctggttcatttgaggagagtaggaaattatgaaacccacaagaagagtttatggctcctcctcacactcctacacttaaatccaggaagagactgccaggcgtcggtcaagtttgaagatatttaatggactatgcattatctacactgccccatttcaaggtcaatagctgtctgtctctttatcccataaggctaggttttcccttgaagaagaaggtactgctgttactggtagagggtgcctatgttcttggcatcttgaagaactggacaaaatgcgcaaacaaagcaaggaaagaatgaagcaacaaaagcagagatttattgaaaatgaaagtacactccacagggtgggagtgggcccgagcataggggctcaagggccccgttacagaatttttgggggtctaaatagcctctagaggtttccattggttactgggtgtatgccctatgtaaatgaagaggatgaagtaaagttatgaagtcatttacttggcgtatgccctatggagaggatagcccctgtcatagctcaagtgtgaatcagccttatgttccctgcctgcagaccctattttcctgtctcactgccacttgggtctcctgagaaggccctttgctgactctgccttctgggaactggcaagtcaggtgatctctggagctgccccacggtagaaagtgcagagcgaacagccgaggactgtcatgcactaagcatttggggaaaccaccctttctcccaggttggtgggctctctcgagacaggtacctgtacttacttggtattggagtgctctaatcttagagtctagtgtaggcttcaggggagagggagctaaggcggccattctgtttgctttgtttccaggccttgggtttgtctctagagggagaaagagtcctcctctgtctagcttgaagcagtgggaggctgtatggggcacggaataagaaactcaaagtgtccctttccggcgtgtcctgctctgtgggcacttactccttcagagcttgtgaagacagagataaaggtcagtcaagcccaggaccaggtgttgggattgttcttatccccaagttttctaatttcactaggaatattaaaggcaatttaatgcaatctgcattttaaagataaaagtgatggagttcaggacatgcttccccaaaatatggcaccttggcatagtgaatattttcagctaaaggaatgtgagaaggtaacagaagtaggaaggtctttctgactgttcgctccctgtttgtccttgcggcaggttagaagaccctcattggagaggtgccctgaagaaaggaatgttcttatctctgaagacaaagggtcacagagaagaatctgaacaaaactctgtgctaagtgtccccagtttattgccattagactacatcctttttgacctagaagctccaccttcaaagtttttaggtagccatgaccagtctaactgtagaaatggaatggaacattggaaagactgtaaacttggagctctaagaactaggttcagtttcctccacttatcagctttgtggccagagtcaaattttgcctctctgtgcctcagttaccttactacaaaattaggactattctgaggcttcaatgagggttaaccatgtactgagcatgatgctgggtatgctactctgtagacactacttctctcccctctcctctttggtgacttttaaagatcatggggaagctgggcgcggtggctcatgcctgtaatcacagcactttgagaggccgaggcgggcagatcacgaggtcaggagatcgagaccgtcctggctaacacggtgaaaccccgtctctgctaaaaatacaaaaatttagccgggtgtggtggcgggcgcctgtagtcccagctactccggaggctgaggcaggagaatggcgtgaacccaggaggcggagcttgcagtgagccgagatcacaccgctgcactccagcctgggagacagcgagaatctgtctcaaaaaaaaaaaaaagatcatggggaataatctacatgaaaatggatgttgtaaagcctaggacattacatgtgttatgtggcaagaggggtaaatggtagagttaatttttaggcctctcttaagcctcacaatggttctaattttgtaataaggtaactgaggcacagggagacaaacacttgactatggccacaaagctgataaatggaagaaactgaacctagttcttagagctctaaatttatactctttccaatgcttcgttccacttctacagttagactggtcatggctacctcaaaaccttgaatgtggagcttctagatccccagcggcaattcccatcaaggagaattttgcctgcttgactctctcctaccatccacagtcattgttactgcaagtgagttaaagcagttgagcaaatcatatatatatatatgggtacagggtttatatatatatatacatatatatgtatacatatatatgtgtatatatatgtatatacatatgtatatatgtgtatatacatatgtatatacatatatatgtgtatctccccagtgtatggggttagaatgcagctgtggaacatgggggtgtcctcttagtgactcaaaccaaattatcactggagaaacaatgagaacaacaaaatcaaatgcaaaccaccaaaatacaagtgtagtcctcatatcaagaaaaagataagggaaagatcttcagaaagcccctctattaattatttagtctcagctcagacagttccagaaacagaacagtgataaacaggaccattgccatacttctggagatgaggaaaacaccagaatagaaatcttcagtgggctagtatgggactctggctgtgatccctctcttatccaaaattctgctaagggacttgcctgagaacacacacagatttctctatgagagcaaaataagagatatatacataggttagataatgcaatgaagatcaaaaattacattttggaatgttgtattccatcttatggggcagcatttaatcaggatcctagtgcaatcttccatctggagccccaaatccaatgtcacacattgcgggttggggtgcggaagatctagcttaaccctagtgaggaagatgtcctgcctggttaacttccagctcagtgggtattagtagcatagcagggatgccaaacaggaacacactatggggtgtcatcagcaagaataaggtccagagctatgtggtgggttagaagtctgaaagtcagaaaaggctttggaagccctcttgtcttccattttacaggtgaagaaactgaggctgaatgatttgtttaccattcaggttacacagagagttaaagtcaggacccagaccttccaagtcccaggccaaagcaggtgattattctgtagcatgtgctgtccatattcctcggcagcagtatatcccagcagcagcataatttcagaaaaggaatgagaaaaggggatatatccattggagggtacccaggatcaggggtttcaaagatgcacaattctgggacacagggtgagtagtcatgagaagtggagatatggggtgggggtgcgtgatggtttccgcaaacacaggagaaagaaacattaacaacgtgggccgtggaaaaggaattaaacttgtttggtttcatggagcaggtagataactagtgggtggatcggaagaaagcaatttatatgtctgtggtgaaacatacacacataacgtaaaatccaccatttagccattttaaagtatatcgttcagtggcatttagtgcattcaacagtgttgtgcaaacatcaccgctacctagtttcagaacattttcattatcccgaagggaaaccctgcacccattaagtggtaactcccctttcccctacccccccagtccctggcaaccacttatctgctttctgtctctatcaatttgcctattatggatatttcatagaaatggaatcatacaatatgtggcctttagtgtctggggaagcagatgcttttttaacataatgaaaattgcaggatgaagagtgtggtttgaaagggggcttggtaatgacttaggatgcttgaattcaggccaaggctagaagtccacatggtagggatattgcggaggggcctctgaacaagaagtgggcttgaaaggctggctcttcagggcttttctgacctggagatggaggccctctctgacaagcccctgggactatctccctttttccccacaaccccacctctgccagtgatgaccagtctctaccctacggtaaaactcaggtccaaccacgtccactccttttgctaatttcccctcttttcattctcctcccacctccgggtctgttgacacttgcttgccaatttgcctgacacactgcagacaatcttctcactcaagcatgtttgacctgaacatacagctttctgctgagctgatctggagtttcagttggccgtttgggcagccagacatgaattaagaacagggataaacaaggatggcttgagctttaactacaccgatttggcccaataggctcggggataatctataagacctaacagctgagggcaataaaattagctacaaagggactgcggggtagaaacaatgtcttctgatacttcacacaacacacactcacacacaaaagacaccaaaaactctccgacagaagccttacaacagcttagaggagaggcattgtgcttgaaaaactatattttaaaaagcagagaggaaacccacggtgactgaagtatcattttcccggtggtgatcatggatttcatcccaagacctggaaatcatgttagaactacagtatcagcccagctttgtgtctagggcttaaacttgaaatgttgtttacataaatagttaaggaacacatactgggttgaagagtgtgctctccaaaaatgcatgtccacctagagcctcagaatgtgaccttatttggaaagaggtcttgggagatgttattagtcaagatgaggtcatactggattagaatgggccctaaattccgtgactggtgtccttataaggacatcaacggagggcagaaggccatgtgaagacaaagcggacactagagtgaatctgctgtaagccaaagaaggccaaagattgcggaaaggaaggattcttccccagaactttcagagagagcatgattctgctgacactttagttttggacatccagcatcttgaactgggagggaatgcattttggttgttttatgccactcatgttgtgccaatttgttacagcagtcctaggaagctaacataatacactcccaattccctcttcttttatacaattgtacaaccctatttgaaacatggaaaaggctcttagttctcacaaaaaaatctcattatatttggagttcaacttctgaacacgggtttagaaacaaatagggtctgatttcactgattttcaaagggctttctttgtaatgactggggtttgttttatttgtttgcttgtttccaggagaagagaagattggcctcagacacttccgtcttcagacctgtgcctctcctttgaggatcccttccccgaagctgccaaggagaaccttccctcacattgttcctcctttgttccccgctctccttttccaggctgagagacctggggccttggaagcaagcacacgctggctgagctgtgattcctccatgttgattataatttttatcacattatatgggatccctctggtggttactaggggatacgtcagttttgagagattggaacctaaccaaagaagcttcaaatctagaggataaggggactcagagtttacaagtcacagcaagcagatgctggtctgctttaggtgcctcttacggggattgtgagagggctcctggggcctgaggagggtcttctgaggtgtgaaaggctgtactggtggtccctgaaagccatcgtcatttgtgtgaggaggagtactggaggagctgtcttaccacatgaaaaacagcatggagcatcccagccacatcaaaggcacggtttgagccttgggctgtagaggctcagagagagtgacaaataagaccctggtgagagaccaatggggacagtatttccagactttggcatgaaacagatttctgagcacctcatgaaatgtctgcaagggcagctcctcagagtgaccctcccaaatcaatcaaagctggccccctatcttaattatgacttacaaatagaagcatgcacctggctggatgcagtttgccacatggtttacaatagcggtagaataagaaataacttaccaaacgagtacattttcttggctggctggggcactcagagttgacactggtaaggctccattaaaatgcctttatgttctgatatacacagatgtgttaatttatagcatattcatcagaagacataaattaattgctctctgatgaattttataacacctcctttatgcctctccaccctccccctccaaagtacactgaaaaggtcaacagcactatcgaatgcagcacacttcaacttccttccaagcttataattaaagctaattagtagctttggtaattagcgcatgtaagctttctgctttctgaattaataagactgagtcaggttttgagccaagtagacttttcactcactggttctgattcttgaactgtgtttggctggttaatttaaaacatgtctgttgaaagtggaatactagaaagaaaacatacttgtgatggtctgctctcaagccagtgtgatttatgaacaggccaaagtggaactgttgtcacaagagaaaatcagaatgctctgggtttccaataactgaccagtctcaacctctcagtgtgaaatgagttgtgcccagttactatgtcacatggacacaacacaacgtcaaggatgcccttgcacacttatgtcaccctctcataacacatctgtactaagcacatcaaatcctctttattttaggagaatgcagaggcaatggcagtggggtgccaagatataactaactgctcattttgattcaaataaaaatcaaagaggagaaaaatcattagtcaaatcagcttctgcttttgtgtagacaaagtgattctccaaatagcttcgtgtttctttttttagccagcatgtgggcatcctgcatgcccagacagaattaaaagtgcatgttttaaaatcaagaaatcaaatctatattctattaaaagaaaaaatgtgatttgttttcagactttagaaacagttgggataaaaatttccacgggtgagctcatttgctttttcttttcccatactaatctcagaaaatttatttttgttttttaaagaaagaaaggaaggaagaaaaagaaaatcacttagtgatttactggactccttataagtccaggacaatggtgggggttgctcacagcgctagtaattttgatacataaagaaaaggaaacagtcactgctgcagagagaggaatatataagacagctctgggtcactagagtaaatggttttcattttaatggcgcacttactgccactgtgatagccacatttggatctgtaaggggcagttaatactattcaagagcaaggcacatttggtcttgtggatggctgtgattgtgaaggtgacaaggggttatggattcccacagcctcacaggcccagctgaataggaagccttgtgcccccttggcagctcatcctaccccgtggcagctcatcctacctaggtggatacactccagtaagatctatacacagtggttctcaactgggggagattctgcccccaggggatacttggcaatgtttggcacagttttgattgtcataactggtgggagagggtagatgctactggcatctagtgagcagagactaggaatgttgccaaacgatcagccatgcacacgacagtcactcctcaacaaagatgatctggccccacaggatactagtgccaatgtcatggaaccctgatacagaaggtctaaacagggtctgaggccctccttgtctttgaggaagagttaaatgttagctttccagattgactctggactgatcttggccttatacaagtcagaaagaagtgagtgatagctcacccacaggggctagatctgagtcagactggaagaagtcggcacactcagggtaacggcagctgcctaaaagccaagcgctgggcatttttatgttgcagctaaggccagcatgctgcattatggatgagctcatgtgccatggcaaacagtttaagaacgatgcttatatttaatgaatcctaaatggtttattacagagggtcaagtttctgcttcctgtgggaatttgacatttatgaaaatgcacgcacattaattattcagtggagacgtccttcctatggaaattcactttcctgtacactcgacaggactacattccctgtctgcatgggctactttgttgttaatcctctaagcattaattaaataaaatttgcaaccgagccaggatgcatctaccctcaaatgttatgcaaaagacagttaaatgctgtttgatttttcctgctagtagccaatcattacccatagctatttatgttcttccttttgttctttaaagcataaacctggtatctcttcccactgagaagaaaactacgctcagtaattaaattacaccacattaaacttacttaagttcaccagcagggaaaattccgtgcccctgggtttaacagtaagtcctaatcacgcttgcaagccatatcttttctgtgagttgttatagttttcattcctggaattccattaaaaatggtaatgtcattactcctgttactgctcaaaaccaacagcataatcctgaattttaattagtaattacaattaatcattatttcattaatgaaatgtttagttggtaattgtctttgagcaccttactccctaggcttataagcatttcataacatctaatttgttgcctgtttctgatgaagtggcactgtcaaccttattttatgttaacactttgatggggctctgcatcccaggcctgcaccaccggctgcatatttacaccttggaaatgtgtggcttctggctctcgataaggttcgcctgaggacgtaccctcgcattctttcctgccagcttaagaaggcgactgtttgtgctcccagagagcacagcatgtgaagagagaaataataattcctggaacgcttacttaataataaatctgggatccaaattcatggatttttgagaggggatagagcaaggatttggaggtagtctttggaacaggaaggttgattttaaaagagcttaaagaattaagaataagctgggagggttgtcaagaatttaacacgaggcaagatttttgttgatccttttgcaatagcaaagatattcttatttattaggatggttttttaggggtgaggggaagcttgtcttccccaccaaaaggtcagggacccaagtatgccttgcacacagttgtattcctagctcctggtgcggggttgggcatacacgtgactcaataaacagctagataagtcattgttcctgcatggcctatggttaggctatgaagggggtaactgaggtacaagagttaatggtggtttggtgatggtagcagggtgtgggatgctaggagatgccaaatcagtgggctggtgtgctcacaaatgacctgatgtcatagttgtctgtcactgacaattctaaaaggacggattcatccgactgccctctatgtaaaaaaatttacacatacacacacacacacacacacacacacacacccgacggtgaattattcagggaggagaaagcctgctatccttggcaaattaaacaaggaggatttgagcaaagaaaagatgtgctgctgttatttcaaggaagtattcacagcttcagaattaaaactgagatggaacaacatcagacttgttggaaaatgctccgcgtctgtggtgtatttcagacaagttagtcagaaaattcaaaatatctggaagaaataaatgacggccaacagtttggtgttggccaccaggtgccagagcacgtatggtcttggcctaaggtgagtgaaagacaggtttctgggtcaagacaggtgtttccaaatggcaatttttgaggctgctgacattttacaaaataaaagaatgtgataaagcttaagtttttggttgtattttataaatgtctatatttaagaagttcatgctttagcacacataagacattcaacaagtcatttggaaataacatcaaatgtcgaaatttgagaccctttataattaggagtggaggaccaagtggactccatcccttgtccccacataggtcctatttctttcctaggccacacagcttttaaacataatatttctcccctattatccttcagtatttatagagcatccggcctgtgctaggagcttgaaaagacagtccctctctcatggagctcccaatatagaggccctttccctttggactttcttctactggaaattgccttttcttgtgtagttccctttgctgactctgcttgtcctcctgttctcacaaaggctaccatgcagtgggggaataaatatgaaaaaaaatataagatcattgcactgcagagtgaaggagcaaatcccttaacagtcatgagtacacattccagctcatgagcataaagccacactattcatagaaatgggtgatactgattgtacacttaccatgtgtgaatattgtgcttagtatatcacatggattacatcacttcacctgcttcggagaacctggattgagcataatggaaattaagagttggcccatccctagatccacatctgttacctgctttgctggctgcctgggaatgaggtcttgtctgtctgttttttgtttttttaacttcagctttggcctggagctgcagcccaggccactatggaaggaaagggaatgtagcctttataaaatcatctatagcctggtgggaatgtcaactagtacaaccactatggaaaacagtgtggagattccttaaataactaaaaggggaattaccatttgatccagcaatcccactgctgggtatctacctagaggaaaagatgtcattatatgaaaaaaaatacttgcacacacatgtttatagcagaataattcgcaattgcaaaaatgtggaatcaacccaaatgtctatcagtcaataagtggataaagaaattgtggtatatatatatacaatggactactactcagccataaaaaggaatgaatgaattaatggcattcgcagcaacctggatgagattggagactattgttctaagtgaagtaactcaggaatgaaaaaccgaacactgtatgtcctcacttataagtgggagctaagctatgaagacacaaaggcataaaaatgacacagtggactctggggactcaagggaaaagagtgggaggggggtgagggatgaaagactacacatcgggtacagtgtacactacttgggtggtgtgtgcaccaaaatctcacaaatcaccactaaagaacttattcatgtaaccaaatactgcctgttccccaataacctatagaaataaaaaaaaaatttaaatcagctagagccaagcagaaataataaggaaagtgaattccaagaaaaagtatggaattctcttcaaagcataacagaaaatgttttgccatttctggttgttgtcatgaagcaaaaaaacccacttgcccacttggcatgtcttacctgacaaaaactacaaagaaaggcctgcccagggtttctgcaagtcctggatctgggaggctgtgtctcacagagagtgacagccaagactgaataactgtgagactgtgggcaagctggtgagttcttctgtgcctcaagttcctctatgtaaatggggacagtgatccttgctcttgggcttgttgggaggattccatggaatgatatgtgacacctggcacacagtgtacactcagttatcatcacatatgtcatcttcaatatgatttttgccaattagatgtggactttttgcgttcattaaaaatttaaacaaacaataataacaacaatcacagtgagtttgggtttataatactgtggatttcttccttggcatgattggagataaaagaaggaacattccatgtgatgctgtgaggtcccaggaaaggtgtgacagagaatcctgagtcatgcttacctgtcattactagtgggaatgagagccatctgggatgacctaagtgcatattgtttgcagacagtgataggtgctcagggagcaggaaagtggagcatgaactcacaatagaaggtaggagcagagacaatcaagtcctatcctaccagatcaactgagagatttctattccctaaagttccacagtctttgtacccctctcaccatgtcaactttgctctccttgaacgatcttatcccctctcttgaaccatactccctgtttttctcacatttacgtccccttcaggatatggcaaattgtcttatgctcaggaaacatttgctgaatgaatcctctggagatcttcagaaaatcagcatattccaaatgaagtgactgagacttaagcaagagacccagggtgggatggacagactcttgaatagcatcttgatctagaccagtataaactcgtgggacctaaacaaaagtggacctttgttcagtgaagaagattcccagggagcaggtagaagcagatggagctaactccagatacaggctgtgctctccgcagaccccagcgtcttcgtagataggaggtttagcagatggtgtttttgcattaagtttctaaattaccatctataagatcctctgttttctaaaaactagttgccttaaggctttaagattttaatgtaattttaatgtttgtgtgtgttgttagtgtacctgtttctcaggtttgctatcccagataggttatttgctaagatcagaagaaaatcaattggcaaaagaacatgctcacatgttacatgttattaccagttggaacaagagccatctgggatgtaagactatccaccaaacgggtgtgtggaactgtcccttggcattgcacaggaggaccacttttagtatgatttcctgtgctgtggctatgacatcagggaggctgaggcaggatcacttgaggccgggaggtcggggctgcataatgagttctgatcgtgccactgtactccaccctgggagacagagcaacacccgtcactaaaaaaaaaaaaaaaaaagaaagaaagaaagaaaagaaaaaagaaaaagaagaacaaattcagaagctacaataggaatagttcagaaaccatcctccagccttttaaaggcacagaagagctttgtttcacattcgtttcggcttccaaagcaactagtcaagtcagtttcacctgttttattcacaacagttatctctccaatccagattccttctttaaaaaaagggaagaaaaaacattctcatatttcttgttttgctagcaagaaatgagctgcagaacactttcagagatccactagctgttttccttaagctgaggctgagagcttcaggggcactccaaagaaagaaagaaaggaaagataaaacaaaggacgagaggctggggggaagaaagagaggaagggagggagaaactatagagaccactgtgtggacacccacaacttctggttctgaggctggtgggaaaggaatttgcaatagaagaggaggggaactgagaggagagcactgtattaagagcttataggaattctaaaaagaaaaaaaaaggaggcctttgatccattccaaagagggaggcagaaaacttcaaagcagaataacagtcccctgcactctgccctactctaagtacccggagcattcattatgaatcagcccacctcccctcggcccacgtggggctgtgcaagccagacacgcaattcagacccacagcttgttcagcctccccgagaacacagcgtgtgcaaggtttgggaatggaaatatagcagggtgcccactcctaagtggggttaattcacggatgtggaaggaatctctacctttcgcagagactgctagaaacaccagcttcccttctttctcttcaaaggaagatggtgtttttttctccttaatcctgagtcatttacagtaagatacacgtaaataatagtccaggaggtaaaatgtgatctacacagtctctacctcaaaaataagttttttgggggacttgtttaccattccgaatgtgacccggcagccctttacaaaaagtaacatttgcttttattagatacagcagatctatttctgtgagcaccgcagatgtaactgggattcatttttactggatgtctcagaagaccgggccgactgccagctctcctggacacaggaagttacagggtgcggtcacttctgctcacccatttctccttcaacagcgcagatcacatgcacagagttcttaggagacaggtcttccccaaggcaaaggcacacagaaatgctttccttcccagctgccccttgatgaaagaaactaaacacctcttcagcatggatatgacactagccctcggcttcttattttttgcaatgactactctgtgtcagagtcagtaaaaatcgcaatgcagagaagagagataaaaagaaacatcctggagaattctcctggttatttttaaaatattgtctctgttgacttgaagtggtgtagaaacagttccatatgctgtgtttcttttttcctgttgcatcttatagtttaaacatagatcttttatcggatacaacttctgttaacaatatggcctactgggttagcaaagaaaccgttcttttcttacagttctggatttggggaggttgctcacatttaactgtggaaagcattatgctcttatggtctttgccaattcttttctgtaacacaaacctaaattacataccaatttctcgaggttcttgcctagtttggaccaaattaggtcccacaaattcctgatcttagcaactgtgtctctcagttattttccgtgagacaatatgtttgtctgtacttcatattgctttgtggagacaattaccagtgctatatccctatttttctttttcttgaaaaaaaatttaatttttagaaattatttgtataggaaaaatgttaaaatagaaataagaatataacctctttgaccaccctgctccagtcctggtcccctccctggaggtagccgtattagcagacaggctcgtgttcttccagacatttttctgtatatttgcacacatctaaatacatagtcatatgtcttgtttttgttgttaccatcattatacaaatggaatcataccatagaacagatgcctcataatttatttacctattcctctattaatggatgctacggtctgaatgtatctcttcaaaattcatgttggaacttaagacccaatgtgacagtattaagaggagcctttggggaagtgattaagacatgggggctctaccctcatgaatggacttagtgcctatataaaagacactgaagcaagcactctggtcccttctcccttccaccatgtgaggacacagtgtttgtctctttcttcctgtgaggacacaacaagaagactccatgccagaagcagagggcaagccctcaccagaaacccaatccgctggcaccttgatcttggacttcccaggctccagaactatgactaataaacttcttttttaaattacccaggctaaggtattttattgtagaaacaggaatggactaagacaatgaatatataccttgcctgttaatttgctgagaaccaaggtttcattttcaacatttactagctaatctagcctagagaagtacaaagaacccaggacttggattttagtccaacaatactactaatgtccaggtaatcttcggcaaatgatcatcctctttgggccaacatatcctcagctgtcagaccagtgggcatgtacagtgaacaacttagtaccaggtactacaacaacttacacatgcctaggccccagggcaccatggtgattctgattcaaagctagggctaagattggctacccttagcaaagaagagttactgatgtgtaggtgagaaaaatgtctcacgatttagaacaggatgggacaaactacatcccatgaaccaaatcagacctgccacctattattataaataaagttttattggaacacagcaatgctcgtttgtttatatattgtctttggctgctttagtgctaaagtggcagagctgagtagtttcaacagagatctcatgactcacaaagcctaacatatttgtcactgggtaccttgcaaatgtttgcagacctctgctttggaaagatccctatggtcacacagagggtggggaaggaagacaatttagagtggtggtggtgatgggggtctgagtcagggcaagagaaaagaacaatgtgcgagacacaacacaggcagaagcacagaagttgtgactgactgaatggataaaagtatgagaaacagaagttaccagtttcatatttccaacttggaggcttgggtgattgtcattaaccaagatgagtgtcatgaaaggaaagaagatgtttatgggaaggtgagtaagattcgaattagggactttctgaattcaaagtgcagataaaggtgtccaggaagcagttggaaatatgagtctaatattcaggagagaggtggggctggaggtcaagcttgagcgccaccatcttggagatgagagcaggtttcaggtgagcagaccagaccaaagagggaaaaacatagaggcaagatatttgaggaagaaattctgagaaaccccaacagttaaaggactggcaaaggaataaacctgagaaggagcaatcagaagagtagaagaaaacaaacatgataatatttgtgaaagcagaagcaactgatgttggcttttataagaggtctttgttgggctcatgtcggggtaaagagtgctctgaggatttggtgcctcttgtcagtgtcctgtggtggcttccatagaaaacactccacacccattatctgcaaggagacagctgcagttttgcctcttcatgtggtttcctcaaacccaccccctgggaaatgcaatatgattctctcacagagcagatgggatgctaactggaatcacctctgccttgcagagttctccctcagttgctccaacagtgcctggtagtgtaaacaagactggcttaccagtgcagcattcaataccagtgcttacccagcagccattcaaccagtcctgctgatgccccaccatgtgccagccaccaaagcatctagtgccaagattacaactgtttccttctgctcctggttcttagagtttttttttaaaaaaaatatataaatgatctgcatttagtgatatatttatttttaatttttttatttccataggtttttgggggaacaagtggtattcggttacatgagcaagttcttcagtggtgatttgtgagattttggtgcacccaacacctgaacagtatacactgaacccaatttgagtcttttatccctcacccccaccaatgctttcccccgagtctccaaagtccattgtattattcttatgcctttgcatcctcatagcttagctcccacatatgactgagaacatacaatgtttggttttctattcctgagttacttcacttagaataatagtccccagttccatccaggttgctgtgaatgccattaatttgttcctttttatagccaagcagtattccattgtatacatataccacaatttctttatccacttgttgactgatgggcatttgggctgtccatatttttgcaattgtgaattgtgctgctatgaacatgtgtgtgcaagtaccttttttgtataatgacttcttttcctctgggtagatacccagcagtgggactgctggatcaaatggtagttccatttttagttctttaaggaatttccacactgttttccatagtggttatactagtttccattcccatcagcagtgtagaggtgttcccttttcacagcatccacgccaacatctattactttctgatttttttttatcatggccattcttgcaggagtaaggtagtatcatattgtggttttgatttgcatttccctgatcattagtgatatcgagcattttttcatatattttttgaccatttgtacattgtctgttgagaattgtctatttacatccttagcccactttttgatgggattgtttgtttttttcttgctaatttatttgagttccttatagattctggatgttcgtcttttgtcagatatatagattgtcaagattttctcacactctgtgggttgtctatttagtctgctgactgttccttttgctgtgtagaagctctttagtttaattaagtcccacctatttatctttgtttttgttgcatttgcttttgggttcttggtcataaagtctgcctaagccaatgtctagaagggttttttctgatattatcttccagaacttttattctttcaggtcgtagatttaagtccttgattcatgttctgttgatttttgtataaggtgagagatgaggatccagttttattctcctacgtgtgacttgccaattatcccagcaccatttgttgaataggatgtcttttccccatttctgtttttgtttgctttgttgaagatcaattgactgtaagtatttgggtttatttcttggttcactattctgttccattggtctatgtgcctatttttaaccatgctgttttggtgactatggccttatagtatagttcaaagtcaagtaatgtgatgcctccagatttgttctttttgcttagtcttgctttggctatgtgggctctttttggttccatatgaattttagaattgttttctctaattctgtgaagaatgatggtggtatttttatgggaattgcattgaatttgtagactgctttaggcagtatggtcattttcacaatattgattctactcaatatccctgaagaacacagatgcaaaatccttaagaaaatacttgctaactgaatccaacagcacatcaaaaagataatccaccatgatcaagtgggtttcataccagggatacagggatggtttcacatacacaagtcaataaatgtgatacaccacaaaaacagaattaaaaaaaaaatcacatgatcatctcaaaagatgcagacaaagcatttgacaaaatccagcattgctttatgattaaaaccctcagcaaaatcggcatataaggggcatacctcaatgtcataacagccatctatgacaaacccacagccaacataatactgcacagggaaaagttgaaagcattccctctgagaaacggaacaagacaaggatgccctctgtcaccacttctattcaacacagtactggaagtcctagccagagtaatcagacaagagagagaaataaagggcatccaaatcggtaaagaggaagtcaaactgtcgctgtttgctgatgatatgatcatatacctaggaaaccctaaagactcatccaaaaagcttcagaactgataagtgaattcaacaaagtttcaagatagaaattaacgtacacaaatcagtagctctgctatacactgacagcaacctagttgagaatcaaatcaagagctcaaccccttttacaattcctgcaaaaaataaaatacttcagaatatacctaaccaagaggtgaaagagtgtacaaggaaaactacaaaacactgctgaaagaactcttagactttctctatccctatatttggaaagaaggttggaggaggggtacagaaggacggagggaggtagagagagtgttaaagaagaaggaaaggggtaaaaaagaatgggaatagaggcatggactagaaactaattagatggtgaggcagagaccttgcattgcgtatcttacatgcactggcttggcagccttgagaactgatgtgtatattgaaagcaacagcacatgctaggtgtccagcataatacctgacatatattaagaactcaatacatgtctgttataataatatttttgagtatccagaggaactaggccagcctttgaattgataggccctttggtaattttcatacagccatgtagcaaaacttatattaaataaattgggggaatttcatattatactacattccttttgcattctcactggcaggagtatttagcctggatgaaacttgatacttcaaaaagaatcacttgctaaagggagaagtgagccccaccttctgttaggaagatgtggtgagtacatcaatattacaaagattcagtgtgttaaatcaatatgttcaaagtagtttaaatgtccaatactggtttccaacttctaacttttctctatcctctctctcggcctcttttcaaccattccttccttaatccttccacccatccctctcctaacccccaccattgtagactaatttcttttggttatctttctaagcctttgcacacttttccctattgacgagctttgctgttaggattctccagctacttctgcaaagaggttttcaaaggacttttgaaaatgcagcactgtgtatgttttggtaaaataaagcaaacattttgtgtggttgggtttgttgtttgaagtgttgcagtctccctctggggcctcctactgtcttctgactagcacctcaacagcatcccttcctgctgatttgcagagggtttgattctttttcaatagtgcataatgctgctgtcttattgcctgtttgctttagttcatatttcttctccagatggattttctatgaagatcatccctatttgtttgatctttaatttcagaccttgtcattttcttttcgagtatgcttttttatggatgtttcttttggcagaaccacttcctatgagcctcagtgtgtgttaatggcactttcatttattatcatagacaatttcaatttctagagggatagttgagttctgttgtggttcaaaggagaaataaatcctcttgcaactttggctattttatttcacttcacttttggcctcagaggacgagagagaagctgagaacattagccacatctgtccatgaagatttctccaatatcaatttgctcccacacctgatgtactgaatactcagaaaaatgctcaggctataaaaccatgtctaaggcacagacagtttaagatcaggctttgaatgaaggcctcagtttatcttacacattactgaagcccattctatagaagactaatagtttccacaggtgtcttgggtggagaagggaaaaaagtcaatggactgagatactattggtctcaggaatcatttgcccaatctaccctaggccaagctttgaaggacaggccatctgaattcactgagtgactgaatcccagcacaggaaatgttgatattcttattgattctttaatggccattttatatccaaccatccagccatccatctatgcatttatccatcatttatagtaatgtccctaaggctgctttcttgctaaaaataaggaatattgacagctgaaactcactttattattctgccacagttttaagcatccctgcaaacacgacttctttaacgatctccagtttaattccacagtatggttccctatctgcattattctctcctactctgatcatcttatttatttatttagacccagggtctcactctgacacccaggccggagtgcagtggtgcagtcttggctcactgcagccttggcctctggggctcaggtgattctcccacctcagcctcctgagtagctgggactacagttgcgcaccaccacgcccagctaatttttttgtagagatggggtttcaccatgttggatcaccctactttaaaattgtaatatagttcccttttccagcaacttccatttggtttaacctgttctttattttttctttgcacttttcacctcctagcctaatatatattgtacttatttactatgtttacagtttgtttattggctgcttcaagaacataagctcctctcaccatctactcactgtattctaagtgtgaggcatatggtgggtatttggtaagtatgtgtaaggcttcttggggaaatgacccttcagtgcctttattcaatactcaagagtgtttctcagcccctaacctggcattgtaggagacacaatgtgcgcgagtgcgcgcgagtctcatacacgggagtctcagcgtgtgtctcatacatgctgctggatgtgtggcatgcctggcccctgcccaccaattgccagtagtgaccttatcatcaatgtaacaattaaaaacaccccaggacatttccaaattcctcatatggctccagtaaggctttgcttgataattactgcaagtcttagaataaaaccatttttttacactgtgtttccacttggcaaataattagtccaccttatggcatcctaagggcactctcagagataatacactttcttttttatatgcctccctcaacagatttcaaaatcctctcacacaattaaagacagtgatatttaatggtaaaactcagctgtcaatgatgccttctatgtcagtcattaacaagccagtaaaccaatatttactaagagcttttgagcctgacttcatgccatgcagtgtccattttatagcacaaatggtaccccacccactaaggctgtgcctgtgttacctgcggtcagcatctcatctaatccttcctcacattttagcaaaaaccaggccctgcagtcaaagaacaagtttgactgatttcttttcactggactggtcagttattcaaccatgatggacaaactgctgagttaaattggaataacacaggccaagagaatcacatttaaagtcagagatggcaaaaataacagacatttctatgacagaacatcaacaaataattactgattgtctactggatacaaagtactgtggtatagggcaccagaaggtgtggttaacatgacatcaattgtcattctgctgggtgacaatgaaatatgtataggaatgtatactaatattcagataaatgcagatactgcgagcagctatgctaagtgctttacaggcacatatcacttaatcattaacatgaataccataggtatccctattttatagaagaggaagctgaagcacagggcagtaaagggacaaggtcactcagtcgggaattagtggggcaacagtttaaattcaggtttctctcatgccaaagggtcttaaccactgtgtgataaatcaaatagttttcagttgtctgaaattttcagttttcatttactttggttgtgtaggcacaaacacaagaagatctacagataatgtatattttttaacttcctttaaattaatgcatgttggattgctctctaccatttgccccatctaagtctttgtagttggaatccatcgttctctgcaaatttgacatttgatcataaattgctcatctcgagatgaattacaacacctcacattaaagaggcacttagggagacatttctattccatttcaagagacttatataagaaccctttttgatctttcctaaaattaaaatgaaaagccacattttggcaacattatggaataatacaaatgttcaattctgtggaaaaaggtagagacatgactgatcatttgatatttaaggcaaagaaatagtggttttatttgatttttcattttgaactctgtcagactgtgatccttttttctatcttcatagtttttaaaaaataatcatcagaaacaagaaacaaagagaaagcagtaaaacacattttctttgcctccaggattgaagacattttccccttggcatgtacctactaagtaggaaaacctagaatgaaagttactgtgttgcttcagtaacttctaagaaatcaatataattttggttttctgctataactctcaaagcatatttgatgtatctcttagtcattgacaactttctttatactctgaagcaaagttatcccagccaagtgtatgtggctgcggatgataaagtatggctatttgaagtttgcttcttcttaaagagaaatgcaaagttcccagaaagacgctagatacaacggttcacatacacttcacaaggcacttgcctaacttcttggaccaaattacattaaatctttgagccaagaaaattaactcaccactcattgaaaaacagtatttcagccatgtcatatctttggttaaggcagacttaacgggaaaatctctttccaatatgatatgtgattcctttacaagtacacagtttgttaagttttatacttttttaagaagtagaggttttttgtttttgtttttttaaccaatggtactctctctgtgtgtgtgtgtgtgtgtgtgtgtgtatcctaccaaattccttagttaataagcaagacaaatttattcacagaactcattttgtattatgtaaattttccaagaaaaaaaagaaaatcttaatttgtgtttcaaagcctctctagtttaagcacaatgactttgaagaaacaaccaaaaaaaagataaaatgtggatgcagaatgatgtttattttacatgtatatggtacacattgggtaccaaaagaaagtcatggttaattacaataatcactctagtttggccaaataacatggaactaacgacatgaatttcaactatggatagtaatattaagtgggttgaagtaatctctacacaattaattttttctagtgccttggcctctgaaaacttatctttggtctatatggatctatgtgcatctaattaaaggttcatatttgcaatgcagggttttagttaagggaggttaaacatgagatttccttagagcgcctcagtgttcatgggcctctatattctcatatctctgcaccagcagtaggaggatgtgagagcccagggagccctcgaacttcaaaattagatctgtgggagaaaacatgtaaatctcagccagaagaatctatgcctcctttttctcccatgctgccttactcatagcactgatagcatgcatgatctgttagccttcactatccttgcagaggaactggattcggtggtatggaaaagacatatactattccatgaatatccatgtgctctgctccatttcctgttcccttgcagataagtgagcatactctgaccagttctggccaagggactctgaatgaaaatgctaccttaaaggccaaagtatttaagagccagcacatgactctccagctctctcttattctgtctcagtgatacagaggctgcaggcccaggtgtcagaattatacaatacagaaaatagatctcttataagggagtttgtaagaaaattggccctagagagccaccagtcccttaaaagagtttatatgacagcctgggcaacatagggagaccccatatctacaaaaataaaaaaaaaattagctcgtgcctatagtcccagttacttgggaggctgaggttggagggtggcttgagctcaggaggttgaggctgtagtgagccatgatcacaccactgcactccagcctgggtgacagagaccctgtctcaaaaacaaagcaaaacaaaacaacccccccctcaaaagtttacattagtggcaaataaactttgttatgctgggaagatattaccaagaatagcttagtttactgtgacaatttaaatcaactgctaagataaccaaagtaatcagaagctataacaggacataaatgctgagtacaaatatttatttttgtacctcctctattggagaaaatctagaaaataaattcaatatatattccaaaggaaaaaggaggaaagtctaggaagtttttcatttgggataaaagccaggaataaatatatgactttcattggaacattttcaggcactcagagattcagagatatccttaatgctaagtagatgtataattagctccctgtttagggactccaaaatgtgccatgtcaaaactgtctcctgaaaatgttgctttgcgattccaaaagcaatcagaggttgttgaaaaatctttgggattttgcagtgtgcagttttccccaacaggcctaacattaatcattataggaaaaacattcaaactcccccattctttcatagtctagtctaaacattcaatgcaatatcataattctgcagacataaattccctcattatctgtgggccaggtcaaccacagcacagccagccacctagcagacccatgagcagggccttttgcaaaggtgtagcactggccctcaaaaagacttacagttaagcactccaggaggctgcaattgtgcacagcagccaacctgtctaattgggtcattttttcactgggtgatttatatagaatgtggactcaaggctgactgctcttcgaacagtatgactgcttttgtctgactgtaccaatgaagcaggatggggttgctggtatttaagaccaggcattctggtcccaaagaaacattgctttgggctgtagttctgtgttattgcaagaagcatagtatccgatgttaccagtgtgggctcagttacttcatctgtaaaatgggaggctataaccccacctacctcttagggttctcgtgaagatgtgcttgagaagagctgaaacagtgtgcctgacacagagaaagcattcaatgaatgtgaaccatttatgctatacagcattattactgatatgaagtattagtgatacattattgatataattatcatcaacattatctgtgatgctggtgatatgatgatgatgatgatgatgatgacagtaataatcattttctgagtgcttgccatgtgcttgccagtctactaagtgcctaatgtggattacttagtgaatcctcagggcaactattgagactattatctccttttgatgaatgaagacactgagtcttagaaaggttaagaagcttgatcaaagaagtaataaagctgaaatagaagccaagcagtttgacttccgagcctgtgcccttagttactaccctctaccccagcattgacacaaacacaaccacagcttttattagttgtccttataatgacttagcctcatgcgataagactgtctgtcccagatagagccacaagttacttaacatatctcagtgtcagcagccacaacctgctaggtaactacaactccaaagtgccctgcctcctgaatgagatggaaaatcagtggaatagggaatgggggttctgcttggaaataacctgtaaccagaccagttaaggtggaaaggggtggctgtgaaaaatgaaaacaataaaacaaaacaaaatgccaaaaagcagggtgatatagagagggtttaaagggtattgctcccctttcactcctagcctgggattcaatttgtggccaaaagctgatggtaagtgtgtgtgtattgcagccatagtcagcagagcaaatggggactctcaactactggtcctacttcccctaaggagctgggtagttaacatgttatccctgcacctgagtaaattaacccattactccttacccagtgatccacttgcccccccatgatgtgcactgtagggagttcatgctgtttagctcagaaattctaagttcacatggagtccagttttcctggattgtaccttaagtggttgattgttggagccacttcatatctatatttaagttagactattgagtactgtccctcagtttcaggagccatgggagcaaatcgaggggcaaaagttacttctggatcttcccaatcatttctcaaccattgagtcacagcctgtgacaccagacgtctttaacttaactccaacctcattgtgctaggttctgttttctcctcaattatttttttttcttgctctaagaaaaggataatacacccctaccttatctgtaacatccagccacattgtctggcttggttatgtgactttctttgcccaaaggactataagcagataagaaatatccatgtctacatagaatctttaaatgaggttgcaaggcttaactttctgcatttttgtcctctgcattgtgaatagcatggccccgatgagggcttctctgcttcagcctaggtcttggaataagagatgcacagaatagagccaagaagaagtgctgccaaccacagactcataaatgagaaataaatatttgtttatttgggggttgtttgttactgcagccgaggctaatacacaaatttttcaataagaactcagcctcagcttacatcatgtgcgcaagtgaatctggggatgctaggggctatcttccctatcattgagtgaaagactatttatgtattaagccaacaggcaaggacagaatcaagaaatgttgtaaaagtaagagctccgagtcctttgagcccctgaatccagctgtgcctgaagacttaatgctacatgttatgattatgtgagccaagacatttcttttactttagctagtttggattaggtttctaatctggtttaaatgaatactgacttatatcaggtctcctcactcttttgcaatgatatctgagcacaagcatatatgacatattaagtaatagtaatcacatgggggtaagttacactggggtataaatcattgtaattgaataagcctgtcatgggttgaactgggttccttctccacccccagcttcaaatggatatgttgaagtcctaatcactactacctcaatatgtgacattatttggaaatggcattgaggatgcaattagttcagatgaggccatactgaaatagggtgggctcctaaacttatataattgatgtgcttataagaagacagccacatgaagtttgagatacacataatgtcttgtgaccatgaagacagagattggagtgatgcagctacaagccaaggaacatcaaagatcgctggcaaactaccagaagctataaaccaaaggcaaggaaggattcctctacaggctacagagagagcatgaccctaccaacaccacaacttcagacttctagtctccagaactatgaaacaataaatttctaattttttaagacacctagtttgtaatattttgttatggtggccctaggaaactaatacaaagcccatcaggtgaatttttaccaacagatcccatggaaaacttctgatggaaatcactattatactcatgaaggtcattgacagggtttggctctgtgtccccacccaatctcatctcgaattgtaatctccacatgttgagggagagacctggtgggaggtgattggatcagggggacagtttcctccatgctgttcttgtgatagtgagttctcaagagatctgatggcttaagtgtatggcacttcccactttgtgctctctctcctgccaccttgtgaagaaggtgcctgcatctcctttgccttccaccatgactataagtttcctgaggcctccccagccatgaggaatggtgagtccactaaacctctttacttataaactattccagtctcacataattctttatagcagtgtgaaaatgaactaatacagctatattgccatatctatgtccacacaatatccagagacacagaaaggaaaaaggaggcagcacaatgcaatggtcatgcacattggctgaaagatcaggaagacctgaattcaagtcctagtttgttcatttactttaggtgatttctgactccagtgttctcctgtacatcacagaaaaatccattgtttcattcatgatgttttatgagagttaaacgaggtagtggatgggaggtgctttacactgtgcctggcagagtatatttgttaaacaatagatagatagattagctaaatagacagacagacagataggtaacttagacatatagatagatgatagagagagagagacagagagacagacagacactttgggcgactatcaaaatattataaactggttggcttataaaaaacaaacatttacttctcacacttctggaggctagaaatccaagatcagagtgctagtatggtcagttcctggtgagaaccctcttccaggttgtagattgtcaactttttactgtatcctcacgtggtggaaaaagaggaagttagctctctgacatcttcttataagggcactaatcccattcctgaggggccctatcctcatggcttaatcacttatcaaaggtcccaccttcaaacaccatcacaatggagattatatttcaacatatgaattttgaaggacacaaacattcagtctataacagatagacagatatacacacataaaaatatatcaatgcataagtctatagatatgaaggtctgtatctttcctgcctatataaaatttaatcaaatcattagcagttaaatagtgaattttcaacacattcccaaatagttttaacttacttaatatgttgtgttggtggtaattttcttgttgttgttttttaaactgaacttgattgacctgattttatgtagatatgcaaagataccacttactcatgcagaccttgttgtgtaaataacccaatcttctgtctttgcaaagacaatctttccctaagagttataatctcctctcaacacatcgattatatggatcaaaggccctctgacttatatcagcctgggccaaaatagtcattaccaaagattttccactttccctctttaatagactaagctttagaatttgggtaatggtttggatgtcaaacaaaacctgagaacttgtttaggttcagaagaaagtgagagtgataatattcctttcttcatcaatggagctttctaccctttcccgcctattatgtctaatgttattgtgcaccaaaaatgaagctctcctaatcttcatttaccttcataataaagagagtctttgtgcgaaccatttctactatactgcaaagacacaaagaagaaggcctttatgctgaagctacaatttgttgacatttttatggatatgaacctgaattgtcatgagtgagcttgttctaggagtagatgtgtccgagttttcacacatgaaagactgggtcctgacctaccaagaggcagtaaatggaatactctgaggattaaagacattactctcaatatgtcttccccataagcctaagattccaatttagtgctacgagaatcacccctctgtattacaatatgcattgagaagactctctttgaggtgtgttagaaagaaataccaacacacttgaagaccactagctcattaagttgattagttccttgccagcctataatgaaattctaagatctggagggaattgaatactggatgattaagttttggccaagcggtacattactaaagaaatagggaggagaaaagggggagccctagtcgcttaagagtaaatcaaggggacacaaataatctaggaggggatggttcccaaatggccccaggaagtcctgttgggatgggcacccagatttttaaccattttccctcactccccatagtaccttaaatcaagaatatccatgaatgttactaaatgcagcatgcccaagatggagtcctccccatgagtttacaaagaagactcaagtcaagaagacttgatggactaggaggtactacttaaatgggaaggaaaaagtttcttgctagatgctgcaggagactagaagatgagtagatattctgtgatcctctcaaaatttcacaggttgagctcctttgcacgattccatactgttaggctgggcattcttatcctttgtgactgctgcacaaggaagaaaatgagccacactatcccttcaaacgctgagagctggtttgacacatttgtgctggtttggataactaagtaggagacccaggacataagtggcagctggctggcaaggatgtcagatgcagaagtacccagaaaacctactcagggtgttttcttcctttcctggtcccctcctgttacaggaaggctgacctctgcacatgccatatgagcttggccctgcggtttgccttctgccaaagaagtccctgatataaaatggaacttcagaaccttgcctttttaggagtgtcattagaaatcaaatcagtatgggctgaacaggctcaaggactgctgctttagtgtggcagctgaagtccaaatttttgagagtaattgggcccaggctgttaacaggtgcagccacttcctactagggagaaagaatgcctgccatgtgtgttacacatggcctcagaaggaagccacctgtcaagagaaatgcagacactgggctggaggggcccgaacagtgatgcaagtctgagtgatgactaaatgaggcccctgcaaaggcagaatggcccaggattgtaattaagacactttcttaccttcgcatggtaagatttgacttgttatagtgctatttctagtcctaaactcactatacgtctatgctatcatttctaaattatattccattcaacactagtatttggagaaacacagttaattttctgtgagaaaaaaaagagttcagttttttggatttgcttaggagacacttctttgtacaggctccatctggcaattctcagaacacattattctattatctaaaaatggctgagtagtcctggagtatagaagcctgattaattttaagtcacctttccctgaaccaatacagtcatcccttggtatctatgggaaattggttccaggacctccctcagatgccaaaatgcacggatgttcaggtcgctgatataaaatgtcatagtatttgcatataacctatgcacatcttcacatatcgttcaaatcatttctagattatgtataatacctaatacaatataaatgctacgtaaatagttatactttattgtttagggaataatgacaaggaaagaaaagcctgcacttgttcagtacaaacacaattccccccaccccccaaatatttccaatcctccattgattgaacccatggatatggagggccaactgtaaacattttcattagatcttttataaaaatgtcccatggaatcctatttgagaaattcaggattacacaagtaaacaaaagttgagagaactggttttctctatcaaattgggcaaaggtcttctctgcccttgtcattatgtggatacgtttttctatgaggagcactatagcacagtggtgaagggaatgggtttggacttggactgcttgggttggaatactgcctccagcatccattacctataggactctgggcaagttacaaaacctctctgcactgttttctgcaatgtaaaatggtggtggtgtgggggggtggtgtgggaataatagtaatatctgccccagaaggttgtggacagatgaagtcagacagcctttgtaaagagcctagaacagtgcctagtaccctgtaagcctggggcaaatgttagctgcagtcattgccaccatcaccatcatcttgccatcatctcccatcctctctctcagaatcagattccagaagtcattttgtctccattttcctcactgctctccacagtcattcactctcgctgtcccactcctgcttttgaaaagcctccacccctctagccttcataactagcacaggccttcctcgctccaggctgaaatattacagctttcccctagctaggttccctgaccccagtcccactctctacccaaacaacctgccctcaatgcccagacaaacctgcctgaaaccctgctgtgttcttggccccattctgctacaatgtttctgccttcattgtctagatggcagagttcaaggttaccttgggttgcaaccctctcacaaactaattcaaacctgttttccaaaccacatttattccctcacccccagctactgttcctgctgttcttcccacttggaatgtcgttcctagcctctgcatagactcaaattccaagtagattccagaacccatctcagcttgtgtcttcttcccaaggccttcctgatccctccatctcttactctggcatgggacactagcatctgctctactgtggagtggcaggtttagagggcttaggtttagagacctgggctcatatgccagctccaaaatgagcaagcggtgagagttttgatccagttgtgtaacccctctgtgtctcaggttccttatctgagactggagattgataatgctctctctccaaagggatagcatgaaactcaagcaaaagtacttgtacacattcagatttttttccagtcttcctgtgtgttttttgaggagccctagatttggcaaaggtgcctttgaaggcggaagtaggaaactgaagcgggctaggttgtcagacctccagcccctgcctctacacttcaaccagagctgcgctaccttgatcaattatatttatatatttgggatctgggtgacctttacttaggaaaaaaaagagatctattccacaaaagaaagaataagaaaaccatctcatctcccagctgggcgcggtagctcatgtccccaatcccagcattttgggaggccgaggcaggtggatcacttgaggtcaggaatttgagaccagcctggccaacatggtgaaaccccatctctactaaaaatgcaaaaaaatagcagggcgtggtggtacatgcctgtaatcccacctactcaggaggctgagacaggaaaatcgcttgaacccgggatgcagaggttgcagtgagctgagatcatgccattgcactccaacatgggcaacagagcgagacttcattttcaaaaaaaaaaaaacaaaaagaaaagaaaaaagaaaaccacctcttatcattagtaccatacaggctttccataattatttcactatttcacaacagtacagctggtctccccagatacattgtaacctccttgggagaaaggactgagtcatctttaagtatgtattttccctagttaaatatgttgtacccggtaagtacttaaatacttgttgatgaagcagctctgccttactgcccaccggttcctccagagatcacacttttataaggttaagcccatcaagaagttccttttccacttccctgagcaggcagccatggcttctttatctcctttcactctcttctgggaagatctacttcaatcccagtgccattatctctctctaccaaacactgctcagagaatagcctctgagacctgtttccttaccaggattcagaggatcacagatactagagatgaaggagaaaaaaaataaatctatcagggcatcatgtcctctccttgtgcaaaacggttaagtcctgaacattttctaaatatttgtcaggcctggtattaaaggcttgaagtgacaaggtccctcaagggagaagttggcattaaacctcactcttaaagatgacttcttttactgacttttcagtttcatgtttcaccactgaatctcacttctcacttttagttaaatcccttctaagtagccaggctacagtgagtgggggctacagaaaagccacaggaggagtcagaagagggtagagctgtcactctgtgggctatgtttccctctgactacaggtaatcaaaaaggatgggcaaggtgaaatcttgacatctcacttgaacagaagtactcccccattcttgcagattccccatcattcccattcagagagccaaaatgcaactgtgtaattataagataatgtcttatttttgtggccccactgaggttaccaactcagacacctataggggccctttgataaggatggcaaacccacttccttcagcatattgccagctcacaggaaggtgcatcatgtcaccagattatccccctttaaaaaaaaaaaaaaaagaaagaaaccatctatcaaaatttcaatgaggaatctcttcatttttgaatgttggcaatgaattcaaattatctttaacccattgtaaaggcacagctgacaccagtcccttctgtaggagatttcttctccttctgaaatccatcgccaattcataagcaagcacgcaggaatggacaatgctgtatgtttattacatttataattttgtgtgtagaagccttgcctcaatcctcaaaatgcagacacctatgctgcagtcttttgcgtggttacatcactcaacgtccccagtacatatgttcagaaaaatggtcaggtcctcagggaatagttaaaactgtgcaggactagactacttaggtttatatccctgcctcagtgcttgacagctctgggaccttgggcacctcagttttctcatctatataatggtgatgataataacagccctgggctcatagggttgttgtgaggtttaaatgacatagcagggtgtacatcatttagcaaatacactaggagcttaataaatgtcatttggaagctgcttcacatttccacattctattaaaacacccaggaaccaatggtgccctcacttcatctctagattttgctaaagagttggtttaattttcgccatgtcttcgggtttcatttttacctctgaaggtcaagttggcttgctacattcttggcagagtccatagcccctttgatggtagaaaatgatataaatgaaaaggtcagatgatcttgcctgggttacctgtcattctggaagatcacagctgtatgctaaactagatctaggtatgtgtgtggggtggggctgaagtctacacccatattgtggtaggcacagatatgtaccacccaggttgcccttcaaggagggacttggcctcccaactgtaaggtggatagtgattagcaagcactgttcagccattagctacttgagaatgggcctcagctccagtgagctgcttccctaaagaccatacatttcttgggcagctttcatttcctacagagtgaggcaggtgtgacaagatgctgctgtttccattcatcacggaacaatccagataggcaataatgaacccagggctccccactggcttgggtgaagctttggagggcctacctcaaagtccagcttctaccttgcccactcctgtttctgccccttcctttcacaggtgttgatgcctaataaacatcttgtactccagagtccatctcagcactgcagcccaagaacccaacccatgacacacgggtgtactgatgcacacacacactcctgaaacccagacaatcctttaaaactatctttttaataaacagaaaccagccaagtttgattataaagaaaaccaatcgtgcattgagacctatgggattagcagggtcaggggtatctatagagttgggaaggattaccactgatattttcttccaatttcttttattgtggtagaatacacataatctaaaatttactatcttggctatttttaggtgtacagtccagtgacaataagtacatttacattgtgggctacaattgccaccaaccatgtgcagaactctttttcgtcttgtaaaactgaaattctatacccattaaataacaactccccattctccctccccccagcttctggcaactaccattctactttctgtccatgagggttgacaaatctagataactcatgtaagtggaatcatacagtatttgtcttttagtgactggcttattgcacttagcacaatgtcctccagattcatccatatcatagcacttatcaggatttcccctttttcaaggttgaataatattttattgcatgtatataacacatttgatttattcaatcatgtttcaatggatactgagttgcttctacttcttggctattatgaataatggtgctatgaatgtgggtgaacatgggcgtacaaacatctgttccagttcctgctttcaattatttcaggtgtatgcccagaagtgggattgctggatcatatggtaatcctgtttttaattttgtgagaaactgccacactgttttccacagcagctgtaccattttacactcccaccaacagtgcacatgagttccaatttctccatatctttgccaacacttcactcttttttgatagcagccaacttaatgggtatgcagtgatatctcattgtaatttcatttgcatttctctagtgattagtgatgctgagcatcttttcaactgtttattggacacttgtacatcttctctggagaagtgtctattctagtcctttgcgcatttttgaatcagtgatttttgttgttgttgctgagttttaggaattatctatatattatgaatattaatctattatcagatatatgatttgcaaatattttttctcactctgtgggttgcctttttactatactgatggtgtcttttgatgtacaaaaatgtttttcatttaagtccaattcatctatttttccttttgatgcccgtgtctctggtgtcatatccgataaataattgccaaataaaatatcatgaggcttttgctctaaattttattctaagagttttatagttttagttcttaaagttaggtcggagactcattttaaatttttatatggtgtaaggtaaggaatgtacctaacattaattgtattcttttgcacttggatacagagttttcctagcggcatttattggaaagactgtcttttcctccatttaatcatcttggcactcttgtcaaaaatcatttgaccacatatgtgaaggtttacttttggactcctctatcctctattctattccattgatgtataaatctatctttatgccaataccacattgctttgactcctacagtttacagtaagttttgtaatcataaagtatgagtcctccaggtttgttcttttccaggatttctttggccatctagggtcctttcaattacatatgaatttcaggatggctttttgtatgtcagcaaaaaaagcatcgttggaattgtcacagggattgtgttaagtctatagatcgctttgtatagtattgaaaacaatattaaatcttctaatccataaacataagatgtgttttcattgattgataccttctttcagaaatgttttacagttttcactgtacaagtttttcacttctttggttaagctaattcctaagtattttattctttttaattctcaattttcttttcagattgttgttagtggataaaaatgcaatgtatttttgtttgttgactttgtgtcttattgctttgttgaattcatttattactccttacagatttttttttttggtggaatctttagggttttctacatgtaagttcatatcatctgtaatacagtttgtatgttgtccccttcaaatctgatgttgaaatgcaatccccaatgttggagatgagtcctagtgggaggtgactgggtcatggaagcagaactctaatggcttggtgctgtcctcatgataatgagtgtgttctcatgagatctgtttgtttaaaagtgtgtggaacctcccacaccctccttctcttttgcttccgctctggccatgtgacatgcctgctcatgcttcactgtctgccatgagtaaaagctctctgacacctccccagaagccaaacagatattggcaccatgcttgtgtgactttcagaactgtgaaccaattaaacctcatttctttataaattactctgtctcaggtattcttttatagcaatggaagaatagcctaatacaatctgcaaacagatataatttaatttcttcattttcaatttggatgcctttatttttctggttgaatttttctggctaggactttaagtactatgttgaatacaagtggtgaaaatgggcatactttccttgttcttgatcatagaggcaaatctttcagtctttcgtcactgaacatgatgttcaatgtgggttttttatatgtggctcttatcatgttggggtagtttcttacttttcctagtttgttgagtgtgtgtgtctgtgtgtgtctgtgtgtgtgtgtttaaaccacaaagggcttgaaatgtggcagatgctctttctgcatcaactgagatgataatgtgtttcttcctcttcttgctctgctgtgatgtattgtattggttgatttttgtgtatagaaccatccatacactccaagaataaatctcgcttggtcatgatgtataattcttttaatataccggtgagtttggtttgctagtatttcgttgaagatttttgtagcaatgtttataagggatattggtctgtagtttttttgcaatgtctttgtatcaaggtaatgctggcttcatagaatgaggaagtgttcccttttatttaatttttttgaaaagtttgaaaaagatcggtttagttgtttaaatttttggtactattcaccagcaaagtcataaggtctggggcttccctttgctaggagattactgatcactgatttaatctccttactagttttaggtctattcagtgttcatgacttagtctcataggttttgtgtttctaggaatttgtccatttcacctgaactatccaatgtgctggcatgcaattgtttatattacttgcttataatccattttatttctgtagacttgatagcaatgtcctcactttcatttctgattttattaattttagacttctggttttttttcttagtctagctaaaattttgtcaattttgttgataatttcaaaaatcactttttcccctgattttctagtttttccttgatttctattatttttctgttctccatctcatttatctttgctctaatctttattctttccttctgttagctttggggttagtgcgttatttttctagtttctaagttgtaagcttagacatttgtcttatttttaaatataagtatttgtagctataaaatttccccttagtactgttttcattacttccatatgtttggatatgttgtgtttttgttttcatttgtcttttaagtattatctaattccccttgtgttttcttatttaatccagttgttgcttaagattgtgttattcaattttcacaaatttttgaatttttcagttttccttctgttactgatttctaatgccatcctattgtgatcagagaagacactctgtacaatgtctgtcttttaaaatttactgagacttcatttgtggccttgcatatggtctatcctggaaaatgtctcacgtgtacttgagaagaatgtgtatgctgttgttaggtagagtgtttggcatgtatctgttagatccagctggtttactgttttgttcaagtcctctgttttcttacttaacttctgtcttttgtctctttgctagcattttttatttaaagtctattttttctgatattagtatagccaactctgctctgttttggtttactatttacatggaatatccttttctgtccttttacttttaacctatttgcatcactggttctaaagtaagtctgtgaagacagtatatagttggattatgattttttaaaaccattttgtcaacctctgtctattgactaggctgtttaatccatttacatttaaagtaattactgttaaggagaggtttgattctgtcattttgtgacttgttttctatatgccttataggtttattttgtccctcatttcctgtattcctgtcttcttttgtgtttggttgatttcttgttttgataatgaaatgattaaattccttttcgattttttctgtatattctttagctgttgtctttgtggttaccatggaaattatatttaacatcctgaagttattacactgtaatttgaatttatgccagcttaacttctataacatataaaaactgtgctactttaacaacattataccctcccctttctgttgttgatgtcataaaattacatctatatatcttgacttcctcaaaacatcaactaataatttttatccattagtctcttaaattatatagaaaacaaaacatggagttataaaccaaagttataataatattgatttttagaccaatatattttaaaaatccgttattctcttaattcatatagaaacaaaaagtggaattacataccatgttaaaataacactagcttttctacttacaaatatatttaccaatacaaagacctttatttctttatatagcttcaagttactgtctagcatcacctcattttaaccttctggactccctttagcatttcttgaagggcagatctagttctaataaattttctcaggttttatctgggaatgccttaatttcttcttcactcctttacttcttttgcagtacagttttgttggatacgtgattattggctgacagttttttttcttttaccactttgaatatctgagccttctggcctgtaaagcttctaatgaaaaaatctgctgataatcttagtgaggatccctagtgcatgacaaatctcttctcttctgctgctttcaaaattctctctttgtctctgactttcaatagtagtatttataatgtgttttggtgtgagtctttcaggctcaccctatttgtattttggtgagctttttgatgttcatattcatgtcattcaacaaatttgggaagtttttattcattatttcttcaaataatctctctgcccctttctgtctccctcttttccttctggggctctcacaatgcatacgttggttcacttgatggtgtaccacaggtcccttaggctctgttcatctttcttcaactttttttttctctctgttcctcagacttaattttcattgacctatctttaaattcattaattctttcttctgcctgtcaaaatctgcctttgagttctagtgaatttctcatgtcagtcattatatttttcagctttacaatttatttttggtttctttgcatcactctctctttattgatgttgcccttttgatcagacattattttcttgactttccccaattattcctttagtttttttgatcatctctatgataggtagtttaagtatctggctaatggatccatcattaggtcttttcagctcagtgtccattggtttatttatttattttccctttaatgcttaatacgttcctgttgctctatatgccttgtaattttatttttgttgaaaactggacatatgaatcgaataatatgataattcttgaaatcagattctccccctttgctagggttgctggtatttgttttcatgtttttgattgttgtaggccaactctatagcaaggatcactctgaggtataaacttaaagtcttttctgagccagtgccttgcctggaacatgcacagtagctatctaaagtctcccacatatgtagttgcttttgaatgtcctagttttcaatatctgggtcccaaaaagggaaagaagaaaaattaagggaagcgaaaaaaggcatcagccctttaaattccctaggagtcacttcagctagagaggaaggtacaacaataatggctaccacctcttttttgtacctctgtgattgaaaacggcaatcagtaatcagaatacagatcccaatatttgcaggatagagtcctttttgcccaccgtggctcccacaagccatgtgcaaaccaggagtacatgcacagctgcctgccatggggctgaaagatggggaatgggtagttattactgtgctaagaactgaaattgattgaaattaatcacaatttgtgcccctttccctggaatattcaggccttcagtggactccagagttccaaaatagctacaacagacagattctgccaatgcaattgttatctatgtggaaatacagatttctcaagcttcatactctataatcttcccatcaattatattttaatatacctatgtttatagggaaagaatgccaaaaagatttaaaaaaatcacagacctttaatagctctttggggatttttgagcaatttcagtaatcttctaaaataatatttagaatatcttctaaaataatagagatcttagaaattataaagacaaaaaagattatttgtgttgacattcaatactttttcttctgaaattcccaaagtacttacatttaggatatattagataaattaggtaacgcaatgggaaggtaagctattctaagttttccagccttgttattatccagtaataatgccattcaacttgctggcacttagattgtctgaggaacctttccaaatatggtgtcatataaatgccattgtaaagctctaccagaatagcattatcagattcttccttcaatgcccagtaacaataaaacacttggggaaaaagatctcatttcagagtccctgtctctcatccttcactcttgagtattcagctgcatctgtcattctttgtttttatatttctgtttattcaaatatcacatgatcctaaaacagaataaatcctgtcatcatgcaaattccatttaggacagtactctcatatatgaggtcaggttcatatccctttataggcaatcaagctaatgtatatagttgtttgttaagaaataagattctcggccaggctcagtggctcatgcctgtaatctcagcactttgggaggccaaggcaggcagatcacttgaggccaggagtttgagaccagcctggccaacatggtgaaagcccatggctccattaaaaatacaaaaattagacaggtgttgtggtgcacgtctgtaatcccagctactcaggaggctgaggcatgagaatcacttgagcctggcaggtggaggttgcagtgagctgagatcatgctactgcgctccagcctgggtgacagaatgagactctgtcacagaaaaaaaaaagatgagattctcccattattaaatgcatatgaaaaagatcaaataatgcatgcgatatgagttgtgtccaaaccacaatctcatggaggcaaaattatcaagacttcaatccgattggtggcttgcaaactaccctaggcctccaacccacaaatatatacagcctccaacccacaaatataaacagacacagatgaaatctggatgctaggaattcgtttcctaaactttccaacagcacgtacctgagggactgtatggaagagatgaaacaagagacatgtttaggaggaaggagctagttgtttaccaattaatgacgaactatctaaaacttctttgctctctaaaagtaagacttgtaatgttttcagaaataaatatgggttattcttaatcaggtatattataagagtagcttatagaaggagatatgcattgtttctgcagtgaaggaaaaagcataatttaatttttgacaaaatcagaaatattataaggtatatgttcagctgcagaagctataatacctttgactttagttctttaaaataaattatagatacacaactatatgcactaacagcctaaaagtaagtcatgctgggtttttttccatacaattttaattaggtatattttttccaatgtgttttgaaatgatctgctaggaccaaatgctaacatgaaattccctgcatgctggtagttaatttaataaaaattagaaaggtgaagccctgttccctagagggagaaggtcttaacacaaaacattcattatttccacataaattgcaaaaagtaaagatgctggatttaaaatctaagcaggaagaaactgtcaactttcattatcagtggacaaatgttttaatttgcaatattccctagcaactttttgaacagacaactttacctctttaccaacatctactttaattcctaatttgcagctgcataagtactatgttgggcccaaagctttgggtatatctcttagaggtaatggaatccttgttgttttctggcactgcctcattaaaatgaaactcagactcagggtaaccctgaaaaacctaagccctccaataaaaaatgtggtatatccctgcacttaaattacgcaggagaagtgaaggctggtacatcacacacagaagagaagctaaaggtcaagctattagagttaatgagccgatacaagctcaggctctctaaccagagaggttagggacagaatacatggccaccccaaggaactttatttaagatatcaattaaaaatgagtcacctctcttctcagctcctgcactcaacactgacactgggaacaatgactgaaggactcacacatgtctgagaaaaggcaccttgtgggtgtgacttgccacaaaagcaagagtctttctgcatttgtaaatgtgttggtaaggcaacaaaaagaatactactgtgcaaggggaggtagaggtggtgatcctggcaacctaaaagcctgattgtatgttctaatccattctgatgtcaccaaagctccccttcgagggaataacctggattatggccaatactttctacttctaatagtcttccagtttcattgttcacaaggggttggtaaacaaaaatcaatgaaaagagcagggtcttctctattttggatttggacactgatgatgaagctgtgatattctgatccaggactcaatggctcctcctggatcttctaacaaggtcaatctggctgagttccagacagtcagctgatggtctcatatgaggaatctaaagttgatgaagatggtggtagtagagtggtgtaatcctcatagctcaaaaacgatcagagctcattaattattaactaactagaacttttatggctcattagctactggttaaatgtcaggtaaaatgtaatatttaatagaaaatgttaagattagaaatatgcagagcatttcttatgtgccagacctatgctaagtatttcatatccattattgtacttgatccttacaactcccatgcaagggacctatgtttatctcaatttaacagagaagaaggcaaagtgtgaaaaactaagtaacttgtcttaagttaaacagctaatggagtggtagacttgagcttcaaacccaggtttagccaactccaagcccattcaattatcacttgatacacacccaacctatgtaatacttagctttgttcttagtcattgttgcaaagctcatttcacccctcagtcaggcttattacattcattcgtgttctcaagagacaagagggtcttgcccaaaactacagaatatcactatcacaagttgccattcccactagaatttaccttgatccccagtgatgctacatgcattattatgttagtttcttcttggaggtgttatttttaaactgcaagattaaagctcctacaagcttctgacaacatgaaaatcagacacgactttgcagtctttttaaaacaaactagtaagaaggtcccaattaagagaaaaagagtagtcacacatacctgtagaactgattgtaatttaccctttcatcttgctctaaaacacattccttgagtctcagtttagtagagataagattcacccagtcgggggatattagttcttcctggatattttaattaaactgttacattgagtagttctgaaaatcacatataatcattcaaggtatggtggagttctgttctccagcatatggctctccacccagccacattccatctccttaggtaaactagctggaggccttcagtgtaagctctttaatttttaaactcttgggtggtgctttgttcttcgggtagagagtagagcaagagaacgaattaccaaacagtaatattacccccatcgacaagcgggtggtgtttatatcacacatactatataccaagaaatgcgccacaccttttacatgaatactcattttaaaacagtaaagactttatatttagagaagttttaggtttacagcaaaactgatagtaaggtacggagatagcccacatatcccctgccccacatatgttgcctcccatattaacttccccccaccagactggtacatttgttacaatttgtgaacctacaaggacatatcacccaaagtccatagtttacaagaggattcagtcttggtgttgtacattctatgggtttgggtaaatgtataatggcatgtatccaccattacagtatcatatagagtagtttcattgtcctaaaagatcctctgtgatccgcctattcatccctccctccctcctaatccttggcaaccactgatctttttattatctccataattttgccttttccagaattccatatagtcagaatcatggagcatgcagcctctttaggtaggcttctttcacttagtaatatacatttaagtttccgccatgtctcttcatggattgatagctaatttgtttttggcactgaatcagaaacccttgttgggatgtaccacagtgtatttatccattcacccactgaagaatttcttggtggcttccatgttttggcaattaaggataagactgctatgaacattcatgtgtagatttttgtgtggctatgttttcaactcctttgagtaaatatcaaggaatacaactgctggatcatgttgtaagagcatgtagttttgtaagaaatcgccaaactgtattccaaagaggctgtaatatgttgcattcccaacagaaatgaatgagagttcctgttgcttcacatcctctctagcatttggcattgtcagtgttctgatttgggctcttctaataagtgtgtggtggtatctcactgtttgaacactcatttttgaaatatccacataggctattatgatcttcattttacagttcaagaagctgaaactcaaagaatgtagatatttcaaactggccattgtaagctagagccaagattcaaactcaagtttggtgaatttcatagcctatactttctatcattgaggtacatcttgttttctcagttgtattatgtgatttgcaagtcctatgaataatatatttaaattataccaacatgaaaactaagtgtaatcttcagtcaataaaatatccactaaatacttcaaaatatgaaactggaagcttatctaaatgaactaattctttaatatcaccatgaaaggatgatgttttaaattaagaagtgaagaatttatagtttccagattgagaataatttccacaaatttttattttcatcatattctattgtgggtgtgcatgtgtgtgtgtgacagacacatatgcagacacagagatatggggacacacacatagacactttccatctcatgccatgttggaacttcccagagacagttaaaattagctagctaatttccataaactatcaaaataaaattatacttattgagagtctagagttcctgtcatgaagacttagcagttaaaaagcatggaagtcatggaatctcagtgctccttcgttgcaatccacactcctgctacaattagaatcccaccaatagataaagtcatcaggagctaattagtccacgtgtaaaaaataaaaataagacaaagaacagacttctaaaaaaaacaaaaacaaacaaaaaacaacaacaaatcatttgaaccattgggtacttcgagtacatgaaaattgtgaagtaaattaattagctttgcattgattggtatcaaaagtcgttagccctgcactgcaaggaaatccccagaagcctaaggtgcatgaaagaaaaaggctgggaaggaaatcaatctctgctcttcaacgctgatgctttaaagggtccctgctgtataactcgcccggaagcattccagggggaagaacccacagatttatatctgccacacgtgtcactgaacacaaatacgtctgataaataattgaagctcggtattgtgcttacgtcgcatgtgcaaaaaaacagggacaggaaggcaaagaggtcaagtttcccatctgactttccaatgagcatcccaatcatcacttaggtcattattctacctcgtgaagtgtcagaactcattgtcttagggaatccaggtgctggcatcacatatttagcaaatctcatttccctctctctcacaccgcagagcactctctagtccaagcacagtgcagggcagaatccagagcttattttatttaatcctcacaattttgtgatttttacagatgaaaaaactgaggtctggggaatagaattgtttttcacaggcacaaagctggtaattggtagatctgggatttgaaccgaggtccaggaaactctagagcccatattattgccatactaggctccctctctaaataactttctcattaagtgagcagagagagaggagccagactgccctgaggcctttggtattaataggaggctaagaagctcatgcagctaagtctctttatccaacggcacatccctggaaggagaaaatgggctctgttggaatccttccactgacaggaagctctctacctcacataactacagacctgattactaaaaagactttggtttgcctttccaaaactcatatccagtgatcacaattgtggcctctgaagcagtttgattcaatactaattgcactcagtacttggatctatcataactgtaacattaaacaatgttttcccctcgcagggttcttttgaggatacagtgagtattaaaatgggctggtacatagtaagaatttgcccaatgttaattataaaaattttcctgatattacttggtaagttattctgttaaatggaataaacacccatgaatgccacatataaaccaacagctttgaccctcataatgacccccatctatccatgttgtcctcccccatttatcttcttgtctccaaggtcattatgttcctgagtgccaggttcatctttcttcttacagggttttattgcatgtataattggtcctaacatgctttataatctaagctgttttaaattttataaaaaggattccatccttatttaatcttatgctatcctcacaaacttattttcccccacttgatattttactatgaagaaattaaaagttacctacaactgaataataatgaaatgctacatattaaaatctgtacttataatagaagatagcctcaatgttaataaggtgtcaatcttaagtatacaaaaactgaacaaaataagttcatatttagcaaaagaaaaaccacaataaatatgagcacaaattgatgaaatagaaaaatattttctagaaaagatcaaaaaagtcaaaagtagattctttgataaaataattaatagataaacctttttttgttttttttttttgagacggagtcttgccctgtcgctcagtctggagtgcagtggcactaacttggctcactgcaagctctgcctcccgggttcatgccattttcctgcctcagcctcccaagtagctgggactacaggcgcccgccaccacgcccggctaatttttttgtatttttagtagagacgtggtttcactgtgttagccaagatggtcttgatctcctgacttcgtgatccacccgcctcggcctcccaaagtgctgggattacaggtgtgagccaccacgcccagccaatagataaacctttgacaatatcgattaaaagaggaagatgttttgaatgaaaaagtgaatatttattacaactaaaataataaatggctattgtcaacaactatctgtcaaaatttttaaaaatttagatgaaatgtataaatgcctaaaaatttataactaaccataatggacccaagaaataacaaaaagtttatatagccctatggctattaaataaattaaggtaattgttaaaattttttttgcaaagaaaacatcacaccaggtgattttacacgcaaatttttcccaatgttcaaggaagacatcattccaattttatgcaaactcttccatatgatagaaaaaaagagattattccccatagattctgtaaatcagtataaccctgttactaggaccaggcataaaaatcacaagggaggaaaattacagccttctctcacaaaggaatatagatgcagaccattcttcttagtagtatactcaattgtaaggcataacaaattttatttccaatatacaagtagcagtgtaacattacagaaagatttcattagctttggaatgtaccatttttctagctgtataatgtagcaatgttatctaatttctctaagactcagtttccttctttgcaaaatggctttttataatatctatctaattctgtgggaattaaggaagtaaacaatataaagcccttagctcagagtctggaagtaacagtaagcaataataagttacagcttctatttatcaagtacttagctccccggctgagtattttttttttttttaactctcctttaatccccacaaccaccctgaatggtggagattatgctcaattagtgaataaagaaactgagtcaagtggaatttcaacaactcacccaaagtcacataagttgcaaaaagtcacgctaatgtaacaatcgcagtctctgaatactgatgcctggggtcctttcaaatgtggagctgatattaccagctgctatcggggacacagcacttcctctgaggggcactggagttccttccacaaggcatggaatgtgttcaccttttcaggggaagcagttttcaagttggggtttgatttgtgacatgtgagattaaattgcagcatttctaatggaaaggcttcagagggcaggaatgagcgatacactgtcatttctccatctctgcgtgaggaaccttaagcactaatgagatcagatatgtcaccgcaactctctccactctgccacagattccaggtcagaatatttttttttttaaacattctggccacttcactgcctacctgcaactctctaccacgttcctgacatataagatttatgataatttaccttaggcagggcttggagttttattccaccaggttatcaaaaatgttgccaataatctctttcatattttcataggacaagattatacaaataatattccaccctattctttccctagagaaacttacatatcgattagacagggaggcctaacaaagattcaagagtcagtttgtcctatgagcgtggaaaacaccactcctgttaaagattacagagtgacgtcacttatgactatgctgtgcaaagtgctgggtttttttttttttttttgtatcctaaggggctttatgcttgtctttgtactattggtgccttgggaaggaaaacaagaatgcatttctcaacatttatgtctgcagcgatactgggaactgtgaatgctaacatatttttaaagagctctgatagagagaaaccaggtggtgaaagaaggtagtgaacaagcctggatacagaaaggtttagagtagaacttacgggcgccacctgctggtcccctgacaccactgcccagagcttccagttcccctaattggagtctcagctttatggccagttggctcagctgaatattattaaatgatttctgtcttcaactatgcttagacacagccttggagacaagtaagtaatgcagagagagtaaaagggagtgagtagatgtcaaagaatggtttgcccattcaacatatgtgtgactgctgtgaaaggtgtatgggagtttcccacatcatctatcagcaaaaagacataaatggtgatcttccttccttttcccaccttctttttttttttttttttttttttttgagatggagtgctggagtgcagtggagcgatctcggctcactccaacctccacctcctgggttccagtgattctcttgcctcagcctcccaagtagctgggattacaggcgcccgccactacgcctggctaattttttgtatttttagtatagacggggtttcaccatgttggccacgatggtctcaaactcctgaccttgtgattcacctgcctcggcctcccaaagtgctgggattacaggtgtgagccatcgtgcccagccttttccctttctttcttggagagaaatgatagcatctgaggaggcaggagcgaggggtgtcttgtggaggtgggtagtgatggcagcctgctctgtaactgaacatgcagggcaacgtggggagaggggtgctgcatggatgggggcagtggtgtttctagtgtgtgaggaagcagagcagaggatgagatgtacgcaggtggtgggcagtgaaggctaatattgaacaaatgagtatatatattaaggataatgggaaccaagtttctgtcagagaaggtatttataaatgtggaagggggaaaagacttagatttgaattgaagatactgatatgaattcatgtggcttatgtgtaaacatatacacatacccagatatggaaataataataagtgtgtgtttgtgtggacttatatgtacatatttcctagctctgtgttgactgggtctcaaagcattgacatcacaggaacaataagcatgctaagcacccagatcttgatttctaaaatcattctacacggacaggaaccagagctgcttggagaagtggctgattccaaggctggacagggacagtataagatgatcctggagcatcttttttgtaccagaatataaagaaatgctcaaagaatgatggggagatctggcaagtaccaactggaccaggtgatcaagtggggatacggtcagtgtggttgccttctgatgtgatatgctgagaagagctcagcagcgtttttgtggaattcctgccaagatggcatggaagaatacatgacttgagtctaataatgaagaaacagtggaagctccagagaaagagtcatcctacaggaaaaaaagacctatactctttaaggcaggaaaacacgagacagggaaagaataaaaatccattccaggctgggtgctgtggctcacgcctgtaatcccagcactttgggaggctgaggcgggtggatcacctgaggttaggagttcaagcccagcctggccaacatggtgaaactccgtctctactaaaaatacaaaaaattagccaggcatggaggtgtgtgcctgtaatcccagctactccagaggctgaggcaggagaattgcttagaagctgggaggcggaggttgcagtgagctgaagatcgcgtcactgcactccagcctgggcgacagagggagactctgactctcaacaaacaaacaaacaaacaaaaccattccagattggaggaaactgatgaaaaataataattaaatgcagtgtatgtttctgtatagcatcctggaccaaaaaagaaaatgtcatcactgagacagttggcaaaatgtgaatggggcctgtggactgaatggtagtgctgtatcagtgttgattcctgattggaagtgtttttataatagtaatgagaagagtgctcttgttttgggaaggtaatcaaacacctgaagagtgatggagcatcatatctgaaagggaatatctatatattgatctctctgaatgaaagagaattaaaatgttgcaaggtggataatcagggtgaaaggataccgcagttcttgctacccttctgtcggtttgaaacagcttcagaattaaaaaaaatactaaaagtgctgagctctgagaagaagaaaatagcataagtttaatgggaaaattatgttatacatgattagaatccttctttgttttctgagaagaccctttgttgggaagaattgatgatcaggaatgcaaatgagaatggccaaaggacagctagctgacttacaaaaagaaaaagaagattcggtataaagaaggagagaagggtgaccaggtatgcaaggagaaaaactgattgctagatattgagagagagtacttgcaaacaagcaaacagttgccatagggaatggaacttgtagggaaaagaaggatgttggagaaaagttgaataaattttgaagtgttaggtgtaatataattcttctgttattccaaatcaccacccataacatccacacccttcatcaacacccttaagacacaggtatttatttgtttaccttgtttgtttgatttaatgaaaagtatgagactgactggagaacaggtgcttggtgagcacagggcagtcagtgtgtatcagtatgtttgtgtttattatgaaaagtgagataaaacatctacataaatagttctaatacagggtagaacagaataaaaaggagccaccagagagtgtcagataaggtgtgaggaaacttcagaaaatagaaggaaaaagaatatttacattccccaagctccttctctgaaccagaaggtgggaattatacattgaaatagcacggtatgaaaatccagtaatgatccatgatcccccagctagtaaatggcagagcccaggtccatagaacccgaaagatctctttttttcctactatagtgggctgccttgtgcctgggtctgaagagaagaggaagaaagaggggagtctgatggacaaagctctgtggaggacgtggcactgagcagaaacttgaaacagagcttgactggctggcaggatgagaagaatggactcttggctgaaggggaagcaagcacaagcacatagagatgaggaagcatgggtggtggtatatagggtaagtgcaatctatttcaaagacagctaaaacacaagatgacccattccatggcaaacatggacaccaacaccatgtacaaagatgatgagggtgaggaagattgagacgtcagttatactgattgggaggctgtggaataggcagcactggcaatacttctgtgccctaatgtcattctctgaagctcaaggccaaacccactggggccaaactcacacagaaacatttattttcagacatcatttaaggaaggcaacacctgaaagatggaagggctcagtgcaaacttccagggtgctatttttgaaaatgcagaaactcccagtttggaaatattttcttaaaaatttccccatcattattagcacttctgccaaataatcactaactaaaaatattccctccttgataatgcacagataaggtctctgcactgaggaggaacaataaaggaaggtgatgaattgcaaatcaatcataatttatgcagatactctactgaaaatcacattcatcaccttttccaaatagcgccacatgaatttcctgaagtacaagaagtctattttcataaattagaccttaatttctttctctcatcaatatatttttatgccaaaaagttaaatagtaaacaatacagctgaggaagaaattatgaactagaagaacatgaaacatggtattcagaaggaaaaaaaaatagtcaaatatattttctatggcctttgctttgtgttaaagtgtgtgttttttccccaaaggattatgtgatgtaattggtactagttggatgatgaatataaacaaaaaatgccaaattatcacaagatgcctttgggaaaaaaaaaaacctgtaactgatgctacagtgtaccctgccagtatttttgaaagcaaaactgtactagttcatttttacactgctatgaagaaatacccatagctgggtaatttataaagaaaaagaggtttaatggactcacagccccacatggtgggggagacctcacaatcatggtgaaaggcaaaggagaagcaaaggcacatcttacatggtggcaggcaagaggccatgcgcaggggagctgccctttataaaaccatcagatcttgtgagacttactcactatcacaagaacagcacgggaaaaacccgctcccatgattcccaccaggtccctcccacgacacatggggattatgggagctacaatttgagatgagatttgggtgggaacacagccaaaccatatcaacaatcataacagcaatcagccagctaagaccaatgaccatccagcaagactcacttgctatttctctgtgttatctatgtcaaatggcaccttttttcttagcatcccgtttgtagaagagcagacacagagaatgtttcacaggtccccattctggggattattggctgggtatttaaatatacttttcttaggctgggttcctctaaagcaaaccctgaagacaagactttgaaggcaagtagttgatttagaaggtaattgcagaaatcaccactagtggagtgaggaagtaagatcgggagggaagaaaatgtgtgttattaaacatgtgattgctgtgggcaagagggactccgtttcactgggaaacactatagatacgtttcccagttattcctccacaagagcaaaggagcctgggtacttactcaccaacttccatgagtcattctgataactgctaccaaggggtgacggggtaggatgtgggctgggagattaaattcctagcactttcaggctagtttgcactgcacaaacacgaagtagacaccagtgactagaaaaagacaacagccagaatgtaatagtatttaaagatggaagccaggggacaatgtgtagaggaatagtcctatccgaggaatagtcctatccaaggaatacgggcagtacactgcaacagggcccttttaaggtgagatatttagaaacctgggtcaatgcttgtctccatgccaatgcagttacccactccctctcagccccagccactctacgataaagtcttaatgaacatcagagggacgtttcagggcctgctttgtgacgcacatcaccccttagactactccagtgctcactgatgtcccaaataacaagtcctctaaattattggtggtttggtctaattatctgctgaaagcattcaaaaccattgggtatccctgaaggagaaagtcacaatgctgcataagaagaaacaacgcctgcaacggataacttatttgctgtcatatgatcctatagcatcctacagatctccttccattagcatccatcacatctgtaattatttccttttcattatctgtcttccctgagtgaccataaacccaatgaagccagagaccatgcatgattattcattcacagctctactccctgtgtctagctcatagtagggagtcactcaatacttctgaatatgaaaacaagtgaatgaattaagattattaccgtcatccagcaggcaaaatggattacatagctaagggtctgttcttctgaagtaccttcttataaaggataaaaaaaggtgctccttcttccaggcagatgaagctctgagccagagctcattgcttaaccaaagcattgcagctcaaattcagctcctgctcacccattggcaaggtgcctgcggtagttttaagagccatcaacaaatatttctagcttgtcttcttcctgctgaatgaaaagtttgcccttccctgctcccttgaaattagatgtggccatgtggcttgccatggccaatgaaggaaaacagatatgatcccattctaggtggaagcctttatgagttcgtgcacaatttaccatatttgtttctttctgccatgacaaccagcaagatcgcagatggcagacagtgatcggcctatattcttaaaaggaagagacatatacacagtacctagctaacccacaaaaggcatatgatatgttttggctgtgtccccacccaaatctcaacttgaattgtatctaccagaattcccacatgctgtgggagagacccagtgggaggtaattgaatcatgggggctggtctggcccacgctattctttcgatagtgaagaagtctcacaaaatctcatgggtttatcaggggcttctgcttttggttcttcctgattttctcttgctgccaccatgtaagaagtgccttttgccttccaccatgattctgaggactccccagccatgtggaactgtaagtccaattaaacctctttttcttcccagtcttgggtatgtttttatcagcagcatgaaaacagattaatatagcatgttagaaatatacttgtattgtttaaatattggcgctcttcattcctgcagcatatctagcccactctggctgatctagtatacaacccgcagccctatatcctgtggccctgggcaggttaacacgacttgcagtttctttgttctcatgaactggtgttcatgtcataccctcatgcatgcattaccctctctctgcacacaacgtgggcctctaagaagcaatgcttttctgtggaagaaggaagagggggcattcagacttaaccctttctgcctaaaaggcccttctgaaattatatgaaagagagagagaaaaaaaaaaaaacattttgcatgctgttcatttagaagggaggcctaattctttcaccttcctataatctccagagcagttcctataccatcaaggctgcctctcctgagggggccagagcttcaggctcataattagttgtattactactactgtcactgctaattaatgatccacattcagcctaaattgaaactgcccatttctgactcctccactctaggtcaaatagatggttccttattttcaaattatgtacttcatcttaattgtataatttcaatttcatttaaaaaaagaaaaaaattaaaccaaggaagaaatgacattttctaaactggtgagttgggttatcaaacttaaaagcataaaaaattaatactgtgggattagcattattatagaaatacattaaatcttatatttaaataccagtcttttaaaccatggctgtcacagtgaaaatgttaatagtatttaaacataaatccttctccccatgaagaatcattcatcgtgcaagcacgttagctattctattcactttagagatgctgcctagcagagcattttaacgtaagccttgtcagtgttaatcctaatgtctgatgctgagatgtgtgttatattactttatgtagctgaaaaatgggaagcctttatgtcagattacaggctgaaataacgacctccccttggagccagggcctgggatataacgaggtgccaaatgggattctaggtcagagcctctgcaggacataaaagggaacagatcttttgttaagacccattcactcactaacagaatgcttttaccctttgcaatctactttatggctcctctgcaaagaagagtaaccaagagagaaagtcttgattcacagtggggcttaccagccaagctttggattcaggcaggcgatggtggaaatgtacccagccactccttcacctccacaaccaacagtctagggctacggtgttcaaattgcattcatcaaattcagagtggggagtgagagcctgaggttcggcagaggcaggaacggggagagagagcatcaaagtggatccagtgccttctccatcctcactgcatccagagcagttccctctacatctgttttatataccacagttttatgaaagatggcacatgaaatatggttctcctgttaaagtaactcattaattcaacaaatatttaccagccacagacaataaacccctgaataaatgagcacatttcagagagtgatagacgatacagagaccagcaagcatgatgatgagatagagagtacctggagtaagggccacttgcagagaggacagggaaagcctggctggggtttggtggggaatctgagctgagtcatgaataagcagaaacagcaagccatgtgagatccaggaagaaccattccacgcagaggaagtggccagtacagacagcctaaggcagaaacaagcttaacgtgtccaagaatagaaaaagggcaatgtaactgctattgggtgaataaagagaggcatggaaaagatgaggaaggcagatcattcggggcattccagactcaaacaaggagtttgggtgtcattgtgtagtggttggaagccaatggaaggttgacaacgggggcatgacaaaatctgttttgcggagttcttccacacagagagtagattccaggcacaagaacataggctggaggatcaacaagaagactgttaccttccaggacctggaagagagttgcagtgaagatggtgcaaattatctggatctgggatatgtctaaaagtaaatctgatgggactaaaggattacttgaaatcactaaccagaatttgagaaggggagggtggaacacgtggtatgtggggagggaggagatagtgcttagaaagaatagaataattgccacttctgtagatagcttctggccaactgacttagcaaagagcagcacaatatccttgggctgagaccagcgggtttgccactgtctctcaccggcaatcgcattcttgcttccaaatccggctgataatttaggaaggttttatgtcaccgctgctcggcttctttttgtgctttgattacctattctcatacaacacttaaaggtggtcacagaataatctctaatgttttgctttctatgataaataaggggttcgtgaagttcattaacagggattgcatcaccctccaccctcttttacaaccacaccataaaagtagcctctaattagttaaaagactacaaattataccatcaacgtgaggtatggcaaaatctgatggctctaattatcttaataatcagcagaaccactctcaacctaataagagaatgagtcattagtggtagtttatgaagatcaccgacattctctttgttatggagtttgtccttcctgtgttaaaatttggacacactttctacttgaatctaaaaaggatgatttctaagaagttactgaagcaatgcaagatcaaaacataataaccacattcattcttaatcagcattacagtgaaagtaatttaccaaagaacacataattaagtcataaatgaaatctcaagacagaaattgctccccttttaagatttctcattgtccatacactcagaaatgagaagagggattttctcattctgatcctaaatctatcactgaaatgatgacttcacttgcatttatgcattttgctttattttgtgattactttatctcactatcctcccctttttctgcttgtgtgattgccttaatccttttatctagaaccagggggagttccattagcttcagctttttggtatgccttagccacagaaaactattttgtgattcaaaactgctctaaaattcaggaccaaatatcacatattatgtactccctagacttttgagagtttcactctagattatagaggacaaaatcatctccccacctccaccttagggtatgtactccccatctcaagtcataagataaacctattgtggtcagaaggcagagtactctaataaccttgttatagttgaagagactgagtccatgaaaaagttacggaccaaggttatacacagagctggtgacagtcttgaggctaaaacccaacgttttactcttagctaatgttcttttgggcttaatgaatgaactactgctgtggaaatgtttttttttttttaaaaaaaaaaaaaaaaaaacctttcattgtgttttgccagaataaagactgaacatggccctagcggaagagctaaattcattatctttaaaaaatgaaattttctcaaatcataaatgcagtcaccaagtgtaccttctttctctgcattgcagtacaccaaaatgccagtcctctctacaaacacattttatggatcccaaagcagagagattgacgttgttccatttcctgttcacagtataatcaggacaaaggaataagattagtattgtgccatttccacgcggaaaaaaaaaattgttttctccatgtgactgtcagtgtatgtcaaaatgataatggggaatgtgtaatacaagatattgctacttatcaatggactctgaaaagaaaattagctcaagcatcccttgatataaaaagcaaatatgaggtcttgaatcacaccatcctgctatcaacatgttttgttacaagtcagtttatgttccttgagtaccacgtggtttacagtgcatttctctgacagcaatacagaacctcaaacaaatattacccttgcctccaataccaaccaacattaaatacaagttctattcctgaactcagtggcattcagaaattcaaaatgcttagatgccctctccatcgatttgcttctctgggtattgggctgacttcctgttcatcagggggtggtggtggtggctggaggaggaagtagatggttttaaccatttgtaggtctaattactcaagctcagtgagcccacattgaagaaggagaaggagaagaagaaaaattctctttcctattgttcatatataaaatcccagggaaagattctaatcaactctgtttggatcacatgcttactccttgggccaatcgctgtggccaagggacagtgtagcttaattaggcaagcctggttacattcccatcctgttggcttggaaagggggatactatgaccagtaaaccaccccaaatcatatgaaatgtaggagaacggttatttagtgaaaatgaagcactattatcagaaagagttggaagttatactagcagacagaaacaacaacactccactgcctttcaaataagtttattatgaaatgaaactacggctcctcttttctaacagaccgattttgtgattagaagtaataggtttttctcaaccaacaagctcaactagtttagctctttctaccagatgagccaagaataaaggacacataagggtctcaaagattatgctttctatcctgcccaaattctgtaaccattaccttttcagtaggtgatacatttcccaatttagacttcacattatagaaaaaaaccatccttcactgagttgtatttgataccgaatgcctgcattttcatgtactagtcattattccatctttccttaaagaacatccttttttttttttttttagacagagtctcgctctgtcgcccaggctggagtgcagtggagcgatctcggcatactgtaagctctgcctcccgggttcacgccattctcctgcctcagcctccctagtagctgggactacaggtgcccgccaccacgcccagctaattttttttttttttgtatttttagtagagacagggtttcatcatgttagccaggatgggctcctcctgacctcatgatctgcccacctcggcctcccaaagtgctgggattacaggtgtgagccaccacaaccggcgaaggatacccatttttaaaataccatttaatttaaagttaccagatgaaagctgcccactgtaattccagggaaattttactcttagttttcttctttatggtcacccaaatctagattatttgaattcttcttctgcagtaaaattaattataatcatagcttccaatttttagctgctacttattgagtgctgactattcttggcatcagctatattatcattaatcctcataccagcaattattatcatctccattgtatagctggggaaactgagatagagttcaaagaatttactcaaggtcatacagctgagaagtgacacatcttggaatcaaacccacctctatttcactaccaaatgccttctcctaactatatactctacccctgcatcgcgagcatcaggcaccgagtctctccaaggctctgtgataaatactactcttgtgtgacctcatgtcaccctcacttttcactcggaatataaggattcccattcccatgtcacaggtgaggaaactgaagcttaaagaaattcatcaacagacctagtttgccctgtatatagaaaagctcaggtagtctcatattttaatctctttttagcctccttttgttttgtttcactcagttcagtcttaacgagtcttaatagtcaagaaaataaaatcatagtaaagaaaacaacaaaggtatctcataaggacaagaactaatccatcccactcctactgggctggctccttttggcagtggtgattgctttctcagatgtcttaatagaagagagaatttgtgaaagcagagagccccattaataaggaaggaagaacctgcaaggtgcaaataactaatctcttgttgctttcctgttaaggtaccatgcatgtgtcaaaaatcaaaaccagggagcccagcctctaatatgagaagattccagatttcaaaagcactaggtactatttgataaaccaaacattttccctgttattgctagaagcagacacacataggcacatttgcatcctctatattgatacttctcaaatcatccatagtaaagggcgtgtgtgtgtgtgtgtgcgtgtgtgtgtgtgtgtgtatttaacctctatttacggcagtctgattcatgaccctactgtaaatgactactacatagttcataccacatgtgacttgccacacaagtctgatcacattggaactggtcttctccttgttcaataggataaggccaccaattatatacttggatgtcatggtgacttcaaattgctataaagtttcttatccaagactgacaacttgcatttcttcaggactggcactgatcctccagcgacattttgaatggcctactccataattttttgatacagggtagcaaatactatgcctatagtggcaaggaagtgtgtactctgctgaggaagtcacctctgcagccaccagaatgacatttctgaagccagtgagagcaatatcagagagcatcaatattgtaaatacgttttgatcttatagataacctgaattttgctgtgtgcgctattaataactaatatttgtaagaatctcaacaattttcaaaatgctctcttatatgttaacaaatgtagccctactacaatcctgtaacatagtatccttacccacccccccacacacgcacacatacaaagaccaccacctccaccccatttttcagatgaggataatggggcttagagtatttgggtgacaaggctaagctcacataataagttttacaggctagcaggaataacaccaaagtttcattttatttgcccactccaaagaactgataatgacagccagccaggaagctacttggaggctgtgtctgggttcagtgggtaaagagtctttgagagattagcaatgtctgccgggtaagaccagatacactggatacccttggatagattccaatccaggtagcctaatttccttttccacatcctttagcactccacatagagttgtttctcacaagtatccacatttaaaagaggtaacctcccagaacagaaactagctgacattttggaggcaaagtctgtttctcttgcgcactgaagacaagaagagtcaatttgtgatacgtgttacagagataatacacatctaaacagcggtgataaatgcatgggaattacaggcaaaaccaaggtgatacaaagtttccaaagattagatgtatctcagattaaactctccagattatactaatcaattacagaaatggggctgagtgggagtagtcactgaagccaccgttgatgtactttccctaaccattttatgcaggcattccttcatgggggtctcctcaagtcactggagtcctcagcaggggaaaggaaaacagcaatagagaaggaggttaggatcttgggcttcattttgggagtcacagtactaaaacatcacctcatgattagcagataaaaggtgctgccctgggctcaggcaattacaggaagaaacaaccctaaagcagaattcacaacatactgagttcatgaggagggcgatgaggctgatgtggggactggcttttcttcttggtgactcaaagacaaagccagcagtacttatttaaaacatgccacgtgctcatgtttatgtgaggagtagaagacaacggctttggtaaaggagaaaattcactgcataattgaatctttgaaattccagagggaatggccttttctgagaacaatgtctgttattaacagaagaatttcgaggccaaatgcagagttttccaccaggttgcatagtgagagtcatattttgaatggatatatagttttttaaaaaaagaactctgaagagttatggatgtttctcaatatctttctcaagaaggcaacagattttggactcagcagataaccctttatcctatagctgtagtgatgatgacatgataagctgtgtagcctgagcttagatgcagaagtgaattctgggcaagggtcccactaacctgtcttccctgggctccagacccacatccctagctccttgttgggggctccaacttgtacagccagcacatcaggctcagtaggtacaaagttgacatatcaattttcccatgaaaagagatcttgttttgacaacactagtctttcagttacctagactcaaaatctagaagcagccctgctcaccttcatctccttcacagcctgaactgagtcaagggtcaaatcacatagctgggttagagatatttttgacacaattccttccttcctttccacccactttgagttggcacttgcttaaacactccctgttttacctctggatagttacagtgcccctcacttgtttcctcatctccagtaattatccattccaacccatcctttaaacccatgccaaaatcactttcataaagcttacctccacattcaaatctcagtactctaccaggcacatggtggctattcaggtaatattttctggatggatggatgggtagatggacaatgtatttactcatcatttactatatgcctgacattgtgctgggtattaaagacagcaggaaacaaaccaacttctaacaaaacacttccctgctcatgagccttgaatggccaattaacataaatggttcattccagcattcaagcccttctgcagcacagccccattctaattgtttcactggtcacctactctcccatctgtcctctagccaagggtttctgaccttagcactattgacattttgagccagacaattctttattgcagctgctgtcttctgtattacagcatgttgagcagcatccctggcctctacctacttgatgctagtggcacacagccccactcaagttgggacaagcacacatgcctccagacaatgccaaatgtgccccgggggagaagagtcgaaaagaacccaactgagaaccactggtctagggtggcgcccaatttacacccactgtcctagggaaattattaatagtactcccctttcactttcacatgtgttccagtttagaagacaaactagattggttccctgcttaaatctcccgagacagcaaccttgctctgttctcatgcagattgaagaggaaagcaacaaattagtatgaagccttcagcttccaagcaacacttttttttttctggtgaaccggtctcctctttaaagattcaacttctctcttcttctttcagcacatgcagtactgggaagtaaaactggcccaaatgctctgcagggaaatgtgaggatcataagctatcctcgcctctcaaaaaagaatcacaaaaatatttacagcttttctcaaaaagtttcatgttccaaagatccccttctacgtcattctaaccccaaatgcctcaaaaagaagttcaaagctctcaagtccatcgatccaacttcttctctggccaaaaaacaatttcgtgccatgtgttaatgcaaagggctcatgctgtattcacgaaatgccaagacacctggttaaaaagttcaaaaaagttaaaaattgatccataatttcgactagcatggtagttctcaagctttactgtttcagaattccctggagtgcttgctgaattggaggttactgagccccagtcagcagagttgcagatttagtaggtctagggtgaggcacaataatttgcatttccaagttcccaggtgatgctgatgctgctggtccagggatctagaagatgcccgctgctccctgcttattccctcacagactgaaacgtacgatattacggggttaggacagtgggcttgggaaagaagggagggaggtcaggagacttcatccggctgcttgcttaggttttgtgtttttcattttttttttttgccagttagtcagaagaaaacgattttaccctggcctgtgctgggcaccatgctaggcactagggatgcagcaagaaccagacagaccttgcctcctgctgttttcccctttagagccacaagctcttctatgggctccaattccattccttctagcactccctttcagttcatcagctgctaatcagcaccttcaatcactctccaaatccccacaagacagcttccatttttcaaaagcaaagccaaagggaaaatcaagagtttttagaagcatctcctatttcggcaagtgcttccctttttgactctgatccatttcatcaaaaacccttattagagtggtccttcccaggtgtatctttttagttacctctggagataggaggtgcatccagtttattctttctgctttgtttcctgtccagaggagaagagtgctttgatccaacactgacaaccacgtctgcaggggcctcagacttgcttccagggaacaatcactcagcctatgattttgaatgcttcttttgtcactgtcaccaaagcctgagggaaagcaatctacacgctggttgacctctgaggcgactgccagaggtgccagctgtttcccctaaactactactcactgttgaatgtctaggtttccatctcccagggaagacattgccccagcttacctcttcatcatcatttgggaaggccagagaagtgtgggcgaagccatcctgcctggcgtcctcaagactcttgtctgataccagggctctctctgggtctataatctttgttcagggaatagggaaaatgtcctgtgatttgttaatccctcctgtgcagtgagggggaagttttagagtaactatttatatttttgtgatatcaggagcatctagatatctttgcttacaagtttttttttataattttagcaaaggaaaattttatagtttttagcaaaggaaattttacctttcatcataataaaaaatgtattctagaggccattattcatgggttaatattatcagggagctaacgatggcttaacaagagatgggaagccattttggaagtgttctattatggaaagagggagggcctgtgacatggattcatatatcatattcatatggattcatatgccagccatgcgtcagccatgagtaacatcatttcttaagatgtcagagtttttcccaagcacatatgccctcaggatgagaaacaactcgtctgtttgataaaaaaagaaaaaaaaaagaaaaaaaaaagattttagttcaagaattttatagattacaaatttcagagattctttattccagtatagagacacagaaatcaaaaagaatcatcactcaaatatacataggtctattaggtggggacacctggtagatgtaattatagtttcatatgcctgtatttaatgccactgaactgtactcttgaaaatggttaaaatagtaaattttatgttatgtgtatcttaccacaaatatatatatgtatatatgcagaaaaaacatatataaatatatattcattaattaggtatctgaatagggagctatgatcttaaaaaagattattttttcctaaatggcaatgtgaatttcatgtggcttaaaatcttctagtatggatttttggtgtttgataagctacattatttaaactagaataatctggaattatagagaagtatttggcttctggggccactgggacaggggcagggagggagtgtgggagcagcacccctccccagcccctgctgctgtgggagttgggatggggatggcacttccctcaaaggagaccaatgttccattgtcagtcaacttagggcacaaaacagtcttcaagagagaagaggtggaggggactcatacctttggtgggagataagcccctgctacagggtaacacaggtgaaggtcaaaatgactagtagagaacacctcctgccactaaggggtaagagtagtaacatgtaaaatccagctttaagctttactttcctgtgttagtatcagacactgctggttgtctacctactttctgttcccccttcttacctcactaacgtaactccaattttgagaggaagctaccctttttcatttgttcaacttcttcttgggaagctaatcttacccttgacccaactggcctaagccactgataggaataggaagatgatacaattccggtcattcacatgctcagctagctgaggagacatctgtgaaacagttccttgtccatcaaaagagacacataagaagaaatgagaatcattcttttccaactgttaatgggtctagataggatggctatactactgtagttattgtgtgaccatgaagtgtgctaaccttgagccagaagccaatgcagggaaattgaagagtagaaagaagggaagatgttatattcttgagtatgacatttatgcaactgatgtaaccattcattatctcaaaggtggaactatcctacccttaaactccttactattggaactttttgaatcatgatttctataatgtgctgccaaaatcattctacttaactggttcagaattgtaattctttcaggtttttcctaaagccattgaaaaatggtttgtcataaatgactgtgtagagttgacagggcctttggaaaactgagtgggtgctgatgaccatacagggataaagtggtcatggaacaacctctgcgacatgaagatatggctgcaagcagcaagagataacaagcaggaaggcccagagcagtgatccatagcataaagtgacaagtgacaggagggacaggcttgtgggacatgtaaacaagccctatggttcttcagaaatacgagtggagaggaggtcatttaagacattgaccatgttcagacatgcagagtagaggcttgggctatgatcatcagataccaaaagaaaaagtaaaaagatgaagattttagagggattcagataatactggctataaggaatatcacaggatctcctgccaagaaaatgagattcctatatgatttcttatatctctccatatgtttcctataagaatactagccatcaaaatgacaaattcaaattggtatattcagacaaatagaaagaaagtatttccctatccctcaaatgagttggataaccatgaatggtgagtcagatgagaaagaaaatgcaacagctctcactcagacctggacaaaatgttaaaagatttagtaggatggtcaaaaacatagttttcaccttaactgcttactttcaactcttcattggaataaatgcatataggccaaattaataaggaataagtagttatattttaggttaatagttgtaccattattagaaaaaatctgcctcatataaatgcagccatgagcacttcctcccctttaaaaactagtataataaaaggaatgactgattgtacttggcatatttcccctctctgtggttgcatttcactgcagttatgaaaacataatataatttttcccaaggccatggttacctgacagaagcatttaaaaaccaactacactttggacttccaggcacgtgtgtgtgtgagtcataagacagttcagaagagaaattcatatttgacatccagagctccatcttcccgcctcaagtgtctgtgtggatgtacttactccagtcttacctgagtttcaataatatgggtttgtcacaggttgttatgggctctaactaacagctgtccactgcactgagaactattattttcagaggcaggtcagaagcccatttctgactctcacgcattgtaaagaaatgctgaccccaaagtgggattctttctcaaatacactcaccctgtaagcaccaggtagagccaggagctttcaaaagtgctctgagtttaaacatttcacagcatgaggaacacagccgaagagaaagtgcaagaaaaacaatataaagacattattaactgtgtgatcacacaagagtgaggcctccagatgggccacctcatagttattgacgagcgtttagagaagaacattcattactcgatattgacgctaacgagaaagggtttgagagcaagtttaaaatgtagaaggaggaaacacccaaaccccatccccatggcagctaattcactgttcccaacaattctgcatgctattttttttactccccttgttcatatcttatactgtgattaaacccaagcattctgactgtaaaccctttttttctgtctatttcgcataggcttggtgtgttaatcaaactgtcagcaaaggaaaaaaaaaagaagaagaagaaagggcacattctatccaaatgaagaaaaatctgagctttctacaacaaacacattttccagtggatgagcttctcacacagtaattatttcacttctcccagagattactgattacatcacacagaaaaactaaatgagggctgttttatctttctcatctctctgtggttcttgtgcaaacttatacttgttatcatgaaaaatgacaaatttgccatctgatcaaaatgttaacaaggtaactgtcagtgagatggatctctgactgtcactgcaagccagaacatgaggatacattgatatttctcaatacagcccctgcttccccaacgttcactaactacatttccacagtaaggtaataaatcactcagaaataacgagctatataggatctctggggtatgatagatgtgtcctaacagcactatctgcaagatagaaaacaattgataatgatctaaagaaaaccctaatcaactgccattttccataatggggtagatgaagcaaagatatgaaatcttaactatgtgatgcatgttatgacaaaaccggactgctccaaaaaaaacccacacagccccaaacaaaacacaaatgacctaacattacgtagggtcgaataaatgaaaaataaagttaataacacagtctggatacaaacattatattggacactggcaatgatgggataatcacagcaattgctgggtccacaaacagctaaatagtggagggttcctcatataacatgaatgaagactctggctcagttattggtttaatgaactctcctccaatacttttatgttctttaagactctttgggccacattatttctgagcctttaattcaatggtttaaccaatcatttcccccacccccccccccccgccccttagcaacgtggccaagtgccacatccaaaggaaccaagagagaagaggagaagtccatatggaaataggaggtaatcaaagacagaacacaagatagaaaacttctgcaagaagatcatggcttcagatcacagggacaaagaagcatggcatcaaactgccaagaagctgcctcataacgacatccctttaggttttaaggttaagaagtctcacatagccacagttggtctcctgcctgtcccctctgctcgtttgtctttggccattcctgcttctgctgtttgtagaatactccaagcgccttccctccccaagaccttgtgcctgctcttctctctctctcagggatctctctcctccctggctccttcccttcatccagcttaaatcttccccaaggaacctgccttgcccttcggtttcaaagtagcctctactaccacccctttggtctctatcagcttcatcgatagcagaaagaaccatgtctgtctggaccactgtaatttccaggcttctagcactttctcttctctagtagggattaagcacagtcccaatcctgggctctgggatacaggactgactagccttgaatctagtgccacaactaagtacctgtgtcccactgtgcaagcactcaatttctatgtgcctcaggtccctcatttgtaaaacagagagaatagcaatgcctataaatgacagcgttttgaagactaaatcactttatcaatgtaaagagcctgagatagtatcaggcatacaggaatccatcaatcagctgctgtttttataagagcaagaacagaggtaattcagacataaagtgaattaattcatgattatagacgttagatcaatgagtcaccttcatcattccaggtttttattttaccattagccaaaacagtattgtgctccttctaattccatattctcagactacatggaatgaatgggtattggtctttaagcctctttgagcaatgccaataaatacagtcacttccaatttgagggcacttggaatagcagtgctattgttcctttgacatctcaacagcacttgaaagtgaaagaaaaaaaaatagattaatggatgtattccctaaagcaacaaacatgtttgatgtataaacatatgttatgggcaatgacgctgtacctttggtgccacgtctcaacaattctcttttcatctatcccctaatcatgcaactgaatgcttccagtaggccacacagtagggacaaaatgatagtaagaccacctggctatagatacctgcttctagagaggccaggttccaacccattacaagctgataaccatatgtatgatttttgctacactggccaagtatttggatcttttttaaacatatttgattatttaccctttgattagaatttgtgaataaaaatgtcttttaagagacacaaaggaagggggtacgggcaatagctcattactaaaaatcattttagtgtggaaagtgggcttcactattcctataaggcagtcattttcaaacttcagagcatcacaagccccctgttagattctaatagaaccctgaggaaaatgcacatacacataaatgttcacatataatttctacaggttgaaggacctcccaaaacaaaacaaatctatcaaccacaaactccagtgtaaaaaactggctctatgaagacttcaaatcaccctcacttcctttgcatataaccatttttttcttcagacaaataaaaaatacaattaagtttaatacaagaagaggctaaaaacattaggatagaatattagagtttaaagatctttgcctggttatggtctaaagatatttgctttgattaatatatggtgtaactcattaattaaatgcaaattgaaataagataaacctgtccccatatcatttctggtagacaataatgtgccagttttctctccaataaattagatgaggcaagctttctgttactaaataatagcaatatgggacaggagaaaaaaatttaccatgaggtgctttggaattattcacatgaagaactttttatttcttactttctttttcactaaaatagtactttttctcattttcaaccaatttttaaatatgaggtgtttacattgcttactgttcaaattagcattgcatactttcaggcacagacatgctcaaaataggagtcttttgaaatgcctgcattcagtataaaacacactgctggtaggaaatgcaaaatgtaaaagtcttaaaatacatttagatatggaaaacaaaacatttaaaacatattcacactttaacatgtttggaagtataaagttaatatcgtttatgaaacaaatttcaggaatcatactattgaaacaccctcacatcttcaattagctggattaaggaaaaaaaatattaacaatatttaaatgcagaaaacagattatcaggaagagagatcgttatagcaccttgttttcactaacaagcagagcagactgtaattgagttttagaaatccctgaggtggtaactcggtagagaaatccagacttggcaaggaaatcaagtttccctttaattacattatctcaatcaaagagataactttcacatccctacaaagcaaatgttttaaggagaagtctggcaaggaaagtaggtggaggtacagaggggttaagagtttcaaataacttcatattggtaggaggaacatgtagaaaactgaagtacactgtgaggaagaagacagatgccctggcaaatggtgctgctcccaaaaacatatgacacctaacaccttggtccattggtcctgctttcctatatcagccttggttttgcctttgtcactgaagaaacatggcatgttccttagtgttgaacacataagcctaaagctgatctacagtttcttaagctgataaaaggcaaagctaaaatgactttggccatgactatgctgttcggaggaggaaaatgagaatgttcagtggaaattattttcttggcagtgtccttactaggtcagcaaacctccattctttccaaattttccgggtctcctgcttatttcaggacccatataaggaggatataagcagtgatgtgtgagagctggtttgtaccagatcacaagagctgtttgtataattttcagaaattttgtaagctggtagcttaaaaagccattaaaaattaaattgtgtaatttgaaagtaataaatattaaaaacaaagggaagaaaatattaaaaactctgtaattcctcataatgtcactacattttactattgtctatgctcttaggttatatacatctgtattagtctgttttcatgctgctgataaagacacacctgagactgggtactttaaaaagaaaaagagatttaatggacttacagttccatgtggctgtggaggcctcacaatcatggtagaaggtgaaaggcatgttttatgtggtggcaggcaagagagaatgagaacgaagtgcaagggttttccccttataaaaccatcagatttcaggagacttattcactacgacgagaatggtatgggggaaactgcccccatgattcaattatctcttacagggtccgtctcacaacacatgagaatcatgggagctactattcaacatgagatttgggtggggacacagccaaaccatatcaacgtctattgtatcttgtggtggaaatactctcagtagtgtgctaccgcacgtctctttccaagtctgtgcagtgacatcaggtttgtagcttcaattcagccatatgaactggaaactggaaacactacagattaactgttttcttggctatctagatttaagaaagtgatgggggaaaataatgattatggagacaaagcttaaaagcatattgtgtcaatagctgttacatggtgaatagtacaaaaaattaagaaaataccctttagtgttctatatctattatctgatttggcaaaaatgtcactcatatgattgacaaatgagtaaagttttgacatatattcttaggcttcacttttgtcttgtttatgtaaacaaaaatgtcaaccaatattcatgtctgaagcacacctgttttgtcagtgacatgagcaactttgcttaattgggtagtaaccaagcatttattccttatctgaattttcaaatcatggctgaatcacaatcataagttgactgtgattacaggaattcaacaaacattaacaaaagcattctgtgagaatcaaattggctatatagaatctatgataaagattggtgtatattttatgattactcacaaattgtgtggtgcacattttatatcagtaaaatttataataagcagtcagatgtatgagggtatgtggatatatgtttttatatatacacacatacatacacacacatgcatacacaaaaaccagttgttaatatttaccagcacaccactggatatcaacacaataaagatatactttattgtgtatctcagcaaaaactgaccactcaacttttctagggacaactttattatggttggaaactagaggctaagacatttattgtgtcattgttgaagttccgtaaaaccatttcctatctctaaagttatttatttggctataatgccaagctacaccagctacttccccaaaagcaaggctaccagatggtgacagatttgaaagctctttctcatattttgagggtaggtaggggagtcacgctatgggacagtaggaaaatccacttttagcaggcaggatagaatgggagaagtcaacaccttgtcagttgccaatgagctgctgagaagtagttacagggtatatagcaggatagtattaaactgaaaggtcattaatgtgagatccttgggacaatatgcactctgtatgtctcaataatgttaaaagattctgtacaatatttgattgtatccaaatagtttataactgtaacatttaatttcaaggacaaaaatgaacttaagtcaactattcctgtggttttacatttcagagagcagtaagaaaaattcaccaaaacaaaataaagcaaaacaaaaatggagtgccaaaacagatttgctaatttttaaaaatgtgttcaaataaagatattttcaaatccttccttttattatcacccttatggcgcaaaagaaagctcatcagtttgctattaggatcatttggtagcacacaaagtccattttctatatatgttcagaagaggaaacaggatgagcattgggctcagccactggagatcacagcttcatcatggttcaacctcatcttcagacactgaaaatattgctgaagaaacaggaagcagcattgagcacggggggctgccatgtgtcctctccactgaagatagtctgaaggatacagtgaccgcaggaacaaaaatgccctcagaaacagccctaaagggcttctagaaagtacatgctacctgatgctttttttttttttttttaacgattgatgtctctgatttgatttggtccaagctattctgagaattcatgatggaatgagaacatcagcaactgcagcctattggatttcggtttagtagagtacagtgctctgtttgatcatccacttttcaagagccagcttcacatcctaactgcatcatccttgcaaagctctgctactttgaatgctgctttttttcagtccctgaaatacatgtgcctggggtgtcaccaacaggtgggttttttcctctgacttctttccatgtaagcctcaaggcatgtataaaggacatgagcgctgctttcattttccaaaagaaatcagctttatactgggaattgcaagcacgtgccaggtttcccatagtgacttatatgaactcgcacatactcagggtgagtaaaactagcaggcaggcaggcctcaaccaagagcacatttgctagtttttcttgaaatgttcagaactctggccctaagagaagctaatgccaggcaatcccttgcaaggataggagggttatgggatcaaggcaaaagacacatttggggaacaccattccattgggcaagctctgatatgcagaatctaaggcagctttctggacctctgaatatcatagcatcgcagtggcttcctgtggctctgtggttacagaacaatttctaccaaatgaagagaatgacagaagcaaggacctccacattcctatcatatgtgacagtctggaaaaaggcagtgttcattcttacctctcctaacttcactcgctcattcccaggtgagcctgaggccacatttcacctgagcatcccagctcctacagtcagaggaaagaacaaacttcactcccactgaattaggaccaactatttactagacactgtgcaggtattatgttactgtctcagtctgtttagttgtcaccataaagaaatacctgaggctgggtaattcaagaagagaagaaggtttatctggcttatagttctgcaggctgtacgagaagcctggtattggccttggcttctggtgagggcctctggctgcttccactcatggcaagggtgaaggggggctgtgtgtgcagagatcacatggggagcgaggaagcaagagagaagggaagaggcaccacactctttttaacaaccagctttcatgggaactaacagagtagggagtaactcaccaacagagaggtcattaatctattcatgatggatctaccctcatcacccaaacacttcccatgaggccccacttccaatattggggatgaaatttcaacatgaggttaggagggcacaaacatccaaaccacagcaattactagtcaattatttccgcagtccagtgagacagttttctgatacttgtttacaggacaagaaattaagtcttttttgtctattagacattcatttattgagaaccaactatttgtcagaaatggtgctgcagggctaccagagaaccagacaaatgtggcccctgacctcatggaatttgcattcctgtggcactcaaagaagtgagtacctaagcagtcagtaaataactttggctggctggttggctaagtgtgtatggagcagggaggcttggaagggggaaagtaacaacatggaaagaaaagcaattgtgcagggattcctagataataagccaaagacccagaatttgaacttcagcctaattcacttttgactttatcaagtgacatagcctcgcagatcccccatctcttcctatctcatattaaaaacgaaccagagcaagaacagtagcagtggaatctttcccatggcccatctctgttcgctggagtctgagcaccatctttgggccaaaagcctggggaagaacaggatctaaattccacatttgtggtgaggactagaaagtttcagaacattgcccttttaaactcatctttattaatattctttaagcgcacaggtaatgagaaagtgcaaatacagccccctctggctgcagcagtcagagagccaagaaaaaactgcatgtcatgccatcctattataataacagattaaaagggcacaaacagggtactaattagcagtcataaaaacttgaagctccagattgctcatcttcatatctgggcagtaaaagtaccacgtgtgcagataacatagaagtaaaataccagggtgcaattgcccagagctcagccagcatcagctgagagaagcagttgcatccagcagcacatcctacactttctcaagaatccaaaggcattcaggtgactgcccaagaattaaaaatcagccagcccagagagaggcaagtgcctcctaactcagcaagggacagcgggagaccttgccaacttctgattgatcgtcttcaattccctttctccaagatgtattcctgtccatggtctctccctggattttatgcagaaagctacttctgagaaatgagagggttttattagcatgcaggggccaaagtttagcctgaaggagagataccttcatcaataaaatcttttttgattaaattcagtcttttttcttgggtctgctcagagcttggaaaataagacgggtgtactttctaacttttatccccaatttgttccctgaggatttcaaggattctgttgccatcggggcactctgaaagaagaaaggaaggagtatgctttctttaacaagttgtctcttaacaaattcatacccaataattcaggcttggacattcactgtactcacctagcttggccaagtggctctgtattctatgttaactgtgatctataattttaaaagtagtcatgcatagcttatatagagaaccatcttttaaaaaatactctaaattttgttctaataaggagaaaagtgtatctacattgcatgtgatactgaaactagacaaattccttgtagccttttatctgacaacagctaaaaggcccaaattgaaggcaaagcaatgatgcaagtgaactatacaataagcacaattgtattcattttatttccaacattataataaggaccatatattattcactggtatatattctcttcactgtacagtgaaatatatgggaaaaaatcaagacccttctcttttaaacattagctctatatcagaaaggaaatggtctatatttattgattttctttgagggatctaggtaaatatcacagggctatgactgggtcctagtctccataccaccagtgatatggcttgtccaacatgacctttagaaagactcagagtttggctttgtgtttctcatctgtcttagtctgcttttgctgctttaacagaatacctgagactggaagatttataataaacagaaatttatttggctcatggttctggaggctgggaagtcccagatcaaggggcaagctgcatccagtgagggccttcttgctatgtcataacatggtgaaaggcatcacatagccagaagagagggtgagaagggctgagctagtgtttacaagaaacctactcccatgataacaacatcaattcattcatgacagcagggccctcataacctaatcacctcttcaagttcccatctgtcaatactgttgttctggggattacgtttctaacacataaactttggaaacacattcaaaccagagcaccatcctattctcagtaataccctttgtcttaatttttccctactaacctgggatgatattcaaagatattcaacaatgcttgggcactgaccaataaaaatgggactagacaccaggcatcaagaggcagtccagcctttctaattcatactgtctgacatccatccagtcccaattgtttcaaaggttctggtgataataggggccacctctcccaaatttgccttcttaactggattcctaaaaggacaagtcatgaatctctaatcataattctagcacacgtaccacaggccattaggaaaactatcctcagataaatgaagcctccccataccctcaaattacatcatgaaggtgagacccttagcatggtctctgactcactaggcaaccatggccaagtgatttgcattcttgagaaaaacttaccctccttataacagagaggaggatccctcaaagagatcctgaaagctcaagtaggagaagacactacaacgtggttggaatgcttcaaaagataatactttctaatcctaagacataattgctaataaatggtttcttttttacgtaaggtcaaagaatttttaataaatacagtctttggtgctcattaagaagacactaattcttcatgggttcataagcacacacataagaaaaatctgcagcaacagtacagtaataaatgtaaaatcctaatgagagaacatacattggctggaaaagggtattgttcttttcttccttcttttcttttgcgaatgatattgtaatgaattttcttcagaggacttattagtgtctgtttaatattatctctctctttcatgtgaaaactttccttagaatcttaggcaaagctttaggccttcaatgaagacgtcattaaaaaataatatctaagcagtgctcaaaatatcacattacaacaagttaacagcactgtcataggatatagagatgggatgatattaactatcagagattccagcctgatctatcagtaatttcattatttccaagtacgaaattaacttctttgagaggataaagcctgcagggctctggaggcctcttttgatctaagcagattattgccctgtggggactccatggtgggaattagatctgcgttcttggtggtgtccatagctggttctccattttctacattcctcatgttagaatggccataaatacggactgagcatcaatctgggactctttttcagattgcctagagggccaaacactggaaaagaaaagggctgcccgtgaaacttctggttcctgccttactgagggcttcaaggaaaggctgggtttagggttcctgaacactctgtgctgcctcggttcatttcctgttggggaagttctgaagttcatctgttacattcccaatgcttatgttaattcatatgcaaaatgggaacccgcttaactattgccttttattactctgaaatcagccaaaccagcttatgcatcttagcagtcttaaatcagcgtttcccaagtatgatctttgaaacactattaccaaaaagctgctcaaaagagagagagaaattataataaaaatatcatagttcaaagtactttggaaatgctgcttattatctctcttccgttagtttcacgtacaatgctaaggtcaaagaagttcttcaataaagaacagtatttaattttgcttagctgagcatttttcaatgttacttgccatagaatttccttcatttctcccccccaacactggctctcataatctgttatcattctgaagaacaaagagcacacactttgagaagagatggccctaagttaatcagcacactgcattaggtggctgctatcaattttgatttaattacacaagcatgcactcagcatttatgcaacgtaaggtcagaataagggttatgtactcctcaagggtaggttcccaaattggtgggatatgttccagcccctccaaggacttacacactttcctaagacctgaaaagctatggtttaaaaatagttgatcaatccttccagttgtccagctggggtcagttgccaactctggcgggcaaaatatcaggaaccaaggacacaaaatatgaggaaggcgtggcctcttccctcaaggaggctaccatggacaactaaccacaaaccaggaaaagcatgatatggaaaagggagtggtttattctgcatgaagggaaaaggaagattggtaaagacacaggctgctaagcggggctccagtgagaagaattcccattgctgggtagaagaggacagatgggtaagcaacctgagaaggactgaggctgcaaatgtgcagggcatggccgttctaagccagtcatccccccgacatcacagatgaaccaacaggacaaaaatttaagagttccatgatagaggaggcaaaccttagccaatttcttcacaccaggaagccactgtgcctatattctgaaccttgctgacggtaggtctggagtgggcctttgtgtctcccagcagcaggcatacataggagtcatctcttcgatgggcattcacatagggctaggtgtgcccttgctttataaaacatatgggttcttaaaaattggatattcctggatgtcttgtaagtaaaatcattttacatgaccatgaggagtgatccatttaaaggatccttgcagggaagactctggggaacaaggaatccacatgcactctgagatttctgtttagatttttcctgaagagctgcctcttaggggacttctgaatttaaagagacgttagaaagcagacatgatgaaactgcgttgtctccaaactaaaaacaaaaagatgaaagtaaacttaaaagctacagatgccattcgacaatgatttgatgtaaaataatagtccatctataactcaatttagccaagtccataccttctgagatccttgacttacctaaaggctctgtctaaatagtgaccctatatcatacaagttgaacaacaacaaaaggagaaactagcagatttttacatcatcgggagggacatagctggtcaaacaggcagtaaagtttgagcacaacaaagcgagctttgaacctcctaagcaaactgacaaattgcgctcaggagtccagttcccagcatcagcaccactttgccacaatggcttgtctcctatctctcctgcctaatggctttccatgccaaggagggcagtcagtgtgatgaaaataaccatcaacaaagcatttggtgattagtcgtctgcttttttaaatataatgcctgccagccaagattgataaattattttggtcattaacaatctatttaacaactgtaaatttaaagtgatcactttcctgaggcttagtgttatagaggttagggggtagaatctatttagccagagttaagagctggaaaattaagccagaacacgagaaacaagattacaaagtagtattcctcagtgagtgctgtgaagctatatggaatcaggctattaccaatggtgggggatatgtttaatcacctcttaaaggaaaaacaatcttaattaatgttgtatgtcataaaaatataatttagatggggatgggaaattgctaaagacgaaacccagagcaaagtgaagacttggttcaaaatgaaccacccacccatcaattataaaaatattgcccaacagcaaatcaaagaacatgctctttggtcatatttgggcagcctgaaaacactgatccttgaaaagcgttttcatactttatacaaaaaagataggaaatatttaaacttactttaaattagaattttaagtgccatatttaaaaagctgaattactcatagacacagtcaaagttaacacactatattttaaaactatatctaaaaaactcataaatatgtagtcagttgtgttggtcagtgaacaatattattatctttatgctgcaacatttggaccgaacatttcacctgactaaagtttggcattggtccacttgttttatttgatgcttataggacatccaaagggaaacatagcaaattgtttctgtagcctattcattagtagcacagagaaccaatcccagcttcaaggtgtcaactggtgttgcatcccaggccccatctaccagtagttcaataaggagcaagatggcaggaataagagggaaatgcatctcccttcagctttcaggttttagactactgtacatggctctttccaaacaagaagaaaagaatataacatgaactgattggtgcagtaaactaaactggatttatatgctctaatatggaaaaaagatccctagaactgatcctcaaaagcatctcccattaatggagaaataggagaatgtccccaagggtgaaagtctgggaccagcaatatggcaacattataagtgcgctgaacagcatttttgtaggaagtgtgttctaactgcctttgtaaaaggaaaaaggaaaataaaacaaagcagctggacaataccatttccactgattaaagttcaggggagcctgaaaagttacttatgagatatagttcaaccattttcccccttgctttcagatttacgtgatattaactcctatgcgtccacagcagccccatgatccgcctcagaggaattcagtgcctaatacttgactaggaagaaacattaggtattgatgggcaaagagttttcatctcaaatgcctctctgatcaactagcagtagctcttgttgaggagtccgaggccatatttaaactcagtggaaaacagcagcatgggaaattagcagtttggcatagagattaagaacatggattccagcagggagcagtggctcatgcctgtaaaataccagcactttgggcggccaaggcaggcagatcactttagaccagcctgggcaacatggcgaaaccctgcctctacaaaaaatagcctggtgtggtggtgcacgcctgtagtcctaattatttgggaggctgtggtaagaggatcacctcagcccagtaacgtcaaggctgcagtgagccatgatcataccactgtactccagcctgggcaacaaagtgagaccctttctcaaaaaacaaacaaacaaaatgatcatagattctaaatacatatggatgtttgaatcctggccctattccttaccagcataacaacataaccttatgaggttattatgaacattaaataaattaaggcaactttcacaatgtctagcacataatttacacttcataaacattagcatcataaccaggaggactaattgccattgttgctaattggcattgcagagtagagttgtggcttgtcttttgcccatcaggctatctgtgtttcagaatctgctcctcaactcaagtgtaaaacttacaagcagtggtggagtgggacaagtcaaatctacacagttctttatatgattgaatcagtgaactggatagactctaccaccaagatgtgatgtgttgcgatggtggttctgtagtatgtttggaccgtgaaagatcaaaaagtctttcaatgattcatattttcagggcattgcaaagtgatcaatttggtacattcttgacttaaaacaatcacttggacttctccaaacttcccagactgctaataacatgcaatcctacttctaaccaaagtgaataaagcatcaaaaggaaaccttggtttcatcccaagtgctaccagctgctttcacatattgaaagtttggctctaccactaacaggaaaggaaacactttcaaacctggcaggtgatgagaacagacttcagaacttggctacactgtcatcagacatcaggggctggaattagggcaggggttctcaactggtgacaattttgtcccacaggggacatttgacaatgtctggagacatttttggttgtcacaactgggtgggaggtgtttctggcatctagtgggtagaagcctgaatgctacaaaacatctcactatgcatactctcactccccaaactctgaatcttcgggtacaaaatgtcagtagtgccaagactgagaaatcctggattagcacggaacacagagcagtgtggactcattgctaaatgttttcctcactatactggaggctccaggtaagtaggaatcattgtatcttcagtgcctagcacagttcccagtacttagcaggggctatattaatttttgtggagtgaatgcactataatagcagatattaatgcaggtcagctaccatttttcttcacagcagagcaaatatttcttcaatattaaagtcagaaagcaaggtgaacagagaagacatatcagaacatgactttgcttatttgggcatctagcacatcagacacttccaataaatctgtcccacttccttcattccctatcttccctagagaagtaactgatgccacatccagaacctaacaataagttacgtcaacttgaccagcaccaacatatttctagaatccacttgcttctctccttccatgaagcctaagccaccatcatcaacatctctaatgagtcactttgcttttgctcttgacctctaacttccattctccacagagcaataaccatatgtcctgttaaaggcgttaatcagattacatccctcttgtgtttaaaacttgctaacatcctcacgggggcttaaaacatcttacaaagtctggcacctgctcaactctgcactacaatcatagcggtcatcttcctatttaaccaaattgtccaattcctttgcttctcagagcctctgcactggcctgggaatgctcttcatctagatccttacatggctggcactttcacataattcaggaagtggtttaaagtcaactcgtcagagaaattttttgactgcacagaatcttcacctgtgtagtcagacaagttttcttgtctttagattatgaggcacaatctgagagctttatttgctcatttacgcttgtacactggcatccctcccagactggagtgtcagcttcatgaaaacagagaacctgactgttttgttctctgctgtgtcccaagcaagcacagtgcctggcacaatgtaagaagtcaatacacatctgttgaatgaatagataactgaggaataaatcgatgaaataaacagttcatatacatgaactagtcagagaaaaaagaactcatctaaaagaaaatatgtgttaactgtcacttacaaaagagttgcctagaattttcaaattaaactccaaatagcatcctttatttaactgcgatcaattcaacataagactgaaaatcagaataatagagggtagttagtgttcatctagcaccaagagtaactcagaaattaaattaacagtttgttagtataaatctccctcgttctctttatgagtactaaattaaagttcatcctatatttttaaatctgttacaagcaaagagacaatgaaataatgaaagtataatgaaataattttactaattcttaatacataaccatagcaatgattttgtaagtttccaaatatggttcagcagtgtggaccagcatggcatgaaaataaatttaagtgtgttttccttttataatttttattactgtgaaagaaaataattaaggtatttaatattcacaagcagtatcagaggcaagaatacgagtatgacattactgacgaaatctggaacataacgcaagtgtaatgttgctttttttggaccacgtgatatatctgaatgcaacaaggaaagaagccagaaacatgttagcaacgattgggagggtgagttgatggtagcatgtagagtcaagcaaagtcagaggctgtgacaaaccatgctgaattagcacatgcagttcctcttggtctgcctcccacccacctttccaactgcagttcttatcactccaacaacatccccaaaacttgcagggttctaaagtttatatagtcttggggtatctgtgtccttatttacaccacagctgagtctaaaagaactttctgcaatgatggaaatgatctaattctgcactgtctattgcttctgtatcgagaaactgaattttgcaaagcatttaatgttaattaacttaaatttagccacaggctgccaaattgcacagcacagctctagacaccctccctatagtctgcaaactcctgctcgtccttcaagacccaattcaaatgtctcttcctccagaatccccttcctcttcctgttccctaaatagcaggtttcatggctttaatgataaccatttatcacattctattacaatcattttatggtatgttggtccttccaactacatcaagaatctctcaaggggacagactctgcctgactcatctctaaatactcagttccgtgcttggcacatgagaattatttgataaatacttgttggatgctcaagtgaaataatgaagccatctttagacatgaacaaatataagcacagcttaccagaaaagttcttcccaggggaaggtttactccatttatataagaagctgcaaaccagatatagcttgagcatccctaatctgaaaatctgaaatgctccaaatgctccaaaatctgaaactttttttttcttttttttttttgagagggaatctcaccctgttgcccaggctggagtgcagtggcgcgatctcggctcactgcaagctccgcctcccgggttcacgccattctcctgcctcagcctcccgagtagctgggactacaggcacccgccaccacgcctggctaattttttgtattttttagtagagacggggtttcgccgtgttagccaggatggtctcgatctcctgaacttgtgatctgcccgccttggcctcccaaagtgctgggattacaggcatcagccacggtgcccagcccaaaatctgaaactttttgagcaccgacatgatgccacaactggaaaattccacatgtagtgttatgatgggtcacagtaaaaatgcagttaaaactctgtttcatggacaaagttatttaaaatattacatacaattatcttcaggctatttgtacgaggtccatataagacataaacaaattttgtgtttagacttgggtcccattcccaagatatctcactatgtatacgcaaatatttcccaatccaaaaaaaatctgacaactgaaccacttctaggcccaagcatttcagataaggggcagtcaatatgtatgaccttcagatttgatagtatttcaccatatttgtatatatgtgtgcgtgtgtatgtttgtgtgtgtgtgtgtgtgtgtgtgtgtgtgtgtatttggtagacactgcttaccaatgttaaaaacagatttccaacatttcttgaaacaaatattagatctggcaattttagtcccatatttgggcttggcaacaatgaactagaatgtaacaagcagctgcatcatttagataataaatatcctctacagaatctttttttttcttctttttttggtacttttagtccactgttgtcatttatggtctctgtctttctcctgcagccatgtgaccttacaacaccagacaatgaatgaagagacagaaatttcaagttcagacattgatttctcaccgacattagtaaaataacaacagtgacaataatagctgcaaaaacaacaataataatggctggtagtatttattgaacatgacatgccaggtattatactaggcaattaatagacattgtcagatagaatcctcctccatgacctagaaaacagccttagcttcattttatcaatgaggatagtgagatgctaaggggcaagctgaaaacaaacagaaaggtcttcccctagtctgcccaccatcagagtcctcactgccatctcttcattacaaggcgacatccctcttcactcctccatgttcctcccagcctggatttagacccagagcacaagacaaagtgggaccttgggcaactgacataacctttctgcattttgctcctccactcacaatggacttcagaaataagagctgacattacctccagggtcacatgcgggcacatgagatgatgtaggtcaaacactgaacttctcagacacttttcacaaatggaaaatgatctcatctgagcaggcagagaatggctggacaaaggctgacacatctggagtagggaggcatggaaaggactgaactctcttaaggtaaataatggccttgtggcttttgctagcacccaccctcaaggagccctcatctagggagagcatgtctttgtggaactaatacaaatttggctccatgaggcttgcctagcttcgtgccagttaggtgatattgaaaggatgcaagtcaatggaaggtttaagaatcagctattgtaggccaggcgcagtggctcacacctataatcctagcagtttgggaggccgaggcggacggattgcctgagctcaggagttcgagaccagcctgggcaatatggcgaaaccccgtctgtactaaaatacaaaaaaacaaaaaaaaaattagctgggtatggcagcatacgcctgtagtcccagctactcaggaggctgaggcaggagaactgcttgaacccgggaggcggaggttgcagtgagccatgatggtgccactgcactccagcctgggtgagaaagcaagtctccttctcaaaaaacaaaaacaaaaaaaagaatcagctattgcaggcctagcactctgccaggccaggagttggcaaacgttttctataaaggtccagatactaaatattttaggctttgccggccataggtaaacaaatgagtatggccatgttccagtaaaactttacttacaaaactaggccagggcccacaggtatcgtttgcccacaacccctgtgctaggcaccatggaggcagagcagaggctcttcacagtcatccggcacaatcaccaggggcaaagcatgaagcagcctgttggattccccactctggtagccacagtcctctgaggtaaaggcctggacagcaagaatgacttaagcaacagactttcttggtggctccagccccagactcaccccacagggcatgaggagagtgagcctctctttcccatgaatggttcctcccagcagttgtgcaggcctgtccgcagaacaggtgaggctacatggccttcaaccacgtgatgtattggctcctctgactaaatcaaagtccacagatgataggcctacaatatccaagaagttgccaaacaaagatgcttaaattgatacagacaaaactaaatacctctccttcccttgtgcctgctttgactcccctagatgccatccctggtgccacttcacactgagctatctccttgcacttgaatcccccatgtctcattaccatgtgtatatcccaagacggggtggctcctgttgtaggccacatatgtttggttgttgtttgttttttttgagatggagtttcactctgttgcccaggctggagtgcagtggtgcgatctcagctcactgcaagctccgcctcccaggttgaagcaattctcctacgtcagcctcctgagtaactgtgattacaggcacccaccaccatgcttggctactttttgtatttttggtatagacggggtttcaccatgttggccaagctggtctcgaactcctgacctcaaaggacccacctgcctcagcctcccaaagttctgggattacagacgtgagccactgcgcccggccaggccacactgtttaaaatctatgcagtccttctttgatatgataaccttggggttgtttatatttcttccaagtgtatgaccaacaggatgcagagaagcaaaagttttcttactgttttgtctgttaacgtaacctcccattgtctttatgcttttgtttctgttctcatttaatcctgttttccttcacaggattaagtctgctcatttctaaactattgtctgaactttaatattctaacatgtcttagtgtcatgtttactcttcactgtttgactttctgagtgaaatagtgaagaatatgagagtggaaaaggtatttggaaagattctaggttttaaaatttcagctttagttgatccttcctacctgtgggaccttgggtaaatgagtgaataatctgaacttgaattgcttcacctgcaagacaaaggtaagtatgccaatctcgggagaggtatcatgaggattacgagttaaacatggaaaattcctcttccaactcaataataaaaacacaaaaaatccaacttatatgggcacagaatctgaatagacattcctccaaagaagctatacaaatgaccaaggggcatgtgggaagatgctcaatattagctatcagggatgcctcacccaaacaaaaggacaatgagataccacttcatgcttattgcttattcggatgactataataaaaagttacaaaataacaagtactagtgaaggtatgaagaaactagaatcttcttacactattggtaagaatgtaaaatggcaacgctgctttgaaaatggtctggaagtaccttcaaaaattaaacatagggttaccttatgacccagaaattctattcctagttatataccctagagaaatgaaaacatatatccacacaaacacttgtaatattaacagcagcattcacagaacgattattcataagaagcaaaaagtagaaacaactcaactgtctatcaaatgatgaacagataagtaaaatatggcctagccatacaatggaatattatttagcaataaaaagaagtttgtgaagagcaaagaaaacaagcaacatagtgaagagacaatttacaaaatgggagagcatatttggaaaccatatatcagacaggggattaaattccaaaatacataagaaacccattcaactcaatagtaccctcccctgtaaaataacccaattaaaaaatgagcaacggacccgcatggatatttttccgaaggggacatacaaatagccaacaggtttataaaaaatgtgaaatatcactaatcttcagggaaatggaaataaaaaccacagtgaggtatcatctcacacgtgttaggatggccattatcaaaaagtcaaaagataacaagtattgctgagggtgtgtagaaaagggaacccttcttggtagaaatgtaaacttgtacagccattatggaaaagagtacagagtttcctcaaaaattaaaaatagaataccatatgatctagtaatcccactcctggatatagaaccaaaggaactgaaatcccccatccaaaagagatatctccactcacatgttcatcgtagcattattcaaaaccaccaagacatggcatcaacctaagtatccactgacagataaatacagacatgcgatgtatatatcaataatggaatacgatttactctttaaaaagaaggaaagaaaatcctgccattcgcaaaaacatgataaaactagaagacattatgccaagtggaataagccagacacagaaagaaaactactgcatgatcttacttagatgtgtaacctaaaatattcaaactgttagaaacagagcatggaatagtagttaccaagggccaggcatgggggaaatgggaataatctggtcaagggtacaaactttcagttataagataagtaagtgctggcactctaatgtctggcatggtgactaaggctaatgataatatattgtatacttgaaatttgctgagagagtagatctttactgctctcaccatgcacacacacaaaaggtaactacgtgaggtaaaggatatgttaattagcttggttgtggtaaccatatcacaatgtatacgtatgttaaatcatcacacagtatatcttaaatatatataatttttgtgaatcataccttaatcaagctgtaaaaaaagaaatgaagtgcggatacatgccaaaagatgggtgacccttgaaaactttatggtaaatggaaaagacagtggcacacaccaccacataatgtatgatgccatttatatgaaatgtccataacaggcaaatagagacagaaagtagattagtagtttccagggttatggaaggggaggaatggggagtgacagctaataggcacagggtttcttttgggggtgatgaaattattctggaattagattgtagtgacagttacacaactctgaatatacctgaaatcactgaattgtacattttaaatgggtgaactgtatggtattttaattgtatctaaataaagctgttactatatggaaagttcttagcttcatgtctgagacaaaggaagaaataaaaatggtcactacggttatcattcattcacctgcattttaaaaatgcagtcggtttttctagagacttttcacccctgttattctgagaattaaaatactcaaacatatgtgtggtgaggtctagaagaggaggattattgtagcctggagtagttagaaaagccctcgagaagtttaaacagaataaaggaggaggcaaaggagaaatcaccaaaggcagcaatctgaaagtgaaaaggtgggaataatttggttccctgtgagagccataaggaggcaattcgattaagcaaatggctcatgaatgcaagggataagttgaagagaaggcaaagttagatttccaagggtcttggaagcataggccaagatgtttgggcttcctccagctttggaatgtcaggaactgaatttaaggaaagccatcctgccagtttatgtggtacaaaagggactggctgaaatcagaacccaggaagtatgagttagttagggcctgaagaaagataataagaatggaaataggaaagaaatagcacaaaatagtggctacttctttttttttctcccccacacccccccgcccccggacagccagttgttctaaaggggctatttctttatgataaaggtgacagaatacagaagaaaaaaaatctcccttcctccttcatcaacacctaacaaaaggaacaataataaccataaaatcatggttaaaaaaaaaaaagggaaatttaccagtaagctctaaataaggaattaagcacaaacttgtgccataaaattcaaaagaggaaactaattaaaaaaaaaaaaaggaaggcaggaaggagcgagggaaggtgaaaaagcaaataggagatgattttcatgcaatttgaagttgcatcaaaatcttccacctcaactgtcagaaacagattggagaaagtatttgagttgacaaaattatgggatttcccttcaatattccccacaatcaggagacaagtagactgaagtcatgattttgatgtaggatttttcttctcagtcactttgcaagctgggaacccctggccagtgatgcccgtaccaggccttgcttggccatgctggtgtgctccagcttcttgtgttatagcttgtacccgtgtttggtggttccctgagctcttgtaccatgcccaagaagaatgaggatacactggacattgaagggtgaggagggcagggaagaattttactgagtgacgaaaacagtttttagcgaagaggggatatggatttggtctccctacctgaaggtgagaaagttcccctgtgtggctgggcctggggccttttccagacttagaatgggaagtgcctgctgatttgtttgtgagtctgcaaataagtctaaagcaaagacaccactcaaaggtgggcacaacagtgtagaaaaccaattaggaaagcgcaggtatatgtaaaacaggtgaagggtggggaccaatcagaggagagcttaccaaacagaaagggaaattctcaatccagtctgaggatttaacttgtagcttggctttcaggctttaaactctcttccacttgaggtggggtttcactggggacccacccctatctgcctaggcatttgcctgcctcctgttgctatcaatttggaaaccttggtgaagccccagaaaaccctggggagtacaatcccagaacttcagcccagccaagaatagcaataattatgacaggggcttggcaggaaaaaagaattgatagaactagagaatgacagcatacagaggacgaacttcaagaataaactggagatgacccaaagtttctagcctggatttttcagaatgggggtgataccagtaagaccaggggtcagaataggggaacattttatggtagaagggcatgcactctgttatcagataaattaagtttgagcaactcatcccttgaattcgtatgtctgtataaacctaacctagtgcctctcacgtagtaagccttttataggtgtgtgcaggagggatgaggcatataaaatttaattaaatatgaacaaatgatggtaacaataaactcagattttaaaaaatggttttgtttcaaccactgtggagtcaatagactctatgagacttaaaaattttttaattttaagctgtctcttagatattataaagccacagtgagtcatcttgcacttaaaatccagaaaagcctataaaagaatagaaaacccgaatacgtaacttcctcctgtgacagaagaacaaaaacgtcaacgttcacagcttaaagacatttagcacctcaaaaagatgtatcataggtaagtttctatacttgaatgatattatataatcataatgcattggaaattaagtcaatttacaaaaaaaacccctcagaaatgcaaataacagtgctttgtaaaactgtatggcctgttttctggaaggtactgtgtgattctgggactggacttttcattaaaaagataagagattcaggcatcagacatgttcaattattggctccctaatgaagttcactatcctgtctaatggatctttccttttcaaaagaccccttcctccttgtgtattctggcattgcgtgtctctggcatttgctctatgagaataactggacagtacaatgctcttgaatacagagagctggagcttgaatggacaccatagccccaaggacatgaaaactattttttgattgtgtgtgtgtttataaaacttcttgcataaaatcagtctttgtaatttcctagacttcaagggcattcttttcaagttggggcttcttaatgtggcccttaaaaatcctaaaattaaatgcatttttaagctatctgtgtaaatatattaaaaatttccctcattaggaagttgccagtttatggcaaagctttcagaggagtctgtaacacaaagtggatccagaaccacagcatgtagacccctaaaaattaaaaacattgaaacctatttagcaaatctgcatgaaatgagccaaattcatactgcttctgtggagttggttcctggaaatctaggcatttagtggtggagttacagatggatctcaatggcctgcgtgattttcccagcctattgttttcgtatctgattaattattctcttaaaatttccatccataaaaaatttccaaagatattaggatctctcttcacatagtctttccttcttttgaatgatgctattgttgtcactttgaaaactgtaaatagcattcaagatgatatttaagtttgtgccaacatttagtggaaatgtctaagttttgaaatagtagggagctcacattccatctggtgtgttttcattttatctcctattctcagtgaattttaaaagtcagctgcagtgtcaataccctttctgctatgctaatgtgacctccacgtggaaatcaaaggaaaggagttctcagggcaagtgattctttctcaattgaactatttagtgtcatagaatcacaaagtatcagagctgaaagcaggcttacaggtgaccatgatgaatacctctcagtttgaagggaaactgagcctcaggcagagggaactgcccatagtctcattagccacagggacaggagttgaacctcgataggaagcctttctgatggccccatatcaggtggtcacttccttccccacacttccatggccctttatcagagaccaccatcccatgttacttagcggtttcaactttgtagcacagttactgtcactaatttcttacccatgtgtagcaggctaatatttcaaagtaatcactggtgtgccatttccttcctgaccatctcttggctaaagggaagtgcatctattgcttagcagtagtctccttcactcaccagcttagcctttaattcaaaaggcgctgccccagtgtgagagagaaatgattcatgcagggataaggacacagaagagttctaactgcccacccccagagtttaaaatagagtttcaagctggataatggacagagtcaagagagataaagcaagaaagagtgcatgtgtacatgagtgggcacgtgcatgcatgtgtgtgcatgtgtgcactggggcagggtgtgctctacccttgccttttccccaacccccaggctgaatcctgaggttgggtaatatatgagttttctatttgctactataacaaatttccacaaactcagtggcttaaaacaacacaaatgtattatcttacagcactggaggtcagatgtccaaaatgggtgtaatgggttaaaattcaggtgttggccagtctgcattcctttttggaggctctttgccttttccagcttctagaggctgcctgaattccctggcttatggctcaattccatctttaaggccattgatggccagttgaatctttctcatattgcatcactctgacactacttattttgcctctctcttccacctctgtgattatattgagtccacttggataatccaaggtcatctccttatcttaaagttggctgactagcctctaattgaatcttctactttaattctcttttaccatctaacatatttacaggttctgaaagattggtacataggcaccatttgggaggctattatttggtcttccacagctgactcactgcaagccatccctttgaatttgagactctaagagtagattgaatgtgcattcagctttttccatccagaattctggtagtacacagctttgcaaagagaataatgaaggactatagcagcaacatgaatgtctgctggaggcacctaatttcctgcaggtcttagcaaagtatgtaagaacagacaagttttttttgagcccatgagaagaactctgacaagctggcaaaggccaaagagtaagtgtccttcatgtgcttgtgacaagagactatgtcaggaccatggacacctctaggaatgtaggaggccaaaggtcaccatcctgcaaagaatgatggcattccttacgggtatcagaatggaccaaagatgcacacaaggaccaggcaaagtggattacttggacaccagaggccaaggaaacaacagccaaggacaacagaatccctgcctaccccacacgacatgttgctcattaaggccccagaatacagaatctgaattgagagattataagccagaatatgactgaatgaattacaggcctgaactgacagaaacggcactgaacttgctgagcaaaacctggcccagggctgatgagatggtttgctttcacagccagaaattcaactgaactttgggagtcaagaacatttcattttttaatagtccaactggtgactgtgaaagtaatcattgttatacttggcactcaaatgaacctcagacacagcaagagttgacttggtgattgagaagaaactggagacaagacaaaacaaatgggaatataaaactgtagactatcacatcagcacaactggctagtttatttttatttatttatattcctttttatttttttgagacagagtctcgctctgtcacccaggatggaatgcagtggcacagtctcggctcagtgcaaactccacctgccgtgttcaaacaattctcctgcctcagcctcctgagtagctggcactataggcacgcaccatcgacccagctaattttttgtatttttagtagagatgaggcttcaccatgctggccaggctgatctggaactcctgatctcatgatccgcctgccttggcctcccaaagggctgggattactcgcatgagccactgcgcccggccctactttttatttttttaggtggagtctggctctgtcacccaggctagaatgcagtggcatgatctcagctcactgcaacctcctcctctggggttcaagtgattctcctgcctcagcctcctgtgtacatgcgattatgggcacgcaccaccacacctggctaatttttgtatttttagtagagacggggtttcaccacgttggccaggctggtctcaaactcctgacctcaagtgatccgtccgcctctatcccagggagtatctttatttttttttctaacaagtcaaagagtagaaataccaaaaaagtcacctctttgggtgtttcagctacttagctagctcacacacacatgtatttcccatgaggttttgatcaaaactaaagtcaatttttttcactaggttcaccaaacaactgccagtaaatattggcttctgccaatgaatgaaaaagaacacaggatgtctgctcttaaaaagtgacccctgatgtttccttcacattatcaaattattgcatactcattatattatgtttgggaaatgcaagagaatatgaagaaaggaacaggagtgtaacattctatttgaagctacaatctctcttaatttcaaggtacatgtgcttccattccattctccatttatatgccactctttccattcaatattatatcccaatgtattttttcccagtgaatttagaaagcttattttgccaaggctgaggaggtgcacctgtgacacagcctcaggaggttctgaggacatgtgcccaaggtgatcagagcacagtttggttttatacattttagggagacatgaggcatcaatcaacatacataagatgagcaatggttcattctggaaagatgggacaacttgaagcaaaggcaagaagactctaagtggggagggagcttccagggcataggtagataggagacacatggttgcattcttctgagtttctgactagcctctccaaaggaggcaatcagatatgcatttatctcagtgagcagaggggtgacttttaatagaatgggaggcaggttgcccctaagcagctcccagcttgacttttccctgtagcttagtgatttgggggccccaagatttcctttcacatttcccccccttctctttgaaaaaatcttttggaggaagcattttagaagaaaatgagtctctggtctcaggttttgtctcatctctcatggctaggatggcttattcctagatgggtaggtcttgagttattaggtatgttcatttttagcaggttgtaagtctcatgttctataaagaaaaaatagggggaggaaggaaaaaacaacaacaacaaacaaaagaacaagcctgtaaaatccatataggccatattactctgaagtccatacatcagtaggcaggtatgaaagtggcttatgtatgtaaataggttgctgttatctttttctgaagtttccgttgtctagcttcagttcacttggctttacgaaagcacagcttagtttttggtgactccaaattaggaaagatgggaaaaaaaagaaggaaaaaaaattgaaaacattgttttgcagacttgtagcccagaaaaattagaattcattccaaaccacagaaaataataaaaacaggcaagactagaatctaacaacaggtatactacagtttttgaaatataacttttctctctccagtttcccatttttactaatgataaatcatggtaggactaatttgctttattattcttggtctgattatttgtgtacagtgttatatcattaatattattcataaaaactcatttgatggctacatagatgaatatatagtattaaatatattcctctattatttggcatttaaattgtttcccaggtttagatttttcaaattaattagatcagttgtccaagttttatagacacacactcacacacactctgatgtaaactggaaccataatgcaggtaagagcattttgaacgtagaggggatgacacagaaatgcctggtattctctgggttgggtgtagacacagttccatacatgaaggtgtgtgttgaccagcctattttggattgtctatcttggagagtactggtgggccttttaggggagcaatttatcaagctaattttcagggagattccagaaacgggtacaggggacagagctggccttggtgatttgattctggagttacccacaaagttccactgtgcctctagactaagcctcatattccagctttaaaatcccattcttttctcagcaggctttgttggtttgaaaaaataccttggcatctcaggaaggacaacaatttgaactactattgtaataactgaggtaaaagttctttctcagggggaggttttgacaggaggcaggcagtgcccaagaagtggggagacttgcagctgataaaggaaagccacggacctgaggattcggagaaccaggctttgaatgcagggggctggggaagtgccaggttcagctcaacagtcatttcttgacaacctactctattatgaagtggtattttttgggtgccgggaggcagagacgatgaagatgagtaagatgcctctggtagttcataaaggcagcagagagaaaagaacccagactctggagccagacagcctaagtatgaatctcaggtctgtttcttactctctctgtgtcctcagaaaagttttcaagtctgcctatgcctccgtttctacacatgatggagataaatgtaccttaatgcccaaatgagcacttcattgtatctactaactcatcagtatgctaatgtcattatcatatcacagtctccctccacatttgaggtatctccaactaatgaaaattttgtttccagcctctttcaaggagtccaattcagccttatcccagatcaccaatagatgaaactagcccaatgccccagggaaagaaggtaaatggtagacaccgcatgtggatggaaaataatttaggaaaacaagtgcagttgtttattccaggtcacgaaaaggaaattcagcctcagtcttcaatatcaactgatagggtcaagattaccagagaagccagctgaaatttcatatatagatttgacctaaatgtgcaatgtcctttcaataactctgaagagcttactaagagaaacaattttttagagtcgctaaaaggaaattcagcctcagtcttcatatcaactgatagggccaagattaacagagaagccagtgaaatttcatatatagatttgacctaactgtgcaatgttctttcaataactctgaagagcttactagaagaaacaattttttagagggaaaatatatgttggagcaaggttacatttccgtgcaaagggaatattctatgagttccttagttaccactaatgtaagaaggatttccagcaggtactggtgcaactggcctacaagatatttatggtccattaagagttgtaagcaagactgtttctttttcagaaaaaaagcaattttctcttaaatattttagtgtgttatgacatgaatacactatagggcaagcaaaagtatttaagtggttcagcacacaaaaccagctccaaaaggatgaccttgggaattttagaagcttggctagagcatgttgatgacttccttgtgtttaacaaaaactataaaaaggagttataataaagtacctagatggggactactgggccatatcctaaaagcagagaaaattcctgactttgtaaaatgtcatttctttcactgtaagtctaaattactggtagtgtgtctaggacttataaatttattggaaatccagtgtgtgtgttgtgtgtcgtgtgtgggtgtgtgtgtaaatgtctctaaggttgaacagggatatgaaaaccatttgggatttagtactggaagtcccagtgtctaagaaaatcgcttttctccctatacatgggttttccataaaattgaaggataatattttccttaggctaaagcaaagggtgatagaaacagggacggctttgtagtcaaacagactttgatataaacaagctttgccatgagctggttatgaggttttgacatagatatttactctctgcaaatttagtttcaattcaatggtatgaatgatatgcttggcacctagcagacagtccagcccaatgtgtattctcattgacagtaataatttgattattattctcaaatattacatttatttaaaatagatgtattactagtctcagtgtattctcaatgacaataataattgtattatattattatttttcattagtgctctccctaggagcaaagactgcgaactatagttgtttatgaccactaaccttacactagaagcccagtatgattgggtatttttcccccattttaaatatgggaaacataagatactgagatttaaatagcaagttaaacattaaacagtttgcaataaaccactatgttgactcaaggtggagagaatttagagctacacaggtataccagctatttcttgatttccttgattagaaagaaaatctggcatcattcaaattcctattctaaatctggggaaggtcataacagtctccacaaacagctgcttgccagtaagctgaagcagtttgaaagcattctagagcaaaaccatccagaagaaatctaatgcatgatacatatgttattaaaagtgtttggtagcaacaccaaaacaagtacaaagaaacaggtgaaattaattttagtgatataatttttaactcaacattaccaaaatattatttcaacatgtaactattataaaacattattaatgagatatttactttttttttggtagaaggctttgaaatccaaactggattttacatttacaacgcatctcaattcagactggtcacaggtggctagctgctaccaaattgaacattaatggtagacgtcaccccgcagtgacaaaaatataaccacatttgaacactcaagccgggattctaaacatcaggctatgtttccaggactctatgtctccaaaagcaggcaacttggaggccttaggattccttcctgctggcatgtggcacatgaatgaaccttgctccaagctaagaggttacgggatttatttatacaggttgtttgaattacgtgtatcattcttttgtctaaagaatgacaggtgataatttaaaaataaaaacatttacaaatgctttgggactttaaaattgtattaatttttatcttctgtttccccctaattcttgcttattttgattttcttcattaaaagagagataaagttaaatgtttgggggcttttcactttggggccattataatttatattgagggaatcgtgtcaatgcttaattcatatctgttttatctttacctagtttatccatttctgatcataatttatttttccaatagtctttttttttttctatccttaatccctatactctcatttctctaagtaaaatagatttggaaaaactactgaggtcttggtagtttgctttagcaggttaactccaaacttatcaaaactttttggacaattttaagtgactgtttattaatagctatgtcaagaaccttgaatgtaaacctaagatttttttaaacactgaaacagcccattattcaagcactgtagttaaacttaggtttcattgcagcagccactgtgagactgagagcagaactgtgagaagcaggtaggaagacagatggactccagcaacaaggacacctcggaggaggcattttcctccttcaccggcaagcaccttagagctttctgatggaatgtatctggttggagcgagaattcactgtggagggcagataggactctgcacaagaaagcctgattcgtgaaataatgagagaggaccacatggagtggtttgatagagtggatttactatggatgctatggatagagtgacacgtgattaaatttttcttatttctcactaacatgcgattgaacgtattcaaacaacataggagagcaattttgggaaactaatctagggtggcttacctcaaagcaaactctaggaaaaagccatggcatcctttgccttgaagctcaacctgtagatacctgcatcctcctcatcaagcactcttcagccttctttcattacttttcctctttagtgtccaatgacttcatgatcttccttggaggctccagctcaccatcactaccattatagccctccatgcttctcaacattcctcatttgctcagctctagcctgggctgggcacagtggctcatgcctataatcccagtactttgggaggccaagccaggaggattgcttgaggctaggagtttgagaccagcctggacaacattgcgagacctgtctctacaaaagcattagccaggtgtggtggtatgtgcctgtagtcctagccactcaggaggctgaggcaggaggatcacttgagacccggggtttgaggctgtagtgagctatgattgggccactgctggccagcctgggcaacaaagtgagaccctgtctcttagggaaaaaaaaaaaaaagagttaataaaatgactaacctgaatcatatattgtgacagttaatattgagtgtcaacttgattggactgaaggatgcaaagtattgttactgggtgtgtctatgaggatattgccaaaggagattaacatttgagtcagtggactgggagaggcagacccaccctcaatcttggtgggcaccatctaatcagccgtcagcatggctagaataaagcaggcagaaagtggaaagagctgacttgctgagttttccggccttcatctttcccctgtgctggattcttcctgccctcgaacatcggactccaagtttttcagcttatggtctcttggacttataccagtggtttgccaggggctctcgggccttcagcaacagactgaaggctgcaccgtcagcttccctacttttgagattttgggactcggactggcttccttgctcctccgcttgcagatggcctattgtggggcttcaccttgtgatcatgtaagtcaatactccttaataaactctccttcatatatacatctatcctactagttctgtcctgctagagaacactaatacatatattatctgaatatttgtttctgtgagaaaaatgggcacaaataacttttaaccagataaatgcttttctgctaattttgtgtctctcttttgaggaacatagagatttagctcagtaataatctgacataggatagggtaaaccagatgcttacccagctttctcattactaaaataggtagtcaaagagcattcatagatacagagggagcatttgaggtcataggtcattaaattagcattactatatgcttatttgttagttttatcacatctggttctttgaataaaaagtctccattaatttagaagaacatatcaagttgttatcttattctgagtgagagacaccaaagttttcattccaaaattctgaaatacccagaaacttaccactcagtgggaggacatcagtaaacccagaagacaaaaagctaattaactgtctcactgaaacattccttcctttttgaaaagtcaactagggacccatggactctgagcccattgtcaaatgccgtgtgaaagagatccaagttcaacaacaaatatcatcagcaatataatggttctctccagccctcagggccaaatggcctgcattttagcaagttgattttgctcatgaattgtgttaagccaagcaattgtttcccatgacatgcttgaacccacagttgctttgtctatgaaattcatggttgaatttgtccaattgctgattgctattcccacttgctttagtaatagtcacttccttcatcagtaatgggttttatatacagtgcacagtcacaaccattcaatgtcacccataagcatttgatgaattgtccaatacagttatgagagttggttatttgggatacagctagggtaagtcttactgagttaatgaaatgatatgacattaggccatgggtgtttcctcccccacattggctatacacactcttttatctaaggacgcatttgggtcattaccataatcttcatcaacttgtcaagataatgaagggcccattgagttcagggaaggcttggcataattcatgaaaatttaaagaacatagatgtagaaagagtttgggagctacagataaataagatctgcatagacaaccacaaaggaagagcttcagcagacaatctgctttggaagggggagagtttgagctcagttttgagacagaagagaggctcatactctgaaatgtctaagacatactgctggaggaacagaaggtgaaaacaaacttagagatgataatcaagattggaaagaaaggaagagtagctctcgagcctgctttcagcaaatcctacatctgtatttgttatagccaccacacaaatctaggtttggtgggagggggcaagttagttatcaacttcgacatgtgcctatcagacttgcttagcaatcagacaaggtttataattgcttccgctaacctttccagagtaccacaatttgtagccttctgcacactgatttctgaccaaaggattctgttccatcaatgccccattaaattcacctcagatggctgatggcaccatgtcgaagtctcacccagtgtggctatgagttagtgaattgaccgtctgaagagcaatatatagtctccttttaaattatgttagaactagcagagaatttcaggttcttctagttcaacaccttgtttttttttaaatgtgttcattcattttcaaatattcactgaaggtccaccctaggccagattagatccctgccctaaagactgtaacacataattgggggatgcaggtattgaataataaagtaataaattatgtcaagtgtgggaggtgttaagaaggaaataggtatggcgatatagtagagttactctagaggggacagaggattaactattacagatgaaatcagagaacagtgaaaaggaccctttgaggaggttctgcacatgtatcccagaacttgaagttaaaaaacaaaaaaaactcacctggggccagagcactgtaaatgaataggcagggagattaaacagatgtttcagttaaacagcatgcccagtataccagacagaagatcctggggaatagtaatctttgagtagcagagagaagaggagcagcccatgaaataggcaaggatcttaaactccaatgccttcaggagctatgcatgcaccattagccagtgaagcaagcctaggtagaaggcagtcgtggcaactgtataggcctagagaatgagcaatatgcctaacagcattcaaactcattaaaaaatactttacagtcacaataaagcaaatcaccaaaaatactttgcaggcaaaaataaaacacatgtgaagaggcaagcaaagcccaaggaccatcaatatgcaatgctgagctgcaggaaaagcaggaagtaggctgggaatgagaaaaaaataaatacagtgtggtttcctctaagttaaaaagaaaaggttttaccttttatttccatgaacttaacaatgaaaacaatatgtttcactaggcagtcacccaaacattgcaatactgatcacaaaaaaccccccactatttgttacagaacttgtaaaacctgaaaatggcggtaatgatcaaatgggtcaaatgtgtaaagagaggcaccacaaatccaagtggcccatgcactgaccaaatgtagatatcctcttgaagaattgtggccatgtgctctgtgcttgagtgaatccagggatgggaagctcacccccttggaaggcactctttaagtgttcattttttttcactttgacccgttattatggagagctaatgatatctgccactttgtagtccgatactcacagatctgccctctggagccacatagaatgtatttaatatctttccacctgccagcccttcagatatttggaaacagtgactctgttactatcttccctctacaagtcttcctttttccaggcaaaacattcccaccatcaattagtctccaaatctgttttcagacccaaccacctttcttatgaaccttcttatttgtcactaaccatcttaaaacagtgcctagaaagaacacaatgttcctagccaatttatactctggggcttctttaggcataattttctatgtctgcagcagtagaaatacaattacattttatggagctcagtctcctgctgttcctgtttcctacctcccaccctccaaggcagtctgtttgttgaatgtcctgaacagatgcataatctagagcaagtgctcccatcaatataaagaatgccatccctcatcactccatcgcttctgattaagatcatttggtctaatgtacattaagttctattccaataatgcctgtgcggtactgcatgcttttcatgcctctttctggacactgtgttattagatactcagcctggagaaacatttccatacaaagaggaagataaaactgagaatgaatggttaaaggcaaagagaaaattgggaatctcacccttggaaagaatggtagatgggaacatccaatgacctggctttgaatctggttctctatttactaaccattgctacttaaagaaaaatagtaataataacagtaagaacagaaactactatctattaacaaattcttggtaagtaccaagccctgaaataagcctttcaggctacaatatcatatggttagtagatgccactgggatttgaacttacttctgcctgtttctagacttcaatctctacatagtcttgtaccacaatttcccttagtggatactgtctatactacatatgacttataccactgatttttaaaaaaagaaaaactctcacagtaattacttctcctgagatgatcctccaaaatgtgggaagtagaaacatgtgttttcttttctgtggggccatcagagcatgcagacaagggcaaaggaataagacaggagagagaggccatacaccaaccacagcactgtacattgtgtcttgaactgggctgaaaagtaaccatgcagcttcattttaagcacagttggaacatcgacaagatttcaaggtgactgttcagcctaaggaaacagtgttttcaagcacttttatgctactttagcagtatttactagtatataattcacgtgctaatttattcattaaaacagtcgtatttggcaacattaaccttagtttacattagtgagattggtatttgtattttaattacatctctttataattactctataattctgattttcttccaatgtgaactaagcccttatcaatccccaaactgcattccacatccaacgaaaatgagttcaaattatagttttacagaaaatggctttgtaaaacccagagagcctattcccaaaggtagtcatgcatcagagtctcctggggatttccttatacaatgactgattcctgagtgctgtgcaatctacttgatcagaatctccagcgacgggacctcctgggaattgagacctgcagcaactggtccacaaatcagcacttagggactggtgactagactatttccactctacacacatccagtacagctcttggaaaacatacaaagcaaaagatagtaagggttatcctaaaggcagaataaccagccacctcacggaatccaatgtgttccagaaacattaattatacgtttcattattaactgctgacctattgttctttattttcagggtttgagttgctgttttaatttcatcactgcaaagaagccctatagacacacacacacaaaaagatgcatagattttaactggtccctggaaacaaggtagagataatcatgtggtttatttgatagagccacatgataaacaatcgagataaacaatgtgttttaaaaagcattctcaaagagttagaacaggaatgtcaaaaagacggcaaatatgatacctacctcctatccaatgcccttggcaggcgttgctaatcaatcacagcatttttccttgcatccacaaacagcctcaaagtccatttaaccaatcactccagggcactagtgctatctaatctgctctaccgtgtgggggacatactttctcctctttggctacaataaacaggtaaattgaaatcaccttataacagcctgatccatgacaggctgtatgctccacaaggtggaaatgggcatctgaaagttctcatgtagacagggctttaggcgcagatcacctggctcttgctggttcatgtttgtagtggtttcacacttgtatctttgaatgggagtacttagaaataaattaactgctttaatatttatgatatgtgagttacacttactcaaaccaacctagtttttgctcatgataatttacagtttcactttgaataaatgctgttgggaaagacaagctgagttccaaagtgttttaaaaattaagtgtagcatttgactaaaagaatcatatatcaatctgcttgatttccagtggtagcactgtaggttttcttctatggagattctgggccatatctccatgcaaatatttactgtcctggtaaatgacaggatagaaatcacaaggacacttggtttctgctggttttcatttgaaaaagaaaatcattataattaattagtcatgggttcccacgatggccattcttgactccttggcctctattgccactttccaagtctggctaaatagaattccatttcagaccatatctagggtaatacttgattcattaggttgatgtcatcccaccgacagtccccgtgatcaaacaataagatcagagagaacagacccacctcctcatagatgctgtcattcctgtgaaagtctccagccttcctgggaagaacatggacgtgaacgtgctgaaaatgtacaagaaagaaaaaaaatgtgattatctccccatgtatttttagacttgacagtgatgctctcatgaagcccaattactccacgatggttcctgctgggttatttttcagaggaagttgatatccaccttcggtaactatacctgaaatctgccgagaagagagtgcactaagcaagagagaacaacttggggtatatatgagagttggtgcgaaatgctagagtgtttcagagtctctgtggaattattcatggttgtcagtcttggttgtagttagccagtgctttgaaatgacagtgcatcttcaaaggtgaccatcatgactctgaaactgacaagaaataagaattggctaacagagaactgcataagtaaagagcgagtgaatgaggtagcaagtagtatgggcagaattacagacttggggcttcgaaaaataatcatataatagtaatacaaacagttctcatttagtaagcatttatttcctatgataaggaaagctctgtgtttggcattcttcatttagtactcttaaaaatcctatgaggtggccgggcacggtggctcatgcctgtaatcccagcactttgggaggccgaggtgggcggatcacgaggtcaggagatcgagatcatcctggccaacacggtgaaactccgtctctactaaaactacaaaaacaaaaacttaggaggctgaggtgggagaatggcctgaaaccaggaggcggagcttgcagtgagctgagatcgcgccactgcactccagcctgggcgacagagcgagactcctcaaaaaaaaaaaaaaaaaaaaaaaaaaaaaaatcccgtgaggcaaggtctactatgatctccactttacagaagaagatatcaatgttcggtgaggacagggcgccacaggaagtaaaagtcagcaccggaaatgaggttgcctggctttggctcctgtgtttcattagcacatgcactgattctgcgaacttaatcttttaaatagcccatttctctagtctactaaagcacccaggtaatatacatagcaatgctattatgcaatgatggtgaatcagggctcagagcatatctaattcaatatattcttcaaagctaaactgctatttgaaagttttactttccaaatagcctctattgtacctcggctgaagttaaacctcatttctgcccttgagctatgttccacttttattacaaaccgtggggaggaatgcgaaaatgaagagcttaaatagagagaggcagacagagggtcaaacctcatccctgatcacccaccccttcctgattactgcgatcgggttccgaggctccaaaaggcctcaagagaacgtaagatttaagtgtccctgtggcttcgctgtacaaggagggggaaagtgacacgctattaaagccgaggcagggtgcaacgtggtccaaggtgaatgaagcagagaggagcttcaaagcagcccctgagcacagttcccaaagagtgacacgcttttgccagaatattcgccagtcaatgataaagccagtcacggatctctcagcaattgggccaagtgtgcacttcagtcacaaagattacgtgagcatggagagagaaagtgaaagaacaaacaaggaaaaaataaatcacaaactacccatgaaaccaaattcttaggagaaagccaggcaggtgggcctgggctgaaatctactgaaatctccagatgggctgacttaaaagcaaaaccaggaaaataacgtagaacaaggatacagacaacccttagaaggagccttcactcactctttaattccagaatctcctgccatcctttcttcttctcctctttttgtcctttcttctttctgtccccctcctcctttcttcccctcttcctccctcccatccatccatctttcatcatctcccttatacattctaggaagttccagaccagtgtcttccagtcaaacttcctaacacaaatcctggacctaccacaaactaactgtgtgaccttgtctcacaaagtctatgtgtcagtatcttatctatatggggattataatggttgctacctcacagggttgttaagaggattaagtctgctaaccatgtgctgagcattcagctttgcatgtagttagtactcattacctagaactgtacaagaattagttttattatttaaaaaaacaaatttaaacctgaagatcaagtagacatcacattcagggattgatttctgcaccagcaaaaaaataaaataaagatattaagaagctccttgaatgagggcattgttcaagcatctcttttgtgaaagctgatttctgttgctttgactagccattctcaatcttccacctgtacttggggcttattaaaatgcagactgcagggccctaaaagtctgcatttctaacaagctcccagctgatgctggtctaatgccacactttgagaaccactggcttacaatatccacctggtttcttaccttgcttctgccagtgtgggcacggaggtcacttgctgttttgcctgccctactgcattatgtgtagactctttgtctcttttcttgttttttcctcttttttttccttctttccttctatcttttctcttttttcttttccttcttctttccctccttcctatttttttcccttcctttccttcttttctctctccccacagaatctcactctgtcacccaggttggagtacagtgatacaatcatagctcactgcagccttcaactcccaggctcaagagatcctcctgcctcagcctcccaaatggctgggactacaggtgcatgctaccacatcaagctaactttttttcatatttttagcaatggagttctcactatgttgcccagtctggtctcaaactcctggcctcaagcaatcccctctcctcagcctcccaagtagctgagattataggtgtgagctactatgtccagtatgtggagacatctttctgaatgcttctctggctttctgcactctgaccactctccttgcgtggtcctcaggaatatgcctgttagtatccactactaacatatggggggttgcgaacctgcacttgggaacctccagggtccaggtctatcccctgcctactattctttaccctcgtcttctcgatttagttcagggctatctctataggctgtgttaccactaagttctagaaaagccactcttgatcactggtaaccacttgaaattcgccgtgacacactgaaaccgtaaatagctcactgtacaggtggttttttcccgagggcatagatctcaacccaccctgatatcgtgacataaattcttaagtgacaggctgatcacacgatgctgacaacccactcagcttctcagaacagggaaatcacgatagagccagctcaaagcctcattgctgtgaaaaaataccatcactatggacttctaatagaatgacattctgataaaaacgctatgaatagcagagatgaggataatttgatataatctgttcttactgctttcatattaagctgtggtgatcacaacttacttttctaagtgccaacaaaacatctatttaataaaagccttccacaaatttgctaggggttgcagttgagctgcttgagctagaagagtatctttttaaagtcccatgacacattccacaccaaaaatgttttcatggtcaaataacatttcacaatgctcattagcacattaaagtatgagaatttccacacaaaagatgcttgtttaacttcatctaatccagcattccagaaacttatttgattgtggagtcctgattttcctgtttcattcatgtaacacttctgtacacttttctaaagtatacattgattcactcaaaaatatctatttctaggtgctattctaggagccagggatacggtaatggacaagacaaagcctctgtccccatagagcttatattccaatgggtgatgcagaagataagtaaggaaatgactatacattctaattttggatagaaataagtgtcctgaagaaaaacataacggtataaggtaaatactgagcactgggccactctaacgtttgaagtttgggaagagaagcaggactcaatttaaggctgtagtaaggaaaggggcaaaatcaagagagggtaagttccaacagcccagagaacaaatttcaaagagtgtatcactaacggtgtgaaatgtttttgaaagcttgaattgtttcagtaaggctaggagaacaaaatttaaaaccccatgaaaagatgctccacattattagtcattagggaaatgcaaatcaaaaccacactgagctactacttcatacccactagaaaggcaataatcaaaagacacacaataacaagcgttggccagagtgtggagagctggaaccctcctacactactggggatgtaaaatcacacagttactttggaaaacagtttggcagttcctcaaaaagttgaacatggagttaccttgtgactcagaattctgatcctaatacatacccaagacaactgaagacatatgtccacacaaaaacttgtacgcaaatgtttacagcaacattattcacaatcaccaaaaagtataaaaaactcaaatgactatcaactgatcaatggtaaacaaagtgcagtatatgaagacaataggatatgatttggccataaaaaggagtgatgtgcgctgagtgaaagcatcatgctcagggaaataagccagacaaaaacggccacatattgtaccatgccatttacatgaaaaagccaaatgaggctgattcatagagaaagaaagatttgcggttgtgaagagggatgcagggtaactgctaatgggcacagggtttcttttgggttaatggatatgttctggaattatatagcagtgatggttgcacaactttgtgacaatactaaaagaatgaactgtatattttaatagggtttcttttatattatgtgaattatatctcaataaagctattacttaaaaaaaaaaaaaaaaactgaaggccgggtgctgtggttcacgcctgtaatcccagcactttgggaggccgaggcgggcggatcacgaggtcaggagttcgagaccagtctgaccaacattgtgaaaccccgtctctactaaaaatacacaaaaagttagccaggcgtggtggcacatgcctgtaatcccaggtactcgggaggctgatgtaggagaatcgcttgaacccgggaggcggaggttgccgtgagccgagatcgtgccactgcactccagcctgggtgacagagcaagactctgtctcaaaacaacaacaacaacaacaaaaacccaaaacttaactgcagtgggtttcagagcaagcaggaggtgaaatagagacagcatgcaatgccatcatttttagaggctctgcctcttctgcgctgtctctgctccttccaccatctctttgaacacatctcttctgcccatactcacctgaggattgccagtgtggttgtatcgatatcctttttccttgtcagaatatattgtaattcaattctaagggatagaaacatggctcatggcgggggaaagagcaaggaaggctgaagagctaccctgctccacagctggtgtcctgcaacctccaccagttggccctgtgtgaatccttctccctcacatgtgccaatgagcaactgcagaaggcaggtctgattctaaagaacaacagacgatactgtggtaaaacgataatggccaccttcaaagttatccatgacctaatccctgacctgtgattatgttaagttacaaaagataaattatggctgcaaatgaattaaggttattaagcagctgaccttaagattggcagaggtatcatagattttccaggttgccccaatgtcatcaggagtccttaaaactggaagagggtgaacatcatcaaaattgtaaactttctacttcaaaggccacaagcaagaatgtgaaaagccaagccagagactggcagaaaggatttgcaaatcacctatctgataagggaagtatatctaaaatacataaagaactacttacaactaagtaataaaaagacaaaaatcctaagtaaaatgggcaaaggatatgaatagacatttctccaaagaggatggataaatgaatacatgaaaagatgctcaacatccttagcccaaaaccacaaagacaataccacttaacacatactagggcaactgtaataaaaaggacagataggccgggtgcggcggctcacgcctgtaatcccagcactttgggaggccaaggcgggtggatcacaaggtcaggagttcgagaccagcctggccaatatagtgaaaccccgtctctactaaaaatacaaaaattagccaggcatggtggcacacacctgtaatcccagctactcaggaggctgaggtaggagaatctcttaaacctgggaggtggaagttgcagtgagccgagattgcaccactgcactccagcctgggcgacagagtgagacttcatctcaaaaaaaaaaaaaaaaaaaaaaaaaaggacagataataacaaatgctggcaaggaagtggagaaattggaacccttgtacaagctggtgcagatgtaaaatggtacggctgctttagaaaagtttctgcagttccccaaaaggttaacaataatgttaccatatgacccatgcactgtttccagcaatttgttatagcaacaagtagagaatgaatacagatgccttgatatttttaatgcatagtttacacatttttcttatctctacaacacctgtatgaagtattattctaccaattttataggtaaggaagagacaaaattttccctcagcaagactcagaaatcttcacgtattgtttttttggtttttttttttttttttttttttttgagacagggtctcactctgtcacccaggctggagtgcagtggcacgatctcggctcactgcaacctctgcctcccaagttcaagcgattctcctgactcagcctcctgagtagctgggactacaggagcacgccactatgcccggctaatttttttttgcatttttagtacagacggggttccaccatgttggccaggctggtctcaaactcccaacctcaggtgatcatgcccagcatctattgttctatgtttgtataatcaccaacagctctcaacttggaataaccaaatgtaatgtaacaataagattgtttccatttgctgaatatcaacatcaaaaacttacagcatagaaaatctggaagagacagaaaaacacataggagaaaatttagatcaccagttaatctcactaccaagcaataacaatccttttcttcatgtagagtgatacaaatatgatacacgctttttttttttttttagtctcaattgccccagacaaaaaccctgaagcaaggatgagagtgcaagtagtttatttggtggatgatccctggaaacacgagtaagggaaggaaacaagaaaggaaaggaggccaatataggatgtgtgatcaagtgagttattatttcatgtgactggagcttataaaacctgctagagaactctgagaaccagtgaagaatatgcatcccagagttatcccagccaaggtgtgagggaactagcgtattcatacaccaacttttgtcctcactggttgagaactgctcctggggagacatcaatactccagcacttctgccttctcccacctggagagtgagaaaagccaggtttccagggccagtcagatgcaagtcaggctaggtaggatgcattgcagccatggtgggtgggggtaacacaatgtgggcagagcacagaccccacttgtagcaatgctttgcacagtgctgtctcatttctgacacctggagtctcataatttgctgctgaaccgaaagttcaagtatttagtctccttttcatgggtgagataccagacagataaagatctggttagaggttcttaaactgcaaatcccaaagccctagagcttccagaacaagcctggtatggccaaggagcagctcatgatggaagtaagaatggggcaccagaaagggcggcaggcttcagttccccctccgtgattcaaacagagcagctctgttttatctgtttctatgttgggatcccatgcacgatttcatttgcaaaaagaatttattactaaaacaaacaaacagaaaatctttgaaaactactaggattagaattaggaaacgttggggggtggtaagagtgattaatttcttcatttcacagaagaggagagtggcttttagaagaccaataacaaagcaatggcagggctgggactggaaccttgagaaccccgaaaccctgacttgtgttccagtgctttctacctcatcttgcccaacctacctttcccagatctcagaaaggtagaagcccctacaattaagcagtttggtgttcagtcactggagatgggtggccaaggttcagatcctacctattcttttgactgagtcaattccttaacttctttcatattccctcatttatcaagtgggcataaaaccagtatcccaacgcataagacttttataccgattatgtgaaatacataggtaaagtgcttaagctaatgctgcacattctgaatattcagtcaattccagcagtgactatattacaggacattagttttaaaaataattttgacaacctgcttctgttctaaaccagaaggcttaattctacggtgagccttgctgaatgtattctacttcatccagaccatcaccaaccccaaagctgtgtgttctacatggctggatttcgcctttcttgatttggggaggcctcatcttctgcaactaagtcgagtcaagggtcagcatgaaattactgacagccacttagttctaaaataaatgtcactggaagtaatgccacttacaggactttgaggatacctcagcatgatcaactcaagaatcaaattagtggcctgtcaaaatgcacaggcacactgatggtttctgatgctactgtcaatgagctccttcacttagaatattagcaatgctcaggcagttggtatgcctttcaggaaacagaggaaacatagtgcttttcatgtgttcaaagtgtcccaatcaagttgggaaacttcgaggaaaaaaataaaataaaaaaaaattcagtttaaacaaaaaaaataaacagaaaacacctcctagaatttgtggagactctgttgagtttcgtggcttaacaattgtgtttttaagccatacatcactggtggtgctccaattgtgagttataataatatatcataagagggatggtgatctcctgatatatgggtgccatacatcatctaagcaccatggctttgatgatgtattgctccaagccacaatgagagtttaaaggagcttttagcagccagacagctttaaatttcaaattttcaaaaattaagatcttttcaagtaaaaaaaaagcaagataatggaatgtgatgctatataaagtgtcactgaactctgagagcctgggtatatgccttttccttttggctttgagctcacaaggtggaaatcattggcaagttcttcttcaattcctcctccatgagcacagaggtgagcaagtgtcaatgcatccattttgccaatcaatttcccccatcttccacactgcaagcctgagtagctcatcatcatcccaaagactggatcacataaaatgctgtgataggcactggataaacccaggagaagttattttttattttttattttttggtttgttttaaagagctcttccactgagattcagaacaaaaagaacagataaaaagtagatagacttccttcctcattgctctcaaactcaaaacagggcatgtaggaagaaaacatgccttgtctagcatttgtctttgtaaagcaaaggaagcattgattgcagatgaggagaaagaggggaatggcatatgggcttctcatccagactaggaaagggagctgttgtcatagttctgtcacctttcctattttaacgatgggtttataagacggtaatgtggcttaagagaatgtacccacttcgtttaaaagccactcacttttgggggcaaagtaatcacaatcaattaagaaaacaggtgttgagagaactcctccctttttttttaaatcctactgcaataaacagaacaaaatgagaaatcttcctactgtttctgtaatagacctaaacaggaacagtgagagacgattacacttcaagtggcttcttccattttcctttactaagtgaattaaaggaaagaataagagtagttactgccatgtggagggaaacatctgggcataaggaattaacagtcttccctcccattctcctatctctaattttttgctccttgggcttcctccagtagattctaagtcccaaattactgtagatattttgcacccggctccctccttgaccacttccaaagggcaaaaacatcttatttccaccaaagaaaaccaatggctgtctcaaaaagaagtcccaggcttcttttctcctgtagtagtaagttaactatataatctgggtaacaaagacatggaaataaatgcatcacccactattctgaggctgtcagttgaaagatgtgaatgaggcaggctttgcatctagagaaatgtgggttctttcacgggctggtaaataaatcccccaaattcagtcctcttcttctctataaagagaatactgacacaacacttaattatttctttcacataagccaaaaagctttacttacgtatttatagtaatagcacaccattcatccacccaccatttttaagtcattatcagttataaaacttgctgccatttacataagaatattatatgttggaatggtacttagtactgtatattatcacatcctcaccaaaacactaaaaaatagaaactgttgtctccttttttttcagtaagcacactgatgcttactggaattaaataaattgtgcaagctcaccaagctggcaaaagtggccgagttaagattctaagtcaggttgataggatgtcaagcgtaatctgtattttgctatgctccttcctgagtaaataactaatgtctgggtgaccatatgccccagtctgtttggaaccatccagctttaggcctgcaggtatgaacaggccagtgtaataacaaacagcatcttctttcactctcctaagttctgctgtggacaataaattatatggtctccctaactagtagtatagttcatgccaggaaattttatttctgctcattctaactattctcatctgcagatagcaggggaaaaacaaagaagaaaggaaagaaagaaggctctgtgaaagtttttaaagaatgggctactaactcttatctatcaatacctttcatgaaacctccaacatgttcagagtagagctctgggagggaaaagaaatactttagactaaaacagggcccctcaagctctaaagaaaaaacctcaagcatgctagaaacctctccagttgagcattctttacttattatcatcacaagaggcaacggtaatagctgttgctatttattaagctcttactatatgccaggcaccatatgccaggaactgagctaagcactttctttgtaagatctcaattatttatcataaaactgcatgatagatataatccaaattattatcatcattaatttatagatgaagaaactaaggccgaggaacgtggaatgaggaggtctgcccgattccaacatccaagtgtgatactactatcaacactctggtacagttgaacacagcctagtaaaagttctaagcccactgcccctgcaccccctgctattcaaccttatgacagtaagctcttctgcaagaggggcccattagagagaatggacttctaacaaattgagatcaatcttgtacaaatattctgtattatcttttggcttctgattggttttcagtgacataacagctttaaattcttaaagctatttaatgagaagagagtagatgtattagtctgttctcacactgctaataaagacatacctgagactgggtgatttataaaggaaagaggtttaattgactcacagttccacctggctagggaggcctcaggaaacttacaatcatggcagaaggggaagcaaacatatccttcttcacatgggggcagcaaggagaagaatgagtgcccagtgaaggggaatccccttataaaactatcagatctcatgagaactaactcagtatcatgagaacacgatgggggaaactgcccccatgattcaattttctccacctggtcccacccatgacacatggggattatgggaactacaattcaagatgagatttgggtgcggatgcagccaaaccatgtcagtagaatttataatcactgcctctagagaagttgacaaacctaaccaacagctataaaaccaggataactccagatgtagggctctcagatgaggtcatctctactgccttgggttatggacaggtagaaccctgggaagaccattccaagatagagtcttcctgttcagttagacatgcaggagctcagaggttcttgtaaaattggttctgcttgctgctgggtgggaagggacagtgccttagtaatgtctccatctgaaaacgtatgaaagtttcaaaatgacttttaggagatacagaggatgtttcaagatttgtcacccttgtgcttctcagctgttgttgtagtcatggagtttatagtacatgtgcttggtagaaaaaattataagtgttcttccttccatgtggagttcctttctctttccttttcttcctctgagttttaaagagcatgctcaaatgccacctcctttgtgtactcttcagactctttcaggcttttctgattcattatacatatgtccatgacagctttttaccacaaagtataagtaattacaggttttctcttccactagtctggaactctgggctatttattacttatttttcccctgattatttcttttccctaaccctaggttcctaggttagaagacatattttctaaatgttgaatggatggatgaatggatggatgggtggggtggatgggtgatggatgggtgaatggatgggtggatggatgaatagatggatgagtgggtgggtggatgggtgggtagctaggtacatgagtgggaatgtggacagataggtgcatggatggatgaatggatggttaaaaaatagacaactacactgctcttaatttcttagcttgcttaaaagaagaaatatatgcactgattttcttcgccattcttgtcattttcttttgcttgaaagttcttgtgcatacaaagatatggtctatgaagagccattatgatcacattgtacacacctttcttccccactgaaaagtatctttttaccaaaatgtaagtttgaagttcttgtgtttctagcctcacataaatcccttttaaaaaactcctcagatatgctcaagtgtctggagaaatagcttatcctaaaaacagtcagcattgcaagggttgccaaggggatatatttgttcttcagtattaacttcattaagagctactgtggttctctctcaggagagaagaagaaacctaacctttctttggatatcttctgatctttacaaattatttccagggtgctgtctttgttagacaaaatatgaagaatatctatttttttatttatacatcatatcagaacattaatttgtagagtgattccctctgggtgcctttctgttgggtacacaaaaaaggatttggatgcaaatgaaacaatgatagcatttttccttgtcttactcattttgtgacaaatgcacattgctttactgtttgctatacacataattacagttctttaatttatgtttcaataaaatgtataataataaacatttactgctccatgaataaacattcgagtgaagcctctaatggaggttacatgtttcgaggcagctctgtggctttttcagaaatctgccttctacttaatgagcatcatttccataatctgtgcattattgcttaagcctccctttaaaacatttcaaaatgcaaaaatttgtgaaatatgatcagtccaaaggggaaaaaatgttaagggaattagcaacttgtcctgttaaagggacaggacaagctttcatgtccctccagagacagtaacatagtaattatggagacagcacttcctaattatctcactagctgagcgcaatactactgtggtttttgcctctaagatctggtttaaataaaagtgataagaaacctggagaggtcagccatgaaggacaagcttgtgctaattctctttccagtgctaacaaagaaaccagaaagtagaaccagaaatttggggaaggtcaagatacctgtggtatggacattcctggatgtagagacagacaaatggtttgattaaaacggtcaccccaaagtaactgaattcagacaaaagcctatgctgagctttatgtcgatggtgtcacacattattttcagtgtgttatttcttaggaaaattacttacataattttatgtcattatcactttaaaaggttaatctatttcagataatctttgcaaattgtgttctaaaaagcaggtgcttttaaaaataactaaaacatgatgacatatttcttttttctttgtccaacagccatggctgggttgtttaactagagagaaaaaaagatgccaggagaaatgaaggaacaaaggacccttcacagtgtgataagatacagatagtcagcctctgcagagcggtgatgaaatgtgttaaaagtgatggctgtcacttcatgacatgtcagcgtgctttattggtgggttggcacaatttatttaaacatcgtcaggagggactcattttggtgtagttagaagttgtgtttctttagtgtgaataaatatctctgggcccacgtgcaacattttaaaactgtgctgttgtttactgtgggaattggagcaaggagctaagagttccaaagtgaagctctccttctcccaccattttatgatttgctataagtaatttgctccttgctttgaccgttactacaaaatctttcaaaggaacattattctccttaacaggggctaaatttaagatttttcatcattcaatattgctattttcacatgtgacttcaacaaaataaaacattcggcataaatagaatttagtgtaatccaaatcctgcttttctcttggtacatatgctttgttgcttcttgacattcctgaattacaaagtattaagcagaatcatctttttaagggttacattttccttctaactcaagtgagcaggtatttacgtcaaagtcacacatttaaaaatgacatcctcttccagcatggggcaaatctcaacctacagggctgccaagtggagctgcaactttttgcaagggttctacccagatgtgctacaagtccatattacctttgaaatcaccatcttgtaaagatatctgcaccctcatgtccactgcagcattatctatagtagtgaagatatacaaacaatgtaaatgtccatcaaaggacaaacagattaaaaaatggtatataataaatacaatgaatattattcggccttaaaaattaagagattctgtcatttgcaccaacaaggatgaacctggaagacatacactaagtgaaataaaccagacacagaaagaaaaatatcacatgatcttacttaaatgtggaatcttaaagtaaaatatatagagatagagaataaaacagtggttatcagactgcggtggaggttgggagggcagaatggggagatacaggtcagagaatagtaagcagcagatttgtaggaagaaccagtctagagatctaacatacaacatgaagactgcaggtaaaactgtactgtatttgggattcctgccaaatgagtatactttagttgcccttgtcacaaaaacaaacacccaaaaaagtgagtaactatgtgagatgatgaatatgtgaatttgcttcattatagtaactattttactattttgtatatatgtcttaacaccatgttgtatacctcaaatacacacaataaaatttatttaaaaaccaacgaaaaagcacattcccttcataaatgagattcttttcaaaataagtttgaaaatatacattgtaaaatatactagaaaaaccaccccctaactaactccccacaacccaggagctctgatttgatagcttaagacaggataaatgactccgattaggacaatgagccccagttttatggggacctcctaaatcatatctcggtttgggtctagaatgatggtgctgggagcacccagagagctgcatatcatctcagcctggcttccacacagggagccagagagatttatggggccctgtctggtggctttgaggcacaaacgatgaatactgctaaagcaataacaataaaagaggcaacagacagtgggggaagccccagcaccaaccctcatttttctcataatatactctgttgtacaatgagacagagtgattccataggtaccagccagaaattacatgaaaaattgatcatgtttctttttctgggtgatatcagtgattgaggcccttgatttatgctggccaaactttttcagtgcagaatggaacccttcctaacttcagtctccgtggctcacacagactggccattaacagaagacacactgcatcataccatttagtcaggaccctacactaacagagggaactgcagcagagtcttaatagcaactccaatttgccaggaatctcaccacagatcagaaatttacagtggcggagaccttttaggaactttcagcatggatgctccctcaaggtgtgggtcagaatttgcggcgcaggaggtgaggtgaggtgaatagtttataatgatttttctatgccttttaacctttggaattaacatttggtcaagaaagccaattgaaggctaagtgtgtacttgacatgtgaaaaaatgaatgtgtcttctaggcgttggcttaggacactgctgagccctggctacagccaactcaggcttaactcattaaggtgattagccaacaatcaattctttaaaattagtaacataaaacaggccataccaggctcatggatataaaatttgggtatcaagttttgctccagagaaatgtcacaccctcaccggcaaaaagtctatagaggtagggagtgtcacaggtaaggttgagttaatgagacatcctctagctggcatgaatgtgtaaagtgcgctccatggtcatacatccagcaagtcaggatttcacagcaagcatagctttcactttaagctaagtgacatggaaggttcaggtccttaaccttaggtcacgggatgacaatatacagaatctgcagcttgacagcctgggcttaattcctagtcctgccactttccagctgtgggacctgagatagtcaacacctcagagcttcagatttcttgtttgtaaaatgaacccatctcagagggttgctgtgaggatcaaattggttagtactgcaaaatacccagactagtacttggaacttagtaagcatagatgtaaggtgtttgcagctatcattgctgctgccgctgccacgattattagtactacaactacttaaccacaaaatctgtgctacttgaccacaacatctttcagttaaaaaaaattcacaatttatttttttaatttaactttctcttaaggactttaccattgttttaaaaattactctactgaagtctaatttactaaatgggaacaggtagaagaaccattctcctaaaaactaatgtggagtcaatatacttatcctgggcatgaagaaaccctggagcttccaaagaacacagtgtgaaaaactttgcttggggagggagatggaaggcagagaacgagggtttctcccactggggtacaaatccttaggaagtggagcttggtgattaagagcatcgagctctaaagtcagatgagctgggatgaaatccccaccccaactttcatttcctgtgtgacctgtgaaggcagtcgaatatcttaattctttgggttctatatttataaaatgcagataataaagtctattcttcaaagggcttctgagaggattaaatgaaataatacatgaaaacctcttagcaccgcccctggcaccattagaaaatgccttataaatgtaagctgctcttctagttacttttacccagatctctgctcaagtgttacttccatagagaggacttccccaatttctatattacatataaacagttccggtcctatctcaaattaaaatctgcatttattcactttttcattttttgttcccatactcacggccatgatcccagcatctgtgactatgactagcacttagtaggcacccaataggtatgtgttaaatgaatgagttaaaaaggagagacaggaagtatctctaactcaatgttaagagactgcaaaaactctattaggctgaaaactaggaagtataattcttcaaagtaataacagaaataaaacttgaagacatgttcttttgtgtatgcaatagtgtatgctgattgttctcaagctgccaactacccttaacagtgctctgctgtgaagacacaaaaggggcaggagggtggatcagacagacttcatatgagccacaatgcaggtccagccaaagtagcaaggatacagttggaatataaatgcctttacccacctctcactgttttcttctcctgaaaattgctctacattatgatctctctctctttctctatctcttgtctcatacttggctttcctctgtccatgcaaagggcctccttgtgatatcccacattctcttttatcctgacacattgcatagactcctgttgtgggtactgtgtagttatataaccagagttgggatgttttactgccttgatgcttgcgttgtgggtctgtgtaatctttgcattcaaagtgtgataacagacactggacatagcgcataacactcagagctgcactccaggtactaagatgtcatgaggcccacgagagagatgcacatttctgcaagggcgtcaagggacccaggagaggaaggtaaaagccactacgaggtcctctgagggcaaacgctccctgctctctcctgacaatgatccccaatgcatgaagtaggatatagtgtgttaaggtgataagggctgaggatgaagtgggttggctcaactggcaaagcactgtgaactggaaatgtgttagtgtgtggaaaagcaatgttaccttggatgagagctcactcctctcgtgaactagacttttccctcaagtgccttcccccataatacagtcagtaaaatcttctaaagccctgagaactggaatcatctcacgatctatagtaacccaaagtggcctagcaactaggggtggaccctgttaactattcacatcgccaccctgacaaaagtcttcctgctcccatttcaaggctctctccacacttggtttctctgacctttctgaacctttcaccgtatcttgctctctggactgcagcccctggctgtgaatacatatttagtctctcagcctgcccttcctatagacatattatttgatgcttatgcaaagatcacccttagccttcatctttccatgcctttgccatacactaccttcctcctccccacactcctgtagtcagatgtgatgcttcaaactcagcttgagcgcaggtctcattttcaccctcctcatacgcctgtggacaagtttgtcagaccattggttaaatattcgaccaagagtgaggttggtaaaaggaaggcatatttacgagacagaacaaaggctttgcattaaacaaaacaaaatggcagttttccttcttgctgaaaccctcacttggatattcctccagaatcagagctttccaagactccacatgattcatcccctctcccatacttagctgtctggattacagcccttagttctttttttattttttagagacacggtcttgctctgttgcccaggctggagtgcagtggtgcaatcatagctctctgcagcctctacctcccaggctcaagtgatcctcccacctcaggctcccaaaaagcttggactacaggcatgcaccacattggctaatatttttttaaattatttgtacagacagagtctcactatgttgtccaggctgctctcaaactcctgggctcaagcaatcctcccacctcggcctcccaaagtgctgggattacaagcatgacccactgtgcctggcttcctagttctctataggagtctctaggttgttctgcctgagagattctgatagttcagctagtttcaaccagaatgctgaacccattattttgagcatgaatctgctctcctgttatattactaagaagaaaaacaaggtattccattaaatctgtgggcacatcctcaaaagcacatagttttgccgagatcttacacctgacaatggaagtgcttgcacgatgcaggtagtaaaacggaaaataggaatcaggaagctgatcaggaaccagctcagggctttgaaaaggagaaggccagtgagcgcccaccatttgcaggttgacagagtcaattttttttttaaacctgggctcaaagagagattaggcagctggatggggagcagactaaaaaatatgttcacctttaaataaatcagcaacgaaattggaggaggattatacctcagggacaaaagaggaagaagaacatgaatacctgctttacttgaaatgcctcccttctcccagcctttcctgcatggagtatgacaagagaggcccttggtaaccttcactttaattagaatcattaactgcaaatggaagtaagaacaactcaactctccttgtctaattacaggggctaccttactcctgtctgtaaaaggcaccaatattgtcctatgaggccctggcatgaagactttgctactctctcaagtaccaagaacagccttggagtggaagaaagaacatatttgactctaccatggaaattcttctatacctcaacatcattccttcatcatactcacatcctggcttgacagaacttatgtatccctgaaagccaaaggcagcttaagggacaggatagtggagaaaaatgcagccctggaactagactccttgtgcatgcatcctcatcacaccactgactgctacctggagcaaattacttcatatctccagattccagtttcctcatccgtaagaaaggcacaacaccactgtctacatctcatcatagtttttccctgacaattaataatacattacataaaataaatctttaataaagtcctaggactcagtactaggtactgtctaaatactagctatgatttaacatttttattggtaaagttttagaaacacttgctttgagattatggattcaaaggaaggtacaaaatagtacagagagatccctggtagtgtactcttcatctagtttctcaaagtactatgctgacatagtttataaaatataacatacctatagtacaatatcaaacccaggacactgacattggtacaatgcgtgtgtatagttagttcaatgccattttatctcatgtggagattggtataactaccattgcgctcaagatacagaatgaatccattaccacccaaatcaccattgtaatcctttggggaggcactcctgttccttctcctccatccattacaagactggcaaccccacaaccactaatctgttctccacctccacactttcgtttatttttcttgaatggtgcaataatatgctgccctttattaaacatttttttcttttttttttatttaaacttttattttaggttcaagagtttaagcgcaagtttgttatatagggaaattgtaagtcacaggggtttcgtataaatattttttcatcacccaggtaacaggcatagtacccaatgggtaattctttgatccgctcccttcacccaccttctacactcaaatatgtcctggtgtctattgtttctttctctgtatccaagtgtactaaatgattagctcccacttataagtgggaatatgcagtatttggttttctgttcctatgttaatttgcttaggatactagccttcagctccataaatgttgctgcagaggacatgatctcattcttttttgtggctgcatagtactccatggtgcatatttagtacattttctttgtccagtctaccttggatgggcttttaggttgattatatgcctttgctattatgaaaactactgcaatgaatatgtctatgtatgtgtctttatggtaggatgatttattttcctttgtgtatatactcagcactgggattgctgggctgaatagtagttctgtattaagttgagaaattgccaaacaaccttccacaatggctgagctagtttacattcccacaagcagtgtataagcagtccccttcctccacaacctcaccactacctgctattttttgacttgttagtaatagccattctgaatggtatgagatggtatcttattgtgtttttgatttgcatttctctaatgattagtgatgttgagcattttttcatctgcttgttggcctcatgtatgtcttcttttgagaagtatctgttcatgtcctttgccaacttttaaatagggttgtttttgcttgttaatttatttaaattccttatagagtctgaatcttatacttttgtcagatgcatagtttgcaaatattttctcccattctctaggttgtctgtttactctgttgatagtttcttttgctatgcataagctctttagcttaattaggttccatttgtctttttttttttttggtcacaattgcttttggcatctttgtcatgaaatattttccagagaccgtgtacagaatggtatttcctaagttatcttccagagtttttacatttaagtcttcagtagttttaggttttacatttaagtctttaatccatcttgagtttatttttgcatacattaaaaggaaggggtccagtttcagtcttctgcatatggctagtcagttattcaagcaccatttattgaaaaaggagtcctttccccttttggtcagctttgttgaagatcagatggttgtaggtttgcagctttatttctgggctctctattctgttccattggtctgtgagtctggttttgtaccagtaccatgctgttttggctactgtagccttgtagtacagtttgaagtcagataatgtgatgcctccagcttcactttttgcttaggactgctttggctattctggctctttttagattccatatgaattttagaataaatttttctaattctgtgagaagtcacgttggtagtttgataggaacaggacagaatctataaattgctttgggcagtgtggccattttaacagtattgattcttcctatccacgagcatggaatgtttctccatttgtgttgtctctgatttctttcaggagtgttttataattctcaatgtaaagatctttcacctccatggttagatgtattaggtatttttttgtgtgtgtttgactattgtgaatgggactgcattcttgatttggctctcaccttgaatactgttggtgtatagaaaaagctactaattttttacattgattttgtatgctgaaaccttgctgaagttgtttatcaaattaaagagcttttggacagagactacagggtttcccaggcataaaatcatatcatttccaacagatggtttaacttcccgtcttgctatttatatgccttttatttctttctcttgactgattgctctggctaggacttccagtactatgttgaaaaggagtggtgagagtgggcatccttgttttattacagttctcaaggggaatgcttccagcttttgttcatttggtatgatgttggctatggatttgtcattattattttgaggtaagttcattcttccaatgcctagtttgttgaggatttttaacaagaaggatgtctaattttatcaaaaggcttttctacatctattgagataatcatgtggtttttgtttttagttctgtttttgtgatgaatcacatttattgatttgtatatattgagtcaaccttgcatgccagggataaagcctacttgatcatagtggattagctttttgatgcgctgctggattcagtttgctagtatttggttgcggatttttatatctatgttcatcaaagatactggcctgaacttttctatttttattgtgtctctgccagattttggtatcagaaaaatgctggcctcacagaaggagttagggagaaggtcctcctcctacatttttcagaatagtttcagtgggaatagtaccagctcctctttatatgtctagtagaatttggctgtgaatctgtctggtccgtggctttttctagttgttgggcaatttattactgattcaattttggaaatgttattggtctgtccagggtttccgtttcttcccggttcaatcttaacaggttgcatatttccagaaatttatccacttcttgtacgttttctaatttgtgtgcatagaagtagtagtaatagtctctggggagttttttggtatttctggggggttggtggtaatgtcccctttgtcatttctaactttgtttatttgaatcttcttttttccttattagtctagctagtggtctatcaatctgattaattttttcaaagacccaatttatggttttgttgatcttttgtatggttttccatgtcttaatttcattcagtttagctccgattttatttgatgctctgagggtttgattatggtataagaggttcagttgatgagcttcatttctggaagatttcagggggccacggcttagctcagcactcctgggggagtatgctgcaaccctgggggggctggtaccagtcccccagctttgttctctgcccctcaaggttaagaacctgctgtgctggaggggcataggtgttccccatcttctggaaacaacactctgacagaggatgctggccaaagcacttcactggggcagtggcagcaggatccatgcttactagcatgtgctggcaacagtggcagaatggtgggtgtatgccaattttgtttttttgaaaatctatataaaagactcctatattatctgaccttttaaagtgggcttttgtcatttaacattaatgcccttgagatccatacaagctgttttgtgtattaatagtttgttcctttttattgctgggtaatattctatggtatagatgtaccactgtttgtttaaccattcacctgctgaagaaccttttgactgtgtccagttttcagctactataaactacctgtgaacattcattcatgtacagatttttgtgtacacataggtttccctttctctgggataaatgcccttgggtgcaattgttgggtcctatgataagtatacgtttggtttttaagaaatcactcggccaggcgcagtagatcacacatgtaatcccagcactttgggaggccaacgtgggtagatcataaggtcaggacatcgagaccatcctggccaacatagtgaaaccccgtctccactaaaaatacaaaaaaaaaaaaaaaaaaattagccgggcatagtggcatgtgcctatagtcccagctacttgggaggctgagtcaggagaattgcttgaatttgggaggtggaggttgcagtgagctgagatcatgccactgcactccagcctgggcaacagagcgagattctgtctaaaaaaaataaaaataaaaaaaaataaataaataaaaaataaataaatcactattttccagagtagtagttgtcttctatatttccatcagagagatttggtttctgttaccctcaccagcatctggtgctgtcattttaaaaattgtcctaatgtatgcagtgataactcatcatggccttaatttgcatttccctatgggctggtgacgttgagtatcttttcatgtgctacgtgccaccctttattatcttcaatgaaatgtctatttatgtcttttgtccactctacttgtattgttcattttttctatcataaagttttttttttccccacagttccatgaatactatagactttttttcctttttcaacttttattttagacttgggggaacatgtgcaggtttgttacctgagtaaaggtaactactgtgtgaagctgaggtttgggggatgaatgatcctgttacccaggcagtgagcataggacccaatagttggtttttcaacccttacctcctcttcctctccctctactcaagtaatccatagtctatattgttaccatctttatgtccatgagtacctgatgtttagctcccttttgtgagaacacacatataccagagttttgagaattcattatatcttctagatatgagtccttcatcagtaactttttaagtttcagagatcctctctcattcccttcaactacgagtgatctcttctttccctaacttctttacaaattttcacataggaccttttatcctgtctatcttgagtctgccatagatggccctccctaactgcctcactcatctatgaacaggctctatttctgatttgtcatcactcagtgtcttgctaacatttgggcacctatctggcattccactaatgtccaccaagtgactgaatcaactatacctggattttcattcagttactataagacttcagcctaaagcaaaagccacggttaccatggatacgcaggcttgggatagatatgtatcctaagcatttaatactttggaaaggataactaattacaaaaagaaatacacacactcagatgtgttagtgattaatttcttctcagctaccacacttctagctaacgctgtgacacactaacgtttattgaggagtttctatttacgccaacctggggctcacatttggctaattaagaacacatacatttcagaacttgtgatctgtgggctgtgtttacatatgaacatcatattcaatacacaggcaattgtttagcacctctaacctatttctagccttatatttaattagtgagaattgctgatggggaacgcagggtatgactttgcattaaacaaacagctatcctccttacaaatcacaacaacaatgcataattaaacaatgagctacctgagctttattcagtctttcttccaaaggaattaaatctctaatgaggaccaggcctcaggaggaactgcagaaggaatagaggtaaggagacataggggtcaattctagccctgcttcctggcctttctgggtcttaatgtccttattgtgagatgaggaaatgaatactcctccctggctccccatccttctcttcttctctctggtatgcatgttctaaagatcacatgcaataacagaggcaaatctctttgctaaagtaaagcataatataaaatataagaattgtcactgctgtgagttaagaggatttcattatttttacactggagaagaaaaacaattgccattaaacaggttctccatgacctgtccccatctcttccctgccctcatcacctgtccttcctctccctgttcacatgtaccagccacctgaccttgctttgctccttcccatcatatcaggcacatgccagccttgggcaaatccccctcctcatcaaagcctttccatgaccgatcctccaattgaaactatcactcactcccctcttatatcacttcttttaatacagtcagagtacttgccactgtctaaaaaaactgtttgtttacttgttttcttttcttttcttttctgcttttcctactattctctcctgcttttcctactactctccaccagaatcaggagcagtaaactcaatggctctgtcttacttccatgctacaaactcaggtgagttcactgtagcctccaggagggaaatgtacattatgttctctgggacaaagctcccaggcaacaggcaaaaatgttccttttattctacacaactttggaaaacacctctgaatccaacgttgagagccatcatccttatgctgagtactcaagagctcccaggattctacagcccataaatgagacaatttgacaagagtcactagtggtgaccacagtaatagtattaggatgaaccacatgaaatcactgagattcactgttttggccctaaccactttcatatggtttggcatagtaacaacaatggcagcaggagcccttgctacatgccaggctttgtattaaggctttaatagatactagttcattcacttcccaccacaatcttataacctaagtattaattacctatgtgttatgcatggaaacagcaaggcttaggaaggttaagggatttttccagaggagaggtggtagcatcaggtcacaaacttaaccccgtattatcctggaagagctaatgtgtgttcccttcctagggaccaccatgaacccacctgggttctgtgcatggaaataacacagaaatggaagttgctgttttttgctttattgcctccacgactttgtagccattgctgttgactgggaatctctaaattacaccaacactcagggtcatctgagttgacaactttcatggccacggccactacgcccaagaaaaaaataagttggaggtaaaatggggtataaaactatcttctagcactttctgctaattgtcttttacccagacaaggaactctgaaggactctgacatcagtttgcgatgcctcagctacctctgtcctttggccatctctgacccttcagccaacttgggaccctcagtcctggtaagagatcatcaggccttgtgccccccaccccaccatcttggtgagctgactctttcttgctcacaccatacctaagttccaaatagaactttagggcatctgagatcccacacaggcctccccactgctgggatcaatgataaccatctcatggaaagcctcttcattgagatgtccccagttacatcaccccaccagcccagcattctcctggctcacctctctccagccacagaatttgcatctcacagctgagaaatgggattggtcttctcctctctccatgtctctgaaaacatcactcaaccaccttggctcaatagtctcctgcttcaaccagtgccactgagcatgccaatctctttttgtcatgttgacatcatgtgtggccttgatttgcctcccccaaattcctcctaggatggcccttctcacagccttgatctcatcctgggcacctaaaggggtactgagaatggtccctcccacagctttgactgaaagttcttggattccttctatatccagtcaatttcactaccttctactttagctacttagtcttgcggatgtttgaattttttggacactggatttttttcatcgtataaatgatttcacatcccaaatctgacattatgtaacacctctttcctgaacaacctgccgagtttgtctataagaccacccacactgtgcattaagttcaccaggtataaaacataggtggccattgcaccaccaaagccagtatcccagacacagtgggttggagaccctcgggacatgcagacatctccccactcccagtcagccatctgactctgtggagtctcctccctctcttgttaccattcctcagttgtgccaatgtgacacgccacttccagactctcacctcccctgaccaaagctagaggcatggcctttcaatgatctcggcttgtggtctcaccatagagtctatatgccacattcctgctcaacatctagaggtgtcacttcaagctaccctcccattatagggtattaagctctgaagttagccagtaagggggaaaacatggttaaaccactctggaaagatcccttaaactgaccaaccttcaacaaatctgaaaagtctaatttctttttcttggaaccaagcgctggttctgcatttgaacacaagttggagtcctggttaggatttggagggctagagggtgcaaaaacgtccttatccattagggtcacactcatcacagcaagatgctccccttgtggacagctgtgtgggacggcagccagtgaagaggagactagccactctgaagcctacgttccttgagtagaatggtccacaatctaaatctaggggttcactccttctctccctctgcatttgtctctctttccatgtctgcttgtgtctgtctctccaccccccgaagtgtgtgtctgggtgtttctctctgaatctcggtcccctagcgtatgttgtgtctgtctttatgtacgtatctgtgtgtacctggctctgtgtctctctcagcatgttactgtgtttccatgtgtgtaagggtaaatctcccctgtctctatctcttcttgtctttctctgcatctgtccctgtctctacgtgtgtacctctttcttggtttctctgtggctgtctctctgtttctctctcggtcttgatgtctctctgtgtgagtgtctctctctccttatgactgtcttcatgcgtgcattgggtccttgtgtgcatgtcctcctcctccagtgagtgtctccctatgcacacatttcttgaggtgtagggctctgcaaaacacttagagttgacccatttcaaatatgttagccgcacatgattcccggccaggtatgccagcgctgccctcttctgcattgccacgcagacgcctaccttggtcgaaacacttgcagacatatctttagcaaggtatctttcctcgtttttccccaacaaaactcatgctgtaggaatctccaacatatacaatgaaagagtattgagctgccatagataaattaagtactgtgctcggcctcccactcagcaccaagaggccaaacagaatctaaaaccactgctgacacctagcacaccaaacctttccagcctctgcaactggcattctctgcatgtcaaaaacctctgaatcattctgggtcaagcacacatgcctcctttcacaaaggttctgcaaacaggtagcatcctgtaccccgagtgtgtgcctggtacctactggtgtacccccttctcattgagaggtcctgatgcctgtggtgtgagtcagtttgagtgtgttaatggagtgttctgctttcaaggccaaactgcataagcagagcccatccttttcccttcttttgtgcccagatgggaggaatttgtgaaacttgtattccagtgttaatgctgaagttgggaaatggctcaatcaagcaatggcagtttaacttgaagagtgcaaaggagaagagcagggagaaaaccaacactggaagcaaatcagaaggccagaaaccttcatgggcacttgcactattgtttacagccacaataatcatgtaagggaacccagcatttttcagaagttattttgttctgtttttttttcttttttttccaaatgtgtgtttgtattgctttgtttaaatataggcctgattcattcaggcttgggtctgaagatcccaggctttcagaactcaacaaagctttcatcatttgcaaataattcaactcaacaaatatcatttgagaaaagctctgtgctagtgcttcttgtagagacacaatgaagaaaaaatcacggtccctgctctttggagacaaataacttaggggaaaacacacacacctctcaactctcacctaaggagtgctgtgcaaagtgctgaaggagatggagactcctctcctgggaaaatctgcaattcgaaactcaaaagaagatgaggctaagggccctccaggtggaggaacagcctgagtaaatgcctagaaaggaatggcacatagtaggcacttgcaatcaaagctttgctaaatgaatgcatgttgaacatgttccagaaaactcaagaccagagtagcactgagaagtagaggtgtttcagggcttccttttagaaatttcttatactgaaggtttcagaatgctaggagggaccagggagatggtttattccaactggtttcttttgaaaacgaagaaaccaaaaacccaagcttacatgctagggccagaaatgagatgagaactcagaactgttccagaaggtaatcactttgaatttaaatgcctactcttctgatctcaatttaaggaactaaaacaaaatcagcagtactgtttgctagttttctgtgaatcattcagaccctggagaagccagcttcacttttgaaagctgagctgatccacttacaactgtgtggctaggttcccattactgagtctcagtcttcacaactgtaatataggaaaaacaacagtagctatcgtacagcgtagttgtaaagattcagtgagatcatgtacaaaaacagctcttaacaaggtcatcagtgaccttcactttgccaaactcaatggacattttttgtccccatctcactagacctctgggcagtggcatctggcacaaaggggctgctccttccccaaaacaccccggcaccggctcctgggatagccttctttcctgctattctttctttctggatgttcctcggtctccattgccaagtcctcttctatccaatttctaaatgttggcaaactgcaagagctcaattctatatcctcttatcttccccagcgacacacttttctcattgaacccattcagcccctccgctttacacaccatccaaatgttgctggcacacacttttatatccctagctcccacttctccgctggttgtcagactcaaatatcaaactacctgcttgagatctccatgtggaagtcatagaagagtctcaacccaatatgtcaaaaactgaactctccattgccccattcccaaacttagtttttcctcacctgcttaaatggtattgatactcaaccatgacttaagccagaaatctaagagtcattcacagcacctcctctccccctctcccaacatctgccatcaggtcctaaatttcatttgtgatatatatgttaaccgtatacgtttttctttatttctaccaccagcactgtctctcatctgaatgacggcaatcacctcctaactccactcctgtatctccacagtcagttctctgcccagcaaccgccatggtgtgtaacaaatgaaactgatcccagtactctgtgttccatccatcagtggcttcctcttgttcatagaataaaggatgaaacctgaaatacttcttcaaacttctccaggatctactcacaaaaatcctctggcacagctctcttcttctatcatttggctgcatttctacttgcctatttttcatactcggaacaatcatgctttttgtagagccagggccctcacatgtgttgctcaggtctttagtcagcaaactcttcttccttaatctagtggttaaaagccccagctctggagtcaaactgacaggggctgggtgactaaagacagtcttctggccaggcatggtggctcacatctgtaatcccagcacacagcctcccaggaggatcacctgagcccaggagtttgagaccagtctgggcaacgaagcaagacctatttgccaaaaaagaaaaagaaaaaaggccgggcatggtggctcacgcctataatctcagcactttgggaggccgaggcgggcagatcttgaggtcaagagatcgagaccatcctggccaacatggtgaaacctcatctctactaaaaatacaaacattagctgggcttggtggtgtgcatctatagtcccagctacttgggaggctgaaccaggagaattgcttgaacccgggagggagaggttaccgtgagccaagatcgcgccactgcactccagcctggtgacagaacaagactgtctccaaaaataaaaaaaagacaatctccttagtaaaactatgtaccttactttaatcatctgtaaaatggggataagaacagtagccacctcacatagtggtgaatattcaataaaacaaaatgtgtgaagcactgaaactactacctggcagaagaaaaacactcagtaaacattattgtcaaaaatccctatcatcctttagttctcatcttaaatgtttctgcttaaagcactctccattactctaaccctcagttttaatccattttatttcctagtactaatctaaattggtcatcaaatattgattttgagacttattgtccatttctgcctctcaaattacactctacagaacagggactttgtctgtgtttccttcagtcctggaaacctggcagaggagctgaggaactgagctttacaggctgagttctgtgaccctgtgattattatgttgaagccctcatccccagtacctctcaatgtgactttaattggaggcaggggctttaaagaggaaagtaagttaaagtgagaccatcaagttaaaattatgccctaattcagtctgtctggtgtatgtataagaagagagggaatttggatacacaaagagaaaccaggggtgtgcattcgagagaaaagattgtgtgaagatagagcaagaaggtggctagctggatgctcacaagaggggcctcaggggaaatcaactctgctgacaccttggtctttggcttccagcctccagaacggtgagaaaataaatgtcttttgtttacaccacctaatctgtagcatttttgttatatctaccataaaaactaatgcagtcagtaaagactgatgagtgaatggatgaatgtgtcaacccagtgctcagcacaaggtaagtatgcacaaaggttgactcctattcctgaaataatgatgatgaatgtaataacatctcaggagcaaatctaaccaatgcacattgaccaagtcactgagaaaaatatgtctcagtggcacttacagtgcttttcacctgtaatactgaagtgaaatgtgattagctatgaagatctgagaccttcctttaggagccagcacatactactctatgacttctgtttacttaatttgtacatgttggaacttgactgttttatggtagactcttggctatacaacatggaacactagacatttccatactcagtaaacaaatatttctcagacatgacagcaaaactagaaatgagaatattagattaatacttccaaaataacagcctcatcgttttaatcaacatgtccttgaacacgtttgaatgtgtgtgtaactgtgtgggaatgtgagctacatgtgtatttttccactgaaggtgaccataccatatgcaagagcaggatctcaaattagatattcagcataggtagccatattatccacatctaccaactgtcttcaaattaaagcccttctctagctggaacatgtatctgtcactggaaagtaggcagtgttgaaaatcatgacaaaattggcacatatcttgatagttgcatcatcttttctgtggcagtccccagtaatagagcttcatctaattcagcaaactattagctcataataagaaacagcatgtgtattgattcttttaatagatcttggaattaatacacatgattcctataaaaggactgtataaaaaaaatcaccaagttgattattgcacaatgaggtctcactcaaatggcataggctacggcagaaaggtaggcaattcctcttttgaaaaaaactctccatcttacagactgattctctcctgaggaagaaaaaatataatgaagtgctataattaggtatctcacatgtaagggaagataacaaaatcaggaacagcaaataggtttttactgagtgtcaactccattcaattagctgcagctacctagagggttgtattaagaagcccaaggtcgacagtaaacaatgccttggtgaaataatgatgttggctagggttgcaaaatgatgagtagatggccgctatgtaatttctactctgaaacagatgtcactaaagtctcttccggggccaaccttctatgactctctccttttttctcctcttccctcactcttgctcttggagttgggatgaataagttagcatctcctgagaatcccaactttctcctcttatataaagtggtcaggctcagttttcagtatcaggattcaaagcagcaacctctgtcattacaatcatgtgtcgctttggtataggcattgaaaagctgtaccagggtgctgactgtcacttaagtaattagactaaactataataaacaagaagagatcactgctggagacccacatttgttaatgacctccagggtcctctcccctggcaagagatagacagatgaggtaccaggagtgcaggcctccttgcacgtataatgacaacagccagacaacaatgcaacaaaaatggtcccatgtcctgttctgtgtgtatagggagagtgatgacaatcatcattaccaccagaactaccaaatttcctctccagttctttgatgcttctcaatcattgtcggagctaccctttaaagatgtctcaccatgaacagttactatgacaagatactaagaagagagtgtttcatttaaccccttccatcactacccctatgagacatgattgcctttacttgacaggaaaatgaggttcagggaggttaaatgtatgtagaagattttagcaagaatattctgacttgaaatctatgttcttaatgatttaggataccagctcacaactcaaagcatgaagcatgtggcaatactataggaggtaagagatctcatgacaggaaactcgggttattcattcattcatccatctagtcattcatccatgcatatatccatctctccactcagtcactgtgtcaacagatatttaccatgtaactatctctgtacttggtactggggcagaggtgagcaaaacagataaagcccctggcctcacagtgttcacagtctaatgaaagcacaaacatcaatcagtgacattactgtgcaatcacaaattgagataatacttgaaaggaaagtaatgggagcctatgacaaagatctggatttggggtagggtcagatttaagaaaatgagacctgagagctgaactgataggcaagttgacattaattaggtggaaggcaggtgaaagaatggggctagagaactaataaggagataataacatatgtagaggttcatggaggaagggaatataaagtattcaaggagctatgagccagagcacatcgagcaggtcaatgagggaaagagtggtatgagaaaaacctggaaaggcagagaggaggtggaccatattaaggtgcatagggtggcagtggaaaccactgaaaaatttgagagagaggaagacagtgggtggaagaaaggggacaactgtgattgttcagacttcagtgaccacaaacaatacagggagcatggtgagatcagaatggagatgcagcaacctgtaacaggtcacttagttcagatcagagacacttggtagctttgattaggtgatggtggtagagatgagcagaaatggatggatttaagaaatattgtggggtaaaatctaaagcacttactgataaattggatttgggaagatgaggaagcaggaggcaaggataatccctagatttctgacctgaccagatagatgttgctactcactggctggcaacttcacaaggtggccttgttgactttggaataccttttgggcatcctagtggagtggcctaaaagggagttaggttttacatgttaggagttcagaaaagaggtctggggtggagacattatcttgacagtcagttttatagctagaaatggttgaggctttgggatagatagagaaggggtactttggaaaacaatgttcatggaaagcaataaacattctcgtcaatcactatattcttctaatacacttcttccttttgttatgagcatctgcatctttcttcctcttgcgtttcaataaaagcttctatttttaattacacttcccttggttctaatttttaaaagtattttgcatatctgttttatactatgtatccctataaccactccaacttttgtagaatgaggagagaggaccaattactagttttcagaagatccacatgagactccaaatggtcaaattatcctgacagcgaacccagcaaggaatagattaaatttgaatagtgcactcaaaaggactatctttgagactctaagacgattcttgattcattcatttcgtgaaagccaaaatgtccgaaagtggtttgcggatgaggggactgaatcgtgaatttgaggcctaaagaatttcccaatgttcagccttatggtggattaaatttaccatgactaattggaggattcaaagctgttaggaacactagctattagggccatttttctcatcttcgatcttactgcttgactgattcatagctggaactgctaggccgttatggaaatggaaatgcagagatgaagcagttcccaatgtcaaaaacttccagggacatgtaaatacaatacacgtaccaagtaatgagtttaattacttaattattagatactgagcactaaaatttaactaacacctggttccataaggaaaaaaatacttcatttcgctgtacttatagctctttattatgccttttgaattatctgaaatccactgatgtacgggtaaaaaactcctgcagctagctcagtgtctgtccaaatggccacccagttttgtgcttgaaatccaggaccccactggtgtaggcatctgtggggaatctcctggtctgtgggttgtgaagaccatgggaaaagcgtggtatctgggctggagcgcaccattcctcaaggcacggtcccacatggcttcccttggctaggggagggagttccctgaccccttgtgcttcccaagtgaggcgacaccccaccctgcttcccctcgccccctgtgggctgcacccactgtctaaccagtcccagtgagatgagccaggtacctcagttggaaatgcagaaagcacctgccttctgcattgatctcgctggaagctgtagcccagagctgttcctattcggccatcttgacagccaccaccccatttttcaattttttttatgacaggctaactgtgggctttcctaagagacatgagagtagtatccttcccctacaatcctcaggcctagcatggtgtctggcatataacaaataaatcaatgcagcctctcaaggaatcctcaaaatacagcagaatcattctagaaaacaattcatttcgattaaagaaatgaacaccatagagatgttccattggaagacttttgaaccaaaacatttaattcgccagtcctgaccatatctataacaaaaggaactatgtctttaacgtatttttcttgaaagccagttcatatggttgagagagcttataaggaatactaaaatagggaatataatcagccttctgtttttgagcaaaagtgctgtcaactagagatggggctcttggaaaatactttatactgcctgttctcagtttttttcttcttaagagctacttcatttcattgttcaaagtttagtgagagccaaaagaaaatacaatctatttacaataaacctatactttccagaatcaccttaaattatttctgctaactctaagcataaatcaaaagttctgaaaagcagaatggcctaaagaggaaatatgtcatttgtgtagttttgggaggggagggagtctgttaggaaagataaattattattgtcctaagcaaaaggacagctaatgaattcctaaatgacagggtttaatcctcaggcttgttgactacaaggttatagagctttcttcctttccattgttaaggagatatttaaatgtaaacatcttttctaaccttggaaggaaactgatggaaaacagtgagtattttcttggtgcaatttaaatattaaattcaaacttaaagcaattgttcacacatgcatttgctagctcaagaacacaaacataatctgtgggaataagaatcacaataaatgaaataataatagaacaactgaatccatcaatttttctagcatatatacactaagcaaatagtttgcactttgcataggattcagcattgccaatattttatttctaataagccaggtataataagaaaagcaaaatgtattggccaggtgcagtggcccatgcctgtaatcccagcactttgggaggccaaagcgggcagatcacgaggtcaggagatacagaccatcctggctaacacggtgaaaccccatctctaccaaaaatacacacacataaaaaaaaatttgctgggcatggtggcaggcacctgtagtccccagctacttgggaggctgaggcagcagaatggcgtgaacccaggaggtggagttcgcaatgagccgagatcacaccactgcactccagcctgggtgacagagcgagactccatctcaaaaaataataataataataataataaaagaaaagaaaaatgtattgttagtcttaaatattttctggttttaaattgagtcgaaaactcatggctcaagttcatttaaagtccaagtctgaattctaaaggttaaatgctagtaccgttagttcctcaaattattcacttgttttttatttttgttacatgagagagagaaggaggaggagagagagagagagacagaaagagatatcacagaattagaacttgaatctcattcagtggatagggatgagaagaaaaatgaacattcacagagcgcctaacatgtttcacgtatccaagtatcacatcaggaactttcatacttatgatttcatttattcctaaaaattaagtaactaagtttcagaaaaatagagtgacttgctaaagataattcagtgactgagtggtggaatcccagttttgaagatagagctctttgactccaagaagaattctcaatccataaagctttactacaaattagggaaaatggcttatctttaaaatagcgtgtgaataaataaatgagtaaagtttccatggggacataggcagcaaattaacagaacacaatttaaaatgttggatgtaaactaataaacagatgcatgtcactaaaacgtcacatttttcatcgtaacagtgtattatctgttggcaaagacctcagtaaagctgtttttatacaacagaagcacagctggctaaaaacagaacaaatgtggtcaaccaactaaaattttcaattcgttcaatgccaagaatctgcatggaatgacgttttaaataaaacaacctgaaagtaagctgacccataacaatttggtttttatctttaataactttaaatttttggttaatgtctctataaacagcctacatattattcagggtaaaggctcaaatatattatactaaaattgcttttagacccagaaaattcctttgcatggaggtatgaaaaaggaacatttgaaattagcttgaaatttgggtgtatttcagatatgacatgccattcacattcatgtgtttccattccccatgaacaatgggctgcgtgggccagtatcaatcatctattaatccagaactttccatactacctattagttaataaagtacattgacatccattaccccatgtgatgggatatttaacacacttccagaacatagaataaaaataaaggggtttatactttacctagaaggctagtgacttaagaattttggtgggaagtttcatccactagaggaaaagtcttatgattatgtggaaattatttatcacatgcccccaacaaaccccacaacatcacaatagacaaatagtggtgctcaaatagtgaacattatggaaataagggagaacatacatctctacccattcccaatagttttgaacttaggtatttataaaattaatttcatgatgctgcacataaatcttaattctaatgtgcataaacagaaaaaagcaagttgtataattattctgtgttattatttttaaaagccctatatatcaaaccaaaacaaatcaatataatgccaccaatgtgaatatcattaggctcagcatcttaaactcagcatgatatccatcgggccataaatttgaaggaaaatattcaataccagtttcataaatcatattaacattaggagaaaatctattatagcacaaagtcttattcaagggaaaatcatgttcataggaattaaacaaacaaaaaaacacttgtggccctctgctctattatccttaaattttaggaaataactaattataggagagttttcagtcatgtaaatcagagagttagcaaaacaatggttatattatgacagcaatcaataatagcatgcatttttattaaaacattactttctaaatttgtagggctttaaattgtctagcagaacacagcttgaagtatgatatatggatggaggttcatagaaaatatagtgtatgggaaatacagactccactcaggagatatatctgatttaaacacatgcatatatatgtgacaatatatatctaattatatactaaatctcacagaactacataaatatcttcttgcttgctttctacagtttctttaagaaaatattatttaagaggtgacaagtttcttgttgttgttgagcaacttgaattacttagtttcttgcagaactgtgtcttcttccagctagagtgtaaaatcacttggaatcataacatattcaaagagttttgtcttaacaaatccatgagtgatcaacttccttccatcctcaacaaagctgagaggtagaccttgccagttctaacctagcactggagtttaggtttattagatttagccagaaccttcaagtgattcttgaaatgaactttttaaagagaattaattaagcccaatttctagcctacatgattcccatgactatacatttatattagaattgatattcaaaactaactataaatatttaaaatccttttatcaacaaatgaaactagatcagcacagagaaagttgaactcaacttctaatttcctcctcttggctctatcaaacaagagcaaatcaaactggctgctaagagaactgatgaccaagacagactgggaaatgagacttctagggagtatgtcaccgtcttaaaggcctttctagactggatgaatagaaataactggcagataaaactgataaactgatttgaaaacatctaagtaaacatggccacatgcaaaggtatccagagaaagataattctagaatttgcagataaaactgctgaattgctttttggagcctgtgaagaattacagcagaggtattctaacaaagcagaggtattcaaacaaataagactcttagtattcaacctcccattgggcaaaaactagaagctggcacccaagagagaaagcacctctttcttgtcccccaagcatgtggcttggactggattttaccccaagtcccactgtagccagaaactttcatgtagggcataacctgtgcaactcacatatggttgtcctggatctaaatactgtataagaataaatatctctttatcaaaagaactaactacagctagccatgtgttacttaacaatggggatacatgctgagaagtatactagtatatttcacccttgtgcaaacatcatagagtgtactcatacaaacctagatggtacagctctctgcacagctaggctatatgctatacccttcagctcctaggttacaaaggtatagagcatgttactcacttaatactgtagttaatggtaacataatgataagtattcatgtatctaaataaatatagaaaagatacagtaaaactatggtataaaagataagaaatatggtattcctatatagggcacttaccatgaatggagcttgttggattggaagttgctttgggtgagtcagtgagtaaggggtgactgaatttgaaggcctggggcattactgtacatttctatagactttctgtacactgtatacttaggctatactaaatgaatcttctaaatttatgtaataaattaatcagcttactggaactttttaactttatcaactttaattttcttaactttttgacttttgtaataacatgtagcttaaaacacaaatacactgtacaggtatacaaaaatattttctttctttattctatttttaaaaccttttattttttactttttacacttttgtgttaaaaaccaacacacacacacacattagtctaggtctacacaaggtcaggatcatcagtatcactctcttctatgtccacatcttgtcccactgaaaggccttcaggggcactcaccatggagccgtcttctcctatgataacaatgcattcttctgcaatagtccctgaaggacctgcttgaagcggttttaaagttatctttttaaaaaaataataaatacactctaaaataacaataaaaaagtatagtatagtaagggtacaaactagtaacatagtcgtttattatcaagtattatgtactgaacataactgtacgtgtgatacttttatacgactggcagcatagctttgtttacaccagcactgctatgaacaagggaataatgcaatggactacaacgtaaagacagctacgacattgcaaggcagtaggaaattttcagctccattataatcttatagggccaccttcatacatgcggtctgtggttgactgaaattttatgcagtgcatgactactataaccttacaagcttgataaaaggcaggtaaaattctaaaatgcactgtttcagaagggttggtggaagcttggcaaaggtgttcacgaagagccagcatggctcccaaaggcacctcagtttctatgtttgttggataagcccagtagatccaaagaatgctacaaaatacaacatatagtatataaagctaccataattctgctttaggggaggatggagaagaaaagattagatgaacaaaggaagaaaagagtgaagaaaatgaagaaaaggagaaggaagaagaaagtctaagaaacataaaagaaaaaagaatggagaaaagatatcttagaaaatggaaaatgaaggaattaagaagaatcaggatatctgcaagttatatgacatactctctcacaatacctttgcgaagcatgtcattttcatctaacacagcagggctcaagcaagagtaatatagtaatattcaaaaagaccaggggtaggtagtcagttttccacctttaccaatatggaggaacactgatgtaaagaaaactatcacctatctttttagggaggcatttttagtgtataatcaggactttagaaggcaaactttctttaggctgtacccaccattgaccttaactgagaacacctctaccaaggtcagggggccaagactctccactccaggtgatgaaatcatacagtttcgatatgatttcacaatatgaactgtagatttttgataaagtaaaggcctggccagaaaaagggcagaaacctatatgaactttaaggtggtcagaaagctcagctctacttaagaaacacttttagactcactttagtaggctatcaaaacaaaaacaaaaacaaaaacaaaaaaagacacaaaaaggaaaaaaaaaatagttgtaccttcaagatatctcttgcaggaagcctagtccatcaagaaataaaccttcatctcccgattccaaaaatcagataccagcagttctcacaatgcctctagtggtaattctgtggttttatatcaagttctctatcctccccagagactcacagaaatggcatctcagcacttttaatccattactccccattaagtccattagttacataagcctagaagataccagtataggtcagcatgtgccaaagtgtgtttccacaagcactcaacgctgctagatgctaaaacacgctctgtgaacaaaagcgcttgctgtcaaatgcttttgagagatgctagagttaaacaaagctaaagttgtttatttgctgccagatttctgggagcctttcagatgccaatgcagcctgtggcagtgcaggaaagagaccaagaatgcaacatttcccacacattcttcactagggtctcttcatcttcgaattttgctgagcatcatcacagtcaactgctctaatgaacatattttgggaaatatacaaagaagaggtcagctaggtcatgtgagaaatccatgtttcgttcattgctcacacattaaattttctgcacaaacacattattctctgtgaaattatccttcactcgtagggaaaacaacaatagaagtcctctgcatctaaatccaaagggatctgagctgttctacgcatatttactgtgttgcttaagaatgtctcatggttctttcctatggcaatctccattccattattcaaaaatacaaattaatcacattctaagcaattgttcagtttccttcatttgtatgtggttgcagtctgtaagtgaaattccttaatttcttttctcaaagaaagcttctatccatacaaaacagtccccaaacccccaaattttgggctctaatatgagttaagtagaaaggtaaatgctaatgtttcattaatcctaacgcttgaatttcaccccaacctctgcagtgttctgctctctctgaagtgcttgtttgcttttcagttccccaaatttggctctggtaaaaacaaaacaaaacaaacaaacaaacactaatgggaacagtaactgtgttttgtataatttggggccattaccagctactttatgcttcatttgcgtacttgcgtgtattagatacattttgttaagttcacctaaggatatttccctcaatgggcacaaattcatggtgcctataaggtgactttagtacagcttcatcatctacactaatatttccagcagcccctcaaaagcgagatattttcttgaaagtaaaataacaaaacttactgtatgtctgatactgcagaggccacttaaattgtctataataagtccaaggaaaggatcgttgaagttaactggccttgggaatttcaagtacacctccctttgaaataaaaccatttccaaagaacgtcatgtcaaatgcacatctccctccagaaaattgtgttttcttttcaccccacccagaacataactgaatatcattttgctgggtagggaacctccctaacctgccttaagtctcatctatttccatttaaccatagttcccagctaacactacctctttcccaagtttacctctggcaagacaaaaaggatggtctttatgaacagatggtcttttcaaggtaaagtagttacatttaaatacagataaatgtactgtaaaaaacggctttaaaagaatttaggtctttaagggggaaaatatgagagcacaagacactattctttaattacatgagatttcttttttcttcccttgaagacaaaaccaattcctaatgaagcataatgaatcgtaaagaggcaccaatgctcatcccaacagatgtttattgattggtgttgactgaacacaaacacaagggtgttgcttactattgtcagtaagtggtgggaagcagcaccagttccccctggttattttacctttcaaagacaagctgacaaatttattttgtcacgagcagctgtgttcttatttttataagggttggcttacaactaagaaagcaagcggagggaacagccttttggtgtccaatgtgttatctggcaaggacagattgttttagggtgcaatggaaaagatttttaatgaaactacatttcaaacgagcagcatatgcttgattttcccttctgctactcatcctgccatttgttaatttttgttattgttgttctccgggactcctaaattttcatacaagctgtctcgtccggcactaacacagcttggggcgaattaatgcttgggatgcaaaaacctgcacgtcccactccagccatttttttttttttcatttctaaaatttctacattcaatcagggtttaaccggtgaactagttgacggaacaagcagggattaaaaaaaaaaaattcctcctctttgtgagtccttggagccccagagccagaaaatgtgacttcagaatatgtgtggacttgtcagcagctcagctgcacacaattatggggtcagagcccagattggaggtctggagaaactctgaaattgggaattaggacaaaatttttttctttttaacaccgtaatgccacatattaatttaaatgattctctcagaatgattctgtggcccagttaaatgaagttcaaggaaatgaatttcagcctttgacactctgagtcctatttgaaagtagtcggctttacaagattaaaaacaaattacagggaatacgaaatctttgattagcaggtgctttgatagctgcaagaatattttttctcaaaaatgtgaacacacatgggagaggcaccactattattatctttgtgtggaaggccttataatgaggattccattgtgtccagagactgaggacatgaattgctatgtctgaagggtcctggttcaagaggtgatttcagtaagacacagctgatagatagaacctaaggtttcatgggttcataaactctctttttttgctaacctcccataatcaattgaagaatttaagggactcacccctttctgtaggattcccttcataactaatgggaggcagaacttttcaacagagaaagagaatgctcgacatttttcaataccatgtgcatcaaccaatgggagaaaagggtcttggaagtttagacagagtctttggtcagctctgagctcaggaagactgaagtccatgtccaggttgccccattcactcattgtatgaccttgggcaagatacgtcaattctaaggagttcagttttctcgtctatactgtgggcatttcaagggtcactgtgcagatgaaacgagttaccacagggtgtggcatacagtaaaaacaagttaaatggcaacaaaatataatcagaaattgcaccaacgtcagtgccttattccatctcatttctcccattcagttagtttccaagttataagggttcaaccccttcatgctaggccctgtgcagacatgccttgctccatcacatgttcagccttgaatggataggaatgtccactgcttggtcactgttacagaactacacatatgagatgctccatcattatgtaactcatggaccagctagcaagatggcactagtgtcctagtgaggatgggtactcagaaccaagatattagagacagaatgtgccctgttaagttcagaacatataaagtaaatactctagagtttcagactaacttgatggaatattcaagaggcttgataagccctgaatggggccttgtgagacatagggccacttaaccttggacagtaagaatattattgccagcaactcaagtgtgtctctcatgaagaactggggctacctgtgaagcttggttcactagccatccccagactattccttggcatgtttggctgggaaggtatccttggcgctcactgtagtatcatacatttcagtagctctatgggtcagggttgatattctcaccaagcctccagcctaaacctctgagggtgcctattcttcattcctccagtgtcacctgtctcacacggggccagtcagctttttcctgcaggttccatcctgccccagattctgaaccaatcaaactccctgacaagtggaatccaagtcctatgagttcacagcttaaagtcttcacagcaagtcagaccaatgcctgaccctgctctgctcctgcaagtggcttataccctagtttagctcactgagtttctcttgtcttattcagtacaggtctcagtagtactcctgttcatttgggattggttttctaccttgtctcctcgaggttctctggaaaacagaagcaaaccagtatttgctggcccctacctagtgctttcatcaaattgatctacatgttgctcttcagtcacaggctccctcacttccgtatttttgctcctgacttatctcttcctcaaccccattctcaatctcagctcctctactgataaaatccctcccagttgaataccaactcttccatgaacctcagctagacagggtgtgtctccctcctctaactcttaaagtacttggtttctcaattctggtgcttctcactgcttcccatgatggcaattactgacatgtcttctctttctggttaaactcttgactgtcttccaaatgcatcttgccttatccactcgcatttcctctaatctgtcttccatcctaaccgtatagtgacgctcttgaaacacaattctgattccctctgtttctggccttcagtcatttcctaccatattaaaaatagagacttggatcccaaacgaagcctagaaggctttagttggccccattatctttactgccttatcttgcatttttggtcttctcttgccttgtgctcccaccacaccaacctctctcttctgccacaggccctctgcacatgctgtatccctccccaacctctgtctctgccttcactgacacctattcatcccttacaacccaattcaatcatgttttaaagaagatctcttgtggtctttccaactaggccagttttccctaagatatcctaccacaaacatgtcttctttatagcataaagatgtaattttaagttttttattaatttcctgctatcccactagattgtaacctccctgatggcaagaaccatgttagattttgttcaacatttcatccccataagttctgagaatatttatataatagttgctcaattaaatatttgctgattgaagttattttgggccaaagaccaggtttcatttttcttctcagcccactgatttctggcacaaaggagaggttccataactaactgttcaccaccaatgaaaatacaggtataatgtttaaaagcttcctatttcttcttgtggtactattaagtaggaccagagcagcagtacttcacaggggtagtgtggcatcttcaagtacaatgatttgtaggggataaagaaaagaaaaaaaaaacccacaaaactagtttgtgccacatataaggaagaatatggttctcttgggcaaaaatggcattgttttcaacaactgatatggactgcctcataattgctatagccttagcaatctatactggccataaaggcaagccaaagggaactgttatgactccagagagttaccattgcctgtctattaggccaagttgtaccccaaccccaaaatgacagatgatttgctacacagtgcccaagagaaggaagaataataaaagaaaagccgtgttctcattctgtgcatagttttgcctcacttcgtacagtaagtccaggagtcttattttccaaagtaaaaatggtgaaatttgtctttaaacactgcttctaaatgtgttggttagatgcttcatttctacaattaaacacctacctactggcttcagcaccaggtatttaggccatcctggcctagttccactgactattccagtgtctataaaacaccttcaccaagcatgagaaacaaacacagactttattttctacctcatctgtcttgcatttccttgtgcttaatactgtgacatttaagtggcagtgacacaatcagcaaacctagtgaaggatgagtctatgtaaaggcaaccatgtttgcgggcagagaatatcaactttatacgtacctaaatgactgctgtgtgcacagcagccaagcccaataaatgttaaatcacaaaactcacactataagctgaaagtgcctttaggtgtgtgaattccagtttcatgttgcaaagctacctaatattctaaggttgtcgggggagatatggaaattgagtctatagtagagagaaaagttctacaccaactccagaccttatcagtggtcaatataccaacccaacaaaagcaggttgcattctaccacggctattcattacaaataattttacttatattcagtgccaatgcccagccttctctagtccctgttctagctttacttttcttcattgcactaatcgccacttaacatgtgcatattttacttatttttttgtgggccctcattcccctcaaccaaaatgcaaactaagaagacagagatttttatcagttttattcattactgtatcccaagaagctaggatacaggggattctctctgagattatttgctggcaaatgaatgagattcttggcatttgctaggcactgttcctttcgctttccatgaattagaagaaggcaacataaatgaatagccaaaagcttgggcctcagagtgagataacctaagtcccaaaccttatgaagtgtttatcttgggcaagtctcttaaactctctgtgtcccaagtggctacctctaaaagggagatgataaaaaggacactacataaaagggctactatgaaatgtaatgagattataaatatactgtaagatgctttgcatagttcctggccacacagtaactaaacaacaaatgttagccattatttttattttctttctattatttttataattattaactattaaaataaaggtaggaactattatcattctctttctacaattgacggtacaaagaatgcttctgcttgaagttgcaaaatgttacaaatggttaaaaaaacattagagaaagagagcaggagagaaggaagagtaagaagcgttacaggaagaatcaagagatactagcctagaaataaaaagactcatcctggagaacttggttaaggtgggttctgtgagcatgtgggagcctggtaggtccagaatagacacttcttatagcagatctagaactggcaacgaactgtagtaagccaaagagtgaggtaggacctaacagattggactaggaatccaacctacatgacctagatttctgattatctggctccacttcctttaccgtcacagagagtaaggtctccagttcctcccctgtactagaatgctcccagacaacctaggtgattagtgagagtttaagttctctactctgaaggacttgggttcagacacaactcaatcacttataagcttagtgaccttggactgacccttaatttcttcatttgcaaaatgaggaaactaactgcatcttatcccatagggttgccatgaagataaaatgagatggctcccaacaagtactggatgctgtctggggggtaaaggaagctttcaataatcacataaacagaagtagcattcaacctggctgagcaaatgctttagataaaatcgaagttctttctcttccctgccctgactccccagaagagaataatatatggtataagcaaatccaaaaatacccgctaaaggaagttaacaatcagcaactatcattcttaatgtcttgggcaaatcagcatacttttcaaatacaaaaaacacaaacaaacaaacaaacaaataacacctcaaataattaagtactttatgaaaataagtcaaagtttctttagaaactttgtcttaagaatcagacaaaggccagcccaccacctatgtcatggaggggtcataaggaaagagaatgaagaaagagaaaaagaaaaaggggtgaaattctaatatttaacatctccaggcacacgccccagcctctcacgcagccctacctaccacaaccaaccaccacatttgatgcttgaaatctacctaaatcaaatcgatatttgccttagcactttccaaatatctaggcttcccctagaaatacttacaagggagatgatattcagtttagactcaaaggccagttgtttcaaatgtcaagtgaaataatatctcctcctccttcatcgtgctcataaacttatacaacaaagacatcctgaccctcagaggtcagagaactcaagcaagagaacgagaatgcaagatatctccaaggttattttggaactaggcatggcttgaagacacatctaatggtgaagggcttttaattgagatgctgcacaccacctggttggggttggggtctctgggtgggtggatcaggcagtgggggacagtgaaaactggtgaaattatcttggaatgtgcttttatccatagagcttggatatacccttccttagctgatcagagagggcccgggaaccaaaagacattaagatcttagaatgcattttctactctctcattttatagatagcacaactgagtcccagataaaataaaagtgtttttcccaatatcatacatctgctgatggtcctgacttagccactaggcaagtcccccagactccagcctgcggttgcttccatctatcaaggcctcttttcaagctacttggaaggctctcctagcaaagatgactacaatttatgctcccttcacaacattttgattgatttttggtggaaaagtaggcatccctgaagcatttctttaaaataaatccagcctgccaaaccagcactgatgtacaaccctagtagaagaatccaccattggccacaataatagcaaaaagggtaatgagaaataaacgtatttaagtttacaagcctcgaagaggttatcacacacaatgacaggaatctttgtgtcaggactgaacaagtaaccctgatttaactttacattttgatagagtcagccgcgttgcagtcattgtttcgtctaacaattaaaagcggaatttgaaactattcctgtccatagttccccttaaaaaatctaaagcaaagagattctctcatgccaggattgaatgaatttataattatctatctgtagctccaggacaaaagacttaaacacaaaaaagccaaataaaccaaggacaaatttctgatagttctagttaccctgcctattaaatgatagacacattaaaagaaagagagtgatatttggaatattcagaagttggtggtccatttctcatgctttgttttagtatcactctttcttagacgaaagacagtcatgaagttgtttgtgaagactctcatcagacaagagtacagtgttaataaatgcatttagcaagcatttactatgtgccaaacactatgctatgtatgggctgtcatgtacaatctcagttcatcctcataataaacctgtgggtaagtattattgctaatttcagtttaaagaaattagcaataatacttgaggaaactgaggcctaaaacaggcaaagtaacttactccagttgcatggctaataacttgcaatttggactcaaattccaaagcctgtatgtttttactcgctaaagtttgtggtcttggccagcaaatttcaagaaggcctgtcataaagccgtgctgagagggccaccttacatgccaattacaaccttatttaaaatttaaagtacgttatttcttcctgaaatggaaaataaaccattagatatctacaatattactatgctttagagtcccaaaatcactcatgtataattagttatacccatgatgtaaatattttaaatattattaaatgccttactataaatattagaggctggaatagttaaacagccaattaactagctagtggccatctctttacctctcagcatttctactctgttatctgaaacaacccatacaagtatctaagtagaagtttagaaacaacggggctttggggagctgctgaggagggacactttgcaacctccaaaattactgcaaaactatgtgcatatgcctatccaatagtttttcagtaattttggaggtttcaaagtgtccctcctgcccagctccccaaagcccatacagaaacctatttgagaagctttcgatctaagaaatgggatctgggaccttaaaaaaaggctaaaactcaatggtctggatatttgtgagactatattccaaccagtacaccaggttactgcttcccagactctgttcttcaaaagacaatgtgtcaagtttccaaattatggggggcaagggtagtgaaaagtgagtgtgaacctaacagacaactaactgaatacttccctctgcatctggaggcttaggaattcagcagacagacataagcaaaccattctgtgaaattgttagggtgctattctttctgacattgtgttggtttcctattgaacatctgaagactgttttaacatgtgtgcctaaaaatgtcacactgaggctgagagagcacagagccaggggccacccagactttcaaatcagctctcagaagcagccagggaaattccaaccttggtcttgtggtcctcaagaactacagaagcatggcagaattttagattcacaggttgtttgtacagttagtgcatttatacctaactcctcaaagccagagatattttttataactcagcattgccctcattgctttcttatcacatattttgcatgtgtttccatctccaagattcagggaaaacaagatacttagttgggaatgtctagagtggagaccttataaaaattacttgacagacttgggagaggaaagcattttgcaaaacaccagctatgagaataaacaattttagagaatcccttggggacattttttttcctatggatcccaaaatcttttttaaatagaaacatctcaggcaggggtaagaaattattggttaagcccatttagaacgtgtacgctgtcatggaacattcctatcaatggggcacattgaaactctacactaagatatggtggggctgtggtgctttactggataaataagaaggggtttggtcgctatactcccaccctgcccataaatgagtaagcccgtgtgacaagagtacatgttttcgaaaagaaagaaactgtgaaactgagcgtcaccatcctgccacataaaaagcaacagaaatgagaattaaattcagcactttcttaatgggagactgaggaaatctgggagatgaaacagtagctcttctccagtccttcccagcataataaggtcagctgacaacactgttcgacagagaagacttaatgtgtctgacagatggcaaatacaccatattgacttttcttcctaatttaacaaatttgaatcttttgtcaattttctttccccagtgaaaagatattctaaaacaccacttaagcttacattgctcttttccccctctccctcttacacattaagtttgacactatctaaagaaactgaagctaactcactaaattaactcacctttccagctcttcatgatcatcacaaatttgggcattggcatgaatgttaattcctcatctctgccaactgtaaggcagatactcacttcaggccagaggaaggtggctgaatggacaacaaggattccttgaactcttaaaaataacacacaaaagtgtgcatctatattcttcatacttcaaaactatgtatctatgttcttcaagagtccccagttttgcccagttcctgaaggtataatgcctctggctttagctataggttgttataattagccctcattctacagtttctaaccggactttggaattttatggggtttgtctatataagatggatgggatgatagcagagaagagcttcaaactagtggagctcctggatcacaaagctgtgtaagtcatcccaagtgtgactcaagttcagcctggagaagccatggccaggccaaggatagcttgtcccacaaggaggcaaggggccgtttcccaccactgcctcatcccttccaccatgtgaggacacagggagaagatagcatctatgaaccagaaagtgggcattcaccagacaacaaagctgccagtgtcttgatcttgaacttcccagcctcaagaatgtgagaaaaaaatgttggtcgtttataagccacccagtttgtggtattaccttagagcatcccaaatgaactaaactactgttttcataatttacaatgtgtcctaaaattaattataatcctaactatgaacatgaaattctgccaatgtgaaaataacattagtttctcttgacaacctttgtagttatgttacccaaaagtatctatagacaaagcatctgaagattttagtggttattcactattataaacaacaaccacaaaaaacccaccaccaacaaaaaaaacactgggtccatggagaaataagtttgaaaaatatttcattatgcaaagtaaaatggatttattacaaaaaccttcttagagcatctcatggaaatggagtttagaagaatactatgctttagattattcctgaatccagacacattttttttaaattttaactcaaaggattaaaatttccacacttggaatgcccctgtatgaggaagaactgaacgctgtcctgtcttgtctaagtttcagagtaatccctatgtttctagctgattagctggtttcataaggcaaagggccttctgaaaatgggccattgcttctgtgacaaattcaatatccaaattctattgctgcccttgaactgtgctctctgatttcctgctgcaaaaatgtaggccatcagtggggacgtgaaaaatttgttcattacacacagattcccacagtggcagtgcctggccacattaccgaacctatagataacatcacagcacctgacatccagcccacatttcctcagcctcagagtaaagaacataccacggtgcccgcacattaacgcagagagatgcccttgataattaacagttcttatggagtctctcgaatgctaaatggtcaaatagagaagttaaacacacataaaacatttaatgtgaaatgaggcaaatatgccaaattaacctgaaatgcacacaaaagcctttcagctctggaatcgatattaatcattttctggaattcaagaaaaagtctgatgtggttaatttaaaattgtattttatgatagagaacaaaaatatcccacaggattcaaggtatcagtttacactactgccactcctttttgctgccagggtcagcaaaaagaaaaaaaaaattattgatctggtattaaaaatcagttgacttcacttctttctgaacaggtattctttgaccactaagcactggctagtcttacctctctctagtgacaacatgaagagataaatagactattcaaacagagctcttcgcgttacattagctgaataaatagtgatgtatggtctcttttctcaagcactgccttagcttgtgaagatgagagtgaggaagatggggcttatgaatcctatttgaatatttaaataaacacaaaataacatccctgaagatggttgtttaagtggaaaaagaaggtatgaaaatctgtcttttaattgtagcttttggggcaacaaaaaatcccccaagaaacttttgagattccagtgtcaagtgaaatcacagaagaaaaaaaaaattaatttgtggttttataagcagtatccagaggaaatgggatgccagtcccacagggttttcaaaggctgcaaagctagcacaaaccaattcacctaaagtgaagtatattatcaataactaactgtgatcactttttggccttccagctaagatcaagtgtaataactaactttactttgggaatatttcacaatgaatttttgccctctttaatctgctttaagatttctgtgctcaatttccggtatatgccgtacttgcagaaagggatgaagttctgagctaggttaagtgcttgtggctaactacaaatgtgttaacacaatgtaattaggtcatcaaacagcatcatgtttattaggtaccaatagataaaaaaagggagcaggcctagaccagcacatcagccccagtccctactgtcttggaactgggattctgagacatctccgtggcttctacacattactggcataattactaaatccaaagttttctatttgtaaattagagattctagcaaggaaaagatgaagtcctatgcatcgtgcattagccaggattctttttttgattttttttttcattctgttgcccaggctggagcacaatgccactatctcagctcactgcaacccccacctccctggctcaagcgatcctcccacctcagtcttccaagtagctgggactagaggcatgtgccaccatgcccagctaatatttgtattttttgtagacatggggtttggctacgttgcccaggctggcctcaaactcctgagctcaagcagtcggcccacctcagtctcccaaagtgctaggattagaggtatgtgccaccactcccagcaggtcaggactcttttggaacaaaaagaaggggtatatttattggttcacataaacacatcctcaggaatgttaaggcagaaccagtacagtcctaccttcctattggcagttttactttctatggtttcaagttgcctacaatcaactatggcctgaaaataagtgactagagtacaatattctgagagcaagaaaaagaccacaattattaactttgtactacaatatattggtatagttgtactattttattagtagtaattgatctcttactgtgtctaatttataaattaaacttcatcgtaactatgtacatataggaaaaaacagtacaaacagaatttggtaccatctgcagttttaggcatccgctggggtcttagaatgtattccctttagataaggcggactaatgtatagtcctttccctctccagtgttggcttcattctctcagaataaagatgacaacctggctgtggaaggtggcctcaggaagctcccaacctagtaatcagagaagaatgagaggattgccccattagtaccagaaaatccctatattagcaaagacagggacctgatttggtcaagtctccattcctgtattacccctgtggccaaaggggattgagtaactataattaatccagtcatgagggaggaagagttgctgcatagaccaaaaacaagagcctctacgtactgaagtgatagggcaaagaacatatatttacgaattataaccaagtctaaattgtattcgaattcctagaagatcaatgttacttaactttcctgtgaataatactcttgcctcttactaagtagcacactatccctaatattccaaggtgaaactcagtcactgagaattgggcatgctgcaccagactgttttcccagtagtagcaggagatatgctgaacctcatattctttctctttactgctttattatcattaatgccttagactgaatttctccagaactgatcatgagacaggaatctgagtacaaatggattatttgagagatgggcccaggaagcaccattaggggagaagtggaagtaagacaggggaaaaaagaaatctactacaagaaacatttataagaatattagtgcttcaagcaattggggctcaaatccactggggggggctctggaagacagcgtggaacatgctaccctctgagttttcgcacttacgacataggaagctggggaatttatcctcaaattcccactggtattggctaaacattgttcctaaagtcaataattcctgacactttaggcctacactctacaccagcaagagaaagccccagagtgcagagtaaaaggcatgtgaaatagaataaccttagcacatatgagaagggtgagtcccagagaatggaaccaaggcacacagccttggctaataccagtaacacacacttatgaaaatgtgccttcatttattcaaatacttaccaagctcctattaagtttgagttttcttctagatgatgggcatacactgagggacaaaacaaagattattgtcttatttaatacccagcacaactgggcggggcaggggcagattccaggggctacatgtcataatcctcttcacaacagcaacttcaaatgtggtccctaatcttaagagtagcagcagggtcagcagtattgggcttcaccattactaagccaggtgtgttgaggtctatgatccagtaatgaacctgaatcagaaatggaatctcagataggtattggaaaagtgggagagttcccatcgtaggacagtgagttacattttgtttaggaaactcttcagggacatcttctctgtggtggcttgtgtccagaggcactgcagagttgcctgctctaactcttgacagttgagtggggcatgcagcttctggacatggaaaggactaaagttaatttgcccatctggggattgaactggcatcagtgacttcaaatgtgccctgcagagcccaaatgatctccattacaaacacagaatgctccgccttccaaatgccacagaattccattttatctgcactggcagggtaaggcagagtatttgccaaaactccagacatagggggttatttgtaaaaccttagagtattatcaggtgttgctttcaataaaccattacacttgtatagaaagtaacaaactacgtggtctaaggaccagttatccctattccaaaaaataaagtgtaagtaagtaaagcaattttacattgaatcttgaacatctatgtacataatttagaatttgctaaaaggtaattttatctgtgctgattatctttaccatttggcatttcccatctcagggcaatgagtacaacttcacaagtccagctccgcttagctgtgagtactcaatttcactaaagacttaaacagaaaattaaaaatctgtgagaattgggatgagtcctgtctgtcttaaagcagggtgagcaaatatatgtggcacatgcccttaagagacattattaattgatcacctctcactttcacactgagcctaggctgaaccttagaatccgtcacagcgcaggtgtccactcagtcatgactggccttccagaactgggtactggaaatgaaacctacttgacacttaggatacatttatagagcctggtcccctcagtactatactcccctctcacaaacagagagagagaaaaaaaagaggaagaggagagcagagaaaggatgggggaaggaatgagaggaagaaaaaaaactctgaaccaagtatcacttcctttgcggtctgcacatgtcaaggaatactccattttaagcatattataacggcaaaaagaaaaaagcactatcaatagcggttcacactttatggctgctcaccctgaaactgtagcagctaactttcttgggaaaactcagacagactcattctttccaaaaacaaggaaagaagaaaaagaatttcccacatccttaagataactgagaagctctcagtaggagtaaactgtccaaataaaattcaacggcaccccctttggaaggatagttaagaaacaccacatgtacaaagaaggattaagattccaaatactgtcttttctccaactcgatttttccttcttgtgcccttacttctcaaacagttattccctttgctatatcacccagaagtctgtgattggatctcccttggactccaaagggctctgggtatgagaaagtagtccaaaatatatatatatatatatatatatatatatatatatatatatacacacacacacacacacacacacacacatatatacacacacacacacacacacacatatatatgtgtacatatatgtctaggatttactatagaaaatttttaaaatatttttatgtatttatatttataatatatttacatatttagttttatatatatttatataaatatatacatatatttatataaatatatacatatatttatatatatataaatatatttatataaatatataaatatatatatataaatatattttgtattatatattaaaatatatacgtatatatgtgtatatatgtataggatttactatagaaaaatatttcatatttttatatattcatatattttatattatatattaaaaatatatgtacgtatgtataggatttatatacatatatgtatatatgtataggatttactatagaaaaatattttatattttatatatattaaaaaataaaaaaataaaaatataaaatatataaaatatataaaaatataaaatatatctatatatatctatattatatatagatatgaagatataaaaaatctatatattttatatagatataaaatatataattatataaataatatagacataaaaatatatatttatatattttttctataggaaatcctatatatatttatttatttatttaggactgcttttcctgaaactctgtaaaagttttcatcatactagctatttcttgtgatgagccagatcatcattcacctggtataaatgagcttggctgtgaacacggttagaaattagagccaaggatgatctattagttcatcgtgtgtgtctcatgggacaaaagcaaatgtgtttctctaaagagttttcttgaatggtttcccaagtccaacttgaaatcacattcacaatcttgtcattttcctctttcttgcagcacaccagtaattagatgttttaacacgtcatggcaatgatatctaacatgaaggcaaactgtattaagacacagcatcacccagttttatactgtaagctcatttccaaacattatttgtttttataaatttgagcgaggctgactctttcctctctgcctttaattaataaggaaagcttaatatgcacttttttttcatcaatctggcactaaaaatcctgaattccttttgtagtaatttgaaagaagagtttggggctattaggagaaattcacattaggcatttccctacatggcctacttatgtttttcaaagtgaagggatatttcaaggaaagaaagacttggggtactagagatgtctgccccatctaaagtcttatttttctatttcctatatcaagaagccttaggtacattttagtaacatagcttgaaatatattttgaaaaggggaacaagacgtaacctgacccactacagaaaaatgcctcatgtagatccttgaatgaatttatgactgtaaaagtccctctcttttgtttcctgggtaattatttcacacatttgggaggtttatagggaatgcgtatcagcttttcaagtaaaaagtgtgagtctctgactcttcctggaaatctggaagcaacagagaatgagaaattctcaggcagcctccaaaattgagcaagagatactgcaggtcaccttcagtgctgaatattccaaagttaacttcgttaaaaatgcacaaacaacctgataaaatatctgattttaccttttaaaagtaggattaaaaatttaggaagcttcgtgacttactctcgcatctctctttgatatttctttgtttggtatttctctcacctcttatgccctggtggagtctattgttggtttatgtgtaacatgatcgaataaagcaaaattgtaaacattttctttttaaataaatagacttttacctgaacattataatcacagtatctcattcatccattcactcattcattcatccatctattcattcattcacccattcatttattcactcaggtattttctgagttctttctgtgtatctggcgctcctctaagcagtggggatacacatgtcccctgttctcatgagcttacagtctcctggtgaaggattttaatcaaatcatcacacttgtgcctaagggtttcaaactgagataaggatctcaaaataaaggagcaaacacccgaaggatcaaggacgacttccctgtgggggtggtccctgagccaagggcttcagcagaagcagaggttaagtaagtaggaagtaggacaagccctccaagataggggaatgcagttagggcctcgagcaggaggaaacaggggcaaagctctgaaagtaaaggacaggtagtatttgctgagctactctaagacagattctcccacctatgctgacagcatgcacaatttcagctcaatgaatacaaatgaatgctctaagtattttttagattctctagattatgcacattgaggagcagtttggggtagggatgatggaggtctggccattagactcaggctttaaagaggttctgggaaggggagccaatctgaagtacctggaaattggaaaaaatagatgaacagtgattttatctggcttccaatggcagataaatttcctttcgggaaaggcagatattctcatttcaagccaggctcctctgccctcactttagcatatgaggaaactgagctcttgagttcctggaaacctttgagaatatggagacagccttttcactaggtcagtttagcttcagagggaatgagatggctgacttcccccacacattaggactttcattccaaccctcggccagcacctagggaacaaagcaaggccccagctttagttctacttaaagtgagacactgcttgctctttcacactcaggttaacattcactccaacaatgagttcagaagtgaccatgggaagacaagaggctttccaaataactacctcaccatggcacagggtctctgagggctgggcatgttagagtctgagatataaaacacagtataaagaacgttctattttgcaaaacaatcacattctacaatctatacctaagtaacaggaagagagcagatctcattatgtcccttctacaagaagaacatctgcattgagttgggtgtcttcatagggagtcattctcagggaacgtgaagcttcctccccatcaccctgacctcccttcccctgtaaatttccacattgattgattgtaaacaaattgtgttcatctgcccagattccattatatcaaaaagacatactcctctccacaaatatcggagatagacagacagataaagaggattactttccagtagcaggggttcctccccactcttcctccacagagaactttatttctagtacatagtagaagaaagagtcaagagacggatgagaagacaaactcagcaaagccttatttttatgctgctgttgtttttaacctttagtgggaagtaataggagacctcatactttatgaagcctttttgtatctggtggtagtttttaaaaagaccatcagctaaaatataaatataaatttaaccatggatgattgtaatttcctgcattatatttttatgtattttcgaaaagtatctgtaatgagcgagtatcatctctgtaatcagaaaagaaactatgaaaatatccccagtgagatctgtgtttgctcacagggcactatttggcatgatgagagtgaggggaatgatctgaatgttttcagtgccaagcaccatgttggcctcaatcggtagcaattctaattctttttcctgtggatttgtatcagttgctggttcatttaaatcagctattaaaggaataaacatgaatcttaaaaatacatttagagaaagtatattgttctaaattaagcaagcagttggcatttcaaatcatatggaagcagatgaggggaacccgctctcaccagatctcaatccactttgcaaactgcttactccttaacttggctccctaattagggcattttatctttgtgagcatttaccattactgcatcatgataactcttggctagtattctgtgaagaaataattaataataatccacaccagccaaaagtagatagagcaacatgagcaaagaactaggttggtgtgatgtggctcaataaccacttggggaaaaacaatgagagggtttttattgaccaaagtggtttaacaaatgacacttaagtgatctactggcattttagaacagaggcaagactgctcactcattaagtcattttaaaaatagtcattatagagcttttgccataaatcaagaacaaaagattccaggaaataattttttataattcataaacacatagtaatgtggaaagaaggactctatagagttgaacagggttatcaattacattttccagttgtctatcctagagacaacattccttccgtgagttcaaaccttaaacatccagatgaggtattgtgggtaaacttgaggattgacacacttcagcagactaccagctccatgagatcaagggccacatctgttttatttagcgagaagcagaattaggccatgtgtgacagtgggtgttactcagcaggtgctcagtgaataatgaatggattaatgacattgtatagtagtgtctgactttgcaaacagaaaatcacagcctttgtgaatgtaaatttacacagtaaacccaataccatatagacttttagtgatattttggtatttagaaaaaagactaagatcttctccaggtagaaaggtattttgtcaagtatttgctgtgtgtgtttgacttgttttggcctgcaatgtaaatgatcctgatagacatctagttctactgggttccacagcacttctttagccagtggggtcttgtattcaacttgtatttatcacgtccttctaatttcacttgtctcaccctggctgttattataatcccaaacagacagatacattagtaccccaggcttaagtctcatcctattcattgctatcgggttattctctaggaagcatctttcttttcatcttagtcccttcttccttccttccatcagtcctgaatgctttctgagtcaaattccgagagcagaccctggctcctgaatctttttatgctcagaccctgcaactgctcaacagtcgttgtctccctgatcctcttcacacagccatatgtcggccaagatgctcaactcactactgccacctttatacctaggctcatgccagtccctttgcagagaaagagaaacacagagggagagagaaacacagagtcttgagtccctggatcaagccatacctgaagtcagaaacttcccttgaactctttaattatgtgacccaataaatcatccatttactgtagccagtttgggttttctgacacttgcaactgaaagagtctttaacgtatgcagggaagaggagatgaggaagagaggaacataaaaatgaagtaaaacgaaacagaggaagaaaacaatgaaagatttgtccaaggctgtagaactaaacagtattggataagaatatagaacatgaagcccagagcccaagactctttcccctactacttcccttcagaaattagtactattactcattgccacacattgttactttaaacctaaccaaatgagaagtgacctgccatcaagctcccgcaggtttaagacatatatttgtcctgagtaacttatattgttttcctggcgtagtacatttaagaattacttttacaattaagctgcccaaggggtctatagatgcccgttttaatttaaataaatactaatgctaaaatcaatttgtaggatatttcaattggaccgataagtacagtcttcactaaatccaaagtatttccctattagcgcatctttagaagcgtataccaacaacacatcaggattttcagaaacctgctacaaatacattactcccagagactggatcaaacagctgatgatcaaaacataaggcaaaaactagtatttcatctttgaattcggagtacctgatttctactaaatattgattagagtttttcccataagagatcctgctttgtgcctccttaattttcttggtttcaatagtgctttgtgcagagaacagcagaagtaaggcagaggatacagctgtcatctgtgccacagacattgacatgcagcttagtcacagaacagagagaacacgtgaaagtcaccatcacaccctcgcaacagtgtcagtgtaaagactcaggttccagatatgaagacaggactgaaaatgcttctggctacaatgaaatgaatctaccacacacttgccaactttattcaaactgatgatatttttctttaaacaatggatttagttattctacccgtaagaagtccaggtcgttaatgaaatgataattttctacaaactaaaaacaaacatatctcatcctactaatggttcctgcctctccaatatttcacttaggccatctcccttttctcttctggtagaacaacttcaataggtaagaaagttttcttacatccgggaaatttctttaaccaccaaaatccatggtgtttgcttttcatcttcaactcactccttggtcgttacgacatgttgcctcctatttctggttatctatgttagtttcctgctcttcctacagaattgcaaccccggaaagagaggtactgagtctcacacaccttcttcacctggagcttgtaacaacatcctacaaagcaagtaatcaacatgtgttttacagagaaaactggttatccctggactgtattaaaacagtggtatgggtactctaaaataacaccaatgtgagtgtagaatgcatttctcatttaagagaggtgttcattcagcctgaggatgggagaatttacgaaacctcaaaccccaattggcaaacagcctctctaccttcccagtttacaaaaccctacctgagagaaggtgtcttctctcaaatgaagacttccagatcctgttctccacagacaattaaatgtggtttaaaagttgctgctgggagctgaggttattacccactttctgatgaggccggcgccaccaaaaccagcctgtgggagctgatttcactaggactcccccaacattttcttgatgttggaggtgtaacggggtctcagttcctgttcaactctgcctctgactggattctaggtcttgagcaagtcactgcttccctctgaacctcagttaacctcatctttaacatggggataaaattcctggcaccatagctacctcactcaatgctggggaaaattaataatattgatagtgttaataattaaataatagctaacatgcactgagttataccatattctaggcactgtgataagtcccatacctcccttaactcttactattctcataactactctatgacaccaagcaccatcattatgtctcttttacagatgaggaaagtgaagctcagagatgttaaataacttgtccaggatcacagagctaggaagaagcagagcaatatttgaacactggcattgtgggttacaaagcattactcccagaatactgccttacaaaaataagataagccatgtgacacaaaaatcttcacaaactgcaaaatattaagccactgtaaagtactgttaccatcaatgcaaatagatgctcattacatttattgtaaaaagcaggtaaccaccaacccgtttagggaaggtgcataaacctctgtcagcaatactcaatccatctgcagagaaacaattagaactgcattagcacataatcacagaagaagttctcttgacaccatttctgccaaagaactcattcttccctggaatttgaaaaggcaaaaagaaaaaaatcccatgccgcatctgacaataggaacaaactcttcttgcagctctggtaatgcaacacttctgaaagaacaagttaaggaacgtacttccactgccctcattagctgacaacctctgtggggactgcaaaccagccacacattcaaaacaaatcccagggaagaaatcacaccacaaagcctgtttctatttgcaagtaaaatgacggccccaagtgtctttccataaagctgtgtggtaccaaatccaaagcccaaactggttacaaagggtcgccattgataagacatggcatttcaggtccacccaccatgggccaaggaggtataaagctcagaacgtgacatgcaatttttaagccctcctttcaccttgtctatgcactaagttactttgacgccacacctgtttctattctgcctggaagccctgtctgcacaacagatggcagagtgtttgcctaacaaatgttcttgtgggtcagtataagaaggtggtggtggggattgttgtgggtacgaaaggagagaggctctgctagagcagcaaagaaccatcgatctccaacttagctagggaaacttcccacccaatgagggtctgggtatgtctgagctctgaatgttctcacctctgttcatcccttctgacaatcttgtccaggatagtacaaatctgctgctgcaaccggaaattacaaagaaaatctgatgtaggcatttagaaaaaaaaaacaacagaacaaaaccttatcaaatttaaaagttaacttcaaattcaattctaactctatctccaacttagctctcttgaatctaactgaagattcaactttcttaactctaaacttaacccttgaatcccaactcctagctttcacctctcaagtgtcttaactctaacttaaagtcaaacttagtctcttgaggaggtaattaaacttcaacaactaattggaatgagttcttgtgaactgagagcttggcttatcaacacatctggtcttcagaggttaagaaaaaactcactttctgttattgtaaacttaacaccagagtaatgttttatttcagctatgatggtaatattttttaaattatgctattatccacttaaaaaatccatgatgtaaggtataaagtaacataatgctccttgatggtgaaagcacatcttaggcaccatgctttggagaaaaactgtggatctggagggaatctcctcctcccaccctaaaccacacatacctaaaccacacacagcaccgggtatacctcagtcttcaacataaagaaccaactcggcacgttccatttcatttgactcacttgcttagatagcttaggaaaccaatctgctcaacattagtaagtctgggcccattaaaaggggactgacactaaactgaaatccatttcatctcttctccagggttttcctcggactctctgatcagcctttccttcacacaggggtgaggccaaaactactatagatgaagaagaagagagtgagatgatgttctttttgagggccaggatgacactggctttgtccagtgttttcatcacagaaattgaagtgggcatgtagtaggttctcaaaaaaacaaaacaaaactggtgaataaagacgatgtgtgctaagcactaagcagagacctccccattcgtgctcttatttaatactcacaaaatcctaacagcagggggtattattattccaattttgcaaccaaggaaacacatgcaaatagctaacagtggacagcatcagatttaaatacttaaagcatgcatttcccatgagtgagagagacattttgcaaacatgggtagaatgtggctttgtgacttgcctcaagattcaccccatcaatttaggcaaaaaatacaatcttccctgactatttagttggaagataacaagtcagggaaattcagtctagcagtccatgggtaagcctcaggggaataggaggcccctgaaattaaatgcgacattttgtgtgtatgtgaatttttccatggaaaaagtctgcagctttcgaatacttgaaagattctatggtcctcccagcccacaaaatttaatgacttagctgcttttaattaaagttatgcttctaattctcatccccaaagagtccaaagggctccagacaccctttgtatgcctactgaaagaaaaatgattagcatgaaagcctggtgggtattagacatgagaatagtcaaacaccttaggtatggaaagcacccacatagatcattacttaacgaagaaaagtaattgagaatgtattccattgctagcatttgtccacaatgagattgagaagccattctattgctgaccagatggtcctgaggatagtgaaatgacagaacccctgtatcactcatcagattcactgctcttcaaaatatgaaaaagaaccaacaaaatcctcattatgacagtgcctacaaacaagatccttctgaccatttcacattctgcaaacttcatctgcaataagaatgtccagacctgaggctctatacttggtgaaaccatgctcatgttcaaaaagcatttattgagagcctactatattctaagtaccgcaataaatacttgttcctataccatctggatgccctcatgtgattctaggcaacacgtttaaaagagaacagtcaccaaatagagaaccctgagatgggaggaaccagtttgggaaagggataaaaatcatgccatgtacacagccaaaggcattgatgattctttaaagggaaagtaatacattttctttcaacttctacaaagtttctaggtagaagaagaaatagagaatcaatccaaattgccagagaagtctgaaagaggaccacaaggtaaatatttcagagaagcaaagtgttggttcacaataataaaaagaaagaaaggaaatgaaaaagcaaactattatagctggggttattcaacaatggaataagacagctggtaaaatgttagtcgttgctggaggaatttgaaatgcatttatatgttaaaagcactaaagctaaaactataaaaccaaaagatgggttagtacaagatgattgtcctaaaatacaaagaaacacacattgtcagtatgtgaaccttaaaaactaatgttggttattctgtttaaagagaagaatgtgatgttcacaaatcaacttatcacaaattacatgcttactctagtaatgtaatgaccttgggagctgactcatagtcttccttgacctaatgagcatgctgagtataatcaattaggtttgcaattaaaattgcaatttatctaacacccccctctacccccacctttttataaggctcaggagacagtggggtgataaatataagcccttctgctgtggctatcttttattttttaagcatttctattacgtataatttattaaaccttaaatttcttccctatttgtaagtttcagcaaaatttagtcaggtttcaacacagggtatcaagggataattaggacagttagcagtaatttatcatttctcagctgggttttcatgctttcgctgactgcccgtagaaatctgttagccacttctacacagatcactatgaaatctgctttatctttgtgcaaattgcttttctattttcctaaagtgagctgaaagatgagccaatcgactcctgaaaatctagccaccggtgtgcttgtcatcagagtgcagctgaggccagggccgcagatgaagggctacagtggctaatggatgatgcaatgccatgagaggcttttttccagcctgctgcgggttagaaatttaaaccaggcagcccgacttcaggttagatcttcacaaaatatgcccaggaatctatgaacatgccaatacacattttatggagcaaatattgcctagtaagccaccagagaggaaaagcctagaaaaggcagagacactagtactataccacttccactgaaaagagggattttatgaagcctgaaccaaaaagggaggacctcgtgttctttagagagattcatttactagatggtgaaaaatgaatgcttcgggtaatttcattttgaattgatttatttctaaatggggggaaactgacacttggtgaagaaagtaacaagtggttctctggaaagagccagccagtctcaggtataatccaattattccaacacaggaaataaggacacagagggaagggtggaaggtcacctgagaaagtcattccttgcaatgaataccttcctgtccccttccctacagactctcagagaagtataaactgacccatatttccagtttatttctgacacctaaacctaatcaaagtccactatttagaaatccaatagttattcgcaattagactgcacggcaaattaaatcataaatttctctatctcagccctggttgtcacattcctaaaacacaacttgcctccctccggcactttatttaaatctctgaggccgggctccaaagcaagttatggatttgataatttgctaatgtggccacagtaattgttttgagccatatttatgattttattggatcttacaacaatcaataataatccattgatgtccctgactcgggttttctcgcagtcgacaaatggggcagcagattcatttttaatgtactcacttagcactccctccctgggagagagagccctgcatattttaaaaaagggcaagaaatgaatggcactggtacacatactttactgtgaaaaactagctgcaggataagatttaatgctaaaaagaaaggagagaatagactaacagggcccattttgtgcagcaccaccatcgttaaagttaatggaattaccgtgtggtcacgcactagagggaacctattggaagttaagctcttctagggccattgattcacagactttcattcaaagattcccactagcatgtgatgagtattgcagatatgcagaggcactttagaaactgtttactcaaactgccagttaagcatattaagaaacaacaataactgaatattttagagtggatgatctagtggaacgtgtcttctgttagacatagtaaaaacttcaactccgactggcttaaacaatagaggactttattggtcacctaatttttttcaggctggagtgcagtggtgcaatttcagctcgctgcaccctctgccgcctcccaggttcaagtgattcttgtgcctcagcctcccaagtagctgggattacaggggtgtgccaccacacctggctaatttttgtagttttagtagagacagggtttcaccatgttggacaggctggtcttcaactcctgacctcaggtaatccgcccacctcagcttcccaaagtgctgggattacaggtgtgagccactgttcctggccagatcacctaatttaaatgtctggaagtaatgcaggcttcaagtctggttaattcaacaatccaataatgtcacctagtgtccagcttctttctgtctctgccatgtcagcctcagcatctgttttgctctgaggcatgttgccctagaaaatataagatggctgctagaagctgtcagttacctgctttcttgttcataagcagtagtggagaaaacagcccatccacaactaatgcatctaagtcctccatgatgatgggactccgatcctttagagtgtaggattcctaaagtcaagggaatcctacactctaaatagcttaggaaaggattaatgaaagtcattactgtggcagagacaactgacttagactgggatgggcaaattatggccctcaggccaaatttggcccaccatctgcttttacaaataaagttttattggaatacggccatgcttatttgtgacaattcattttcatatattctatggcttcttttgtgctgtaaagtcagatacataattatgacaaagaccatctggccctcacagcctaaaatgtttactatctggccttttacaaaagaagtctgccaacccctggtgtgtaccaaacaaggtctgcacctggagctaaagatgagttcaaacccatcctaattttgtggctactaaatcaagagggagggtaggaagaatgctagagggacaaccacagtgcctaagatagacatgagagaaaatccttcaagtctagaaaaatgggcttagaaactaaaaaaaaaaacaatttaggaaacctatcataagcacatgtgaaataccctctgccctgaaatacactctgagtatcatcaaaacatcaaatatatttaaaattgaattacaattccttaccacagcataagtcccagtgtaacggctccccgcccactcttcccacttctctcctgctgccactctccctacactaaatttctgccacctggtcttcaattatttcctagaatgtgccaagctcattcccactgccatttcctcttcccagaatggtctttcttctccagctcttcgctggctaggcgcctgtcgttccctgttctgggtttatgggttatctcttcagtgaccaccccatctaaagtagccataccaccccattccccttccaccatgtcattccatttcataacaccttgttttagtctttctagtattaacccaaatctgcaatattttatttgttccctttcacataaggggaagaagacaatacactgagagtttttcctaggctgtcttgccttccactttaacccagtgcctgggagcacatggcacatagtaggcactcaataaacacttattggagtaatatgttaatattaactatagaatttctacaactttttcagccttcctgcattatggtgttcatttcaaagtctgtacttgaaaacaaggactacgtctcattcttcttaggttctcagagcctgtgacgatatctggcacatagtaggtgatagaagaataaattaatgaatgaatgccagatagaaaaacatgagtaggcaggatactcatttcctggaagggaggaacagactactttggtagtgaggaaatcgagatcagagcgattcagaactggaagcagctacctcacagtgctttgagtttccaggtatagaggaagatgaaagacagacttaaatgctacaggggtgattaactgtcaagtagtggatgatgctaatgacttttaaggtcacttgctcctctgggattttcttgaattatcccgtgctctgagtttcttccttaaagagtgagattcatcgatggtcatctgatagtggagcagagcttggagtcacatttattccttccttggccaaacagtttcatcaaaattatactgctagaacctgattacgtctgggaatttataccatttacaaccaacagacgaatttaaacgcaaataaaagcccctggtgagctgtttgtcagggcaccaggatggaaagcatgataagaaaatattttgtgggggaacacgaactgatatatggaccccagagtgggagacttgaatgtgaacgttaggataaatgaattccaccacaaagtaaaagaatatttggtgtgttcactttgttaactcaatgttgtttattcttctcaaccaccctaggcagggtcaacatcttaaagaattccatcttcatttttcatgtaacgtcaggaaccaggaagacttgtttaaaagaataaactaccagggaaagaaatggaagttttcattactggaatccaataatattatctttatgttgaataagcctagaatttcaaaccactgtttgtgtgtgtttttttgtttgttgttgtttgtttgtttgtttgttgcccttccctcctgaggttttggattaatctgatggagaaggcttccgaagatatatgtctcaacttccctgattttggtgaacaagaggcttctttggagaacggatctattagacaataaggtaggatggatgcctcatgacatgggaagttaaaatttcaaaatgaccctttcccagcactaacataattgacttagaaggagggaaaggattcctcaccatgtttggcctgagggccattatagagtctcaccatcccaacatttttcactcaaatgtcctcaggaaggtcattattctaattcttccacatctgtggctctgcaggttgccttgtctattattcattaagctggtttccatctgaccctggctcagccatgaaatctttaccttttccagctgctttttgtgtcttgagacttactttattaatgactttggcataaagggtaaagagaagcgcctgaggggactgaataatttgagatgagtatcaagaaagaatcaagtccaggtcatctagaccaagaatcaaaatatatttataaaaataaacaaatgaaattgcagttgatattctgggtaaccatcagaatcaactgtggacctttcaagaagctacttcatgggccccaccctcagagattggaaaataggaggcatgagaactagctatatgctaaagataataaagcaaagagaatgaattataatagtcatttcttaatggaaagtgcttcaaatggggcccttggtttttcttttaaaatgcactttaaataatagaatcaacaaccatgtacacattacccaatttaaaaataaaacactgtaaagccgaaaccctcaggtacaattcacatcccacattgcactgcttcccctcactatctccacccagaggcagtaagaatgttatctgtgtccttccttctaagccatatatagatctacatgtttataaattatatggcagcctataagcaacctgttcttttattttattatttcctgctgttaataactactagtcaaaagtttgtagcatttggatctgtttcagctaaaaggcccaatttcaatcaaggcacacattattgtatggtctttcattccccattctgtatttaaggatgtggtgtagtctaaaacaaatggttccagagcactttaagaggccaaggcaggaggatcacttgatgtcaggagtttgagaccagcctggccaacatgatgaaacctcatctctattaaaaatacaaataatagctaggcatggtggctcgggcctgtagtcctagttactcaggagggtgaggtgggaggattatttgaacccgggaggcagaggttttaataagccgagatcacaccactgcacttcagcctgggcaacaaagcgagactctgtctcaaaaaaataaaaataaaacaaatggctcatctactgaggttgaattggccactaatatttaatcaaaagtactgaatctttctcacatgattaattgggctgcatttattttacttttttttttttttttaacagaattgacagtttggccagccaagtatttggatatcacaggtttaaaattttgaaattagaatgagctgattacatggagttagagatttttatatttgatttcctaggcttgaaacacccatagcaaaatggtgaggcagagtagtgctccttcaatgattagttattgagcactagtatcctatagcaaaatgacaacagtgagtaaccggccttactacatcaacaaaggtaagactctgactgaataataacgccttacatttaggtggtattttagggtctacaaaacacttgcctttcacaggaggtttgacttcacagtgattaagtagaaattacaggctctgagcctcaggtgtaaaagacagtttactgaatcctataaaacactgaatgtccctactatatgtgccacgtgtcggcattacaaatagcaaaataaattaaacagccaaatatccactttgctatatgtcagggcctctaattactgaggggatttgtttggtagtactaatgaaaaattaaacactaaaagcatataattctgccataaattgacatacagcaataaagcagcatttaggttaagcttcacctgtgtaataaacagggattgtcctctggatatttttagatggaaaccaacattattccaagcagagcaaaataatacagattaatatgtggtaagggtgacaaaatatttacaaaacctgtgcttgagtttcttctactgtgattacaggatacaacatatttctttaggaacagcctggtcatatgatataatgaagagttgaaattttggataggcttgggtttgaatcccaattccactatctgtcaactgtgcttttccagtatgtgattttttttctttaaacctcagtttccctaagtgtaaaatattaatgcctacttttgcaggttgttgtgaggactgaagtaagaattataaaactaatggtgaacatgtattgagactttactatgtgccaggcactattttacagggatttacatgcattaatccatttggtcctcacaacactcccaagagacaggatactcttaagacctccattttctaagtttatgaatgaatgtgggggagctcagaaaggttaactcgcccagggttcatgcacctggtaggcgacagctctgggtttgaaaccaagtagtctggccccagagtcctccctcttcatcagtatgctttaacttccctgcattttcttctcaccctcatccctgcttcaggatctctctcatctctttcaccttagctgcctttgagtttgaatgaacagggaaaaagtaaataagaacgtgaaaatactagggagcttggttaatttttctttcagtgctttgatccaaatggtatcatgcaaatcaaagttaacaaactagaaacggaaaaactcaatgatttgtatctacttaggaaagggcctgagggtttagtaggagagaggaagtttcccaaaggagacaggcaggcccccagccccttctgcctggagagctggggactgggggttttgcctcaaatcaccaggagcgggagagggaggggaagtcagagatatttacatgccagaggaaaagggcttggaacctcaacacttctctaaggcgtccactcccacatgtacacccaaacccatccccctgagcactgcagttgtctttggtttaccaacccagtcaaactggattcattctgagggcagagatgcaaattttaaggcaattatacaagataaaagctacagcatcctgaagataccaattcttcatgcaggaaatacatgcattaggtattaacatagtcagggcactgttcaccatggctgtaatgaaaggataaaagtcctatggcaaatcacatctctcttggagtgtctttccaaatgaaaataataagtaacggtaaaagaaaatcattttcatcctcaagataaggctttctctctttctgtacacatcaaatctttcctagaaattggtttgggttgagagcagcagccccctacaagtgcttcttatcactcctttaggaaagcagcttcagaaaagtgaagtgtgcatcagaatcacttgtggtgtctgttaggacagagtcctaggccccacatcagaactaccgagtcagcaaagcatggggcaggcaggcttctgtcctatggctaccttcttcaggtaactgtgaagtactctatcgatttgtaaccgcgacttactcgtgatcatctgtgcatacaccagaggctaaaaatgttcggacagagagggccagtattattttccccaattaagaaggcagatttctgaattttcaaagtgtcatttttataagttcagataagatatttaaatagcacaagtcatataatcagagtaaagttttctcaagaatttaaccaaaaggcagtcattcgtagcgagagaattcagtgtataataattaagggaatttggcagcaccacaaaccatctcaatgctagttacaaccccttaaagcctagccacaatctattttatagatgagaaactgagattgagattaacgttaagaaacatgtacgaggtccaagggccatgatgtggcagggccgggatttgaactggggtggactggtcagattctatatccatgtccaaatcctagccaatctctgctacatataccatgtactgaacatcaatacgtcagtttttctccactatcattcaatataatagatagggtttccgcattcaaaaaaaaaaaacaaggaaattgatgttcagagaggctaaaaggctgatccaaaggtgcacagttaggaagttaatatggctaatattcctaacggaacctctgatgccaaagtatgttaactactagacttaattaagagataaaatgtcctcattttcatgaatctgaaagattaccaaattttcaggtggaaaatttgttctagaaccacagaaacttctcagtgaacagaagagcttcctttttatctcatttaatttttgaattatacttctacaaataattatcttcttcttctagagcaatctaaaaagtaatttctaatatcttaaaagttattaacagctacttcccactgcgttaatactataaaattaaatttctaagtagaagattcaagtaccataaacatagaagagtgtaagcaagcataatctataaacagttcttacaagattccagattacctgcctggaataaatctgtccttaatatacctaaaaccgcctcccacccaaagatgaacataccaattgttctaaaagatagctcacatttaacttattaagcagcatcgcttctaaagaaatgaatattgccttaatggttagattagatggaattacattttggaacatgatttgagaacttgattcgtggaaattttagtcttcgttagtaacacctggaatatagaagacttttgatagagattccaggaatattgctgactgcatgctggaatacacatacatatcgtcttctacttcatgttaactaaagttagaaacttatgagattcgttccaacaagcaacaagcaaagttccattatcatcatcattctcttccccacacaaaagaggcatagaaaataaaccggagaaaaagctgtgtcatttccttacccattgcccggttcatggctcagacccctgtaacacaatacagattaacgagaggaaagcctaacgaatatatttaatataaattttatgtgccatgggagcctttagaaataaagacctaaagacaactgtgtatttttacggacagtcatgcagaagtatgattggatgataaaagagtatgacttgatggtaataaattggggaaaacttagcaaggcctgtgtgttcagattcttcttggcatgtgagtagagggcagaactcctctggaatgaaggtcttatgacctacttgcatgggtgttaggtcagagaattcttttatggcacacttgagggtagacaaatggaaaaaggtcagagagtgatgttcctgcttctgtagttttctcagtttccttcaccttaaaatactcagtatgcagagctagcatattttgggggtagcgtgtcctgagacctatcataaacaatgacaaaatccaggtcctcacaaagcttaccttctcaaagaactagagaaaagacagaggtacaggtgcatagccaaacaaacaaaagacaatgaagaatgcctcgagagaaatcaaatcatgcaccaggacagagagtaggggctttaggagagctacttcagatgaagggtcagggaggctgtttggatctgtatggttgaagatgaaagaaaaagattatttctcaagcctgcaggacatcaaactgctgcaataatcaccttgtggatggcagggttctactccttttaaacccaaaaaggagagttaataatcaattgtgaaataagaggtcacttttttactttgatatttccctttcctgactacaagtgccttactgagtaagcaaggccacgcttgttctttgcaaagcagaatttaaagcccctgaaacaaaaaaaccctacagtggtatcatgttcaagaggctaactcagtggtgcaccttcattaacgataacaacaggtgctccaggggaaaagaccattactgggcttattgctattaccactcagcatgagacaaaaatggtttagaacccagggatcaggcagaatctcaagaatgagacacagaggcaaagatgaagagaacagtcactgtgctttccatggcaggttgtcaaatgctgccttaaaatgtgcaactgtgtgaattccaaaatatgaaatgctcagaggcttgaattgtagtattcacaactggacagctgaatattaaagatgctgctttgtcccctagaggggctggctactgcaagactggcttccaggggtcataattatgtggccattgccactcaatattttatcatcatacaatactgaggctggcaaatatctatcacgggatgtgcttgttaataatgaagattcccaagccccagtcacagtattctaaataagtagatttggaataagaactgagaatcaactttttgttgttgttaactgataccaaagttaattttcatgcaggtgatacaaagatcgcattttgaaaagcagattcaacaactttagatatggatactttgtctaaaaggacagctttggaaccttcattgttctctgggattttatgtgtgtgtgtgtgtgtgtgtgtgtgtgtgtgtgtgtgtgtgtgtgtgtgtgtgtgtgtgtgtgtatggtggttttcttataaccaccatattctacaaacgagtcaagatatccccattatttcatatcaggaaacttctgtgatcaggttggaaacaactgaaagatgtgcaaaacagcataacctgctgatttaaaaaacagaatcgttttaaaaagttcaacttaagctaaataatcagggtgatgataacaataaccacattcaacaattcatatataagtactatatgttaagaattagtccatcatcatcaccatcaaaggtaacaaaaacattacacattttggccagataattgggacatcaaaaagtaattactattggagttacacaatctgtagccatagttatcagcccagctaggctcactgcttatttgttttgtgtgtgtgtgtttattatttttagtcaagagataattcaaatatgataaaattcaccattttaaaacgtacaattcagtggctttattatattcacaatgttgcacaaccatcaccactaagtccacaacgttttcattaccctaaaagaacctgtatccattaggaatcattccccattccttccttgtcccagtccctggcaaccactaatctactttctatctctattcagagcctgttgcatagcaaatattttctatcccgctttagaatggctaaatgaaattttgagatcatataacctatctattcatataagttttagctatgcttactatgcacctattatcattctgtgcatcccacttaatacagtttgtgcattcccccatgtcactagctatgcctctacagtatcgctttcaatggctgaaggaattccatcaaatagatattgcatagtgcatctaactaatccggtatagttggaatttacatttgaatactgagttttaaaaaatcttggaaccaagtttaaacatttgtgttttgcatttcaagaagtgatttcaaaaagaagccacaggtattaaatcctttctttgcatccgtatatttagagcctcacatggaggtgagacagtgggacagaggaaagctgaaagcctctgtgtctatcaccataccctgtgtgtagagcaattaggaggctagcccttttttatgataaggaatttggtagcccatatggtggcagtccctacataaactttcactgcttagaagtatttcccagagattgtattttaaaagtcccagaatagctgtgttaaagacaaaagtaaagtaagatcaaaagggaacttacgtttatttggcattgtttgtgtgggcagcaccttatccactcacagctagtcttcgaagcattaaactttatttcaacaaagtgtaacattaacatcccagcctgacttgcttctgacttctagcaccaaaaatagagccttttctatgacttaggtgcagaatctacccgtataggaattagcatttgtatgaaaagagctgaaacccagcttctgaatcagccaggattttattattttatttttactacagaagcagagactatcctaataaatcctcctttcttctcctagcacacttaaaaacccatctttgagctccactgactccattaggtttgaactttggtattaagtacacagggaggaaaagagtaggtgtgggggtgacgagaaggagaacagagagaagcacaggagaacagaaaggaagggaggcagcttgatgctactgctgcggttattgcttcactcaaaaacaatgaagcaaaagcagactatgtcaagaagcaaaggtgtgtcaaagacaccccaggcttaacatggggctgcacaaacccacaggaagctcacatgctatttcctagacactctctcacatgaaccactttgacttatgtttccggactccttgatttagtttctgttttagcgtttgcacaataataattttactactaaaagtaaatgtcttgtaaaccaatgggaaacatattgtttggcagagtttataatgtcaggatttacggctctaacactgagggtctctctgacctcgaagataacataatgaaacagcaatgtgctgcatatgactcgttgtgattttttattagttctcataatcgcctcttattaatttgtatgcacataataagcactcaccttcacagtctgtccggcttcggggccatcctagaagtaggaaaaaaccaacagaggtgagaatagatagatggtatctcctgcttattcagaaatatcacccattaataatttagatgcaatttcattgtgtgttaatttatagtattctcatggggaccattggcttcaaatgtgcgggattagacagttctccatttccgcctgagagtaagtgcgaagttatgtataaaaatgatataaattatccagcaagccaactccttgctacttttcatgctctttgctctaggctatggttttaattgcattaaaggaaggctgaaaatgtttggggaggtgaagtatcacaccttctggttatgtttagaggtggtttaattaatgtctgattactttaagcttctactcaggaaatctgctataaacataagccattaaggaagaatatggggtatttcatatgggaagagtcctctggctattctgaccttgtgggagacaaatggtagtgttcattgtagctggacccttttcccaaactggttccctttctctgtttctgaagcttagttggaaatgggcaaactcaccaagtcaccagccataatataaagcaaaagcagatactcagctggttgagatggccaaacaaagcaatggctccacaatcagaaattccaaaatagaatttcacctctgcaactttagccaggtttgtctacctctatgagcctgactaacggggtgagaactcccgccgtaaggattaagcataactgtgtatatcagggattttcaaacttagagtcacaatccattagtgggtcatgaagtcaacttaatgggttgcaatcagcattacaaacaatgtaaatcaggtgttttttttgttgttttttttttttttttttttgagaaagggtcttactcagttgtccaggccagagtatggtggcatgatggcggctcactgcacccttgacctcctggactcaagtgattctcctgcctcagcctcctgagtaactgggactacaggcatgcaccatcatgcctggctaatttttgtatttttcttagggacagggttttgccatgttgcccaagctgatctcaaactcctgagctcaagagagctgccggtcttagcctcccaaagtgctgggattacaggtgtgagccaccacacccagccagaaatcagatcttaatagaataaaaactattagactgcacagaatgagtaaacattgttttgtgaaactctggtttcctttatcaatataggcatatgcatatatttcatatatgtgtgtcaggggagacaggcatgattttgaaataaatatgtatcttactgtaggttacagtaaaaaatagtttgaccacattgcatatacgaaagtactctaggtgctaacacaagtcagctcttacatttatggaattaactttctagtgaaaaatgttccataaccagcaatggccatttcctataaatgtgatttttattcttgtatctcactaaacattaacagaggttttcattcactgccttcatttagtctctccagaaacacggtttgcaacataagcttgataaacccactctgaactgaactacctgcctgaaggggactcaaatggtttgacatacaacacatacacacaaagcatttgggggaagtttagctactcttaacacagacatggcagcaaaaaaagaaagaaaaaaatctgtttgagaagaagatgagcacttttagtcagagccttcataacctgaaaacactggctttctttatctggtctctttgaagctctatggtaaagagctaaggaggggaggaagaatggcaaacattcagtttaactaacaggctgagtacagagtcctcacattttgaaagtgtgtccttctaaagggcaattacagagtcatccaatttcagagccatgaaggactttatacattgataccccagccctttccatagagggcctgaaggagctcatggtatgttactacggatttactcaattccctactgatgactcaccatggacatccttctcccaacctgacaactgttggctcaacctctgcctaaaaatcttcagtgactggggatctgatttcttcactggtcagtgggccacacccaaccagtgaatctagcttctaactaatctgtgatcaatctctgcatcttgaattaaagacagacaaaaggtaaggcccaacctaagctgcatatcactgccaccctggaattagagcagggcttagtctatgcagtgctcaaaaattagttaccatggaatgaaaatgatttttccagtcccagttccagtaagcaatttggaatgtctgaatgtccattaaatcacttatccattactcccacctgcttggtaaacaagcctcagacatcaccttagacactatcccacggtccatcttggggccaatggacagtagggttgccctgcattagaaatctctttttttggctgctacctaaaatacaaacaatcacatctgccctcctggtaagatatcaggaggagcaagcccaatgccgggatatgaaagggaagaaaaatcatttctgagaaatctgtacactcacctgcatggaaaaggtgagagaggtcccatggaaatgtttttccaccactgtcccgactctctgggtcgtctgaaacaaatcggccacttcatcaggacgcaggtcatggaagcgctccactggccgcagcgggcacacaaggacatctgtagcaaggtctgttaaggcccatgctgctggctttgggtagtgttcttaccaagcagttcatacccacaggattgaatcctctcggaccagggcctgaactctcaaagactaaggaatgaagaaacagatatttaccatccactgaactccagagagttgaaagagagctcccatacatggataattacactttgaaggagaagctgtggtatgcagaagaatttcttgcaaaagaaagggacattcgtgtacagacagactcaagtgtatggtgagataattatgcgaggaggcaagatctattctagatcattctctcttgacccctattctaaagctgtgtccgcttcagcagccaaaggcactaggttgaaaaagcaactggaatatctacttggtttctctaggtagaacatggggataaatttttaatttaaattatctctttagagaaataagaaaattatgcaatgaacatacaaaagtagatgtttattttatttttaaaagagtatagacattctgaaaatgtacagtgaactttatccataactaagagaggtgccatgtggttaagcaatttatgacaagagttcctcagactaattttttttttagaatccaaaagaagacatttgaaggtaaatcatgaacgaaaggttgtctgtttattcaaataaagcattcttaatgcattctacaagttagacaaggcaacgtatttacactattggtctcagcaacatataagatctgagaaaaaaggatagaaatttgattacttcttgataggaaattaatattcactgttacaccatcaataacatttcagtcactatacacacatgtatgcacacatgtgtatatacacacactatatatataaatatttgtttagtttttagatactaacaagagaaacaaactcttgtacgtttttctgtttcttttttcttgttgttttaagacagcatgctcctgcctggagctaagcagctgaggggcataataaaaccataattctgcaattgctagtctcactagaatatcaaccccattccgctattggtagaactcagagcccaaggggaaacacaactgagctcagctggtcaggcctgatttccataagagagaggggaagagaaagaagaaactgattaattttgctcataatcaggaaattcatgtcaatggtaaactaggaaaagaagcatttttaaaatcagagttcatttttcaagagaggagaagggaggcgttcacccacagggcatctgatacttaaaaagataattatccatctttggcaggcccgctttattatcatgggtcaatgaaccatttagaaatgaagaatttcctttcatttcctttgagcagattgccagcctccactcccacgaagctgctttttctgtgttaaaagggacccttccccatattcctcctccctgatttgaattacaccctcacttaggcctgacttcaccaaaccacagcaagggtgacaaccatgcaagcttccaacgaagtccataagtgctatgttaggctatgttcacacacagcaactcggtgggggaggaagacatttcacttcaacaatggcttactgtgaaaactggtggaataaatcagacaacctatgtatctaatgtaaatttagtaatatcaatgacatccaaaaatgttttttttcaacaccataaaaaaacttattgtttgtcaattttgcttgtttgcatgttgctcctagaaaaacaactcagggaaagcaaattaattagaagaacagcagatagcttttgtaattctaatgccactttttatatgccaattgttttaaaataatatcacagatgcaatataatttaatttggagcctcttaggccttgttaatgggtaaattccatattatacataggctatgaagacacatttacttctggatcctgtttgcttgggattatctcctctgtcaagatttcttagccaacatgtaggataacctttaaagaattaaagttactatattgaattgaataaatgttttatccagtacatatcatgtgtgaaaacttgtggaactggttaccacttctccctataatctagagtatagagtttttttagcaataatattttttaaaggaagcgaaggtcaatagttataatttaggttgtatagctgacaaggagatttctcacagtagatgaaaaccaaaggcgacttcttagagcagatgagatttaaactggactttaaaaattggggagtgatttaaccagtggattgggctggcaacctactcactcatccatcccaacactgcagtctcctctcagtccagggtctatgctggaacttaggatgctaagatgaccaggacagagtagctgaccttgaagagttcacattctaatgtccgcaactgtcatgcagtgtaaacagatcattacaacacagagagatgaatgctattggtagaaatcagtatagaaagctgtgggagcacaggggaggtcagatctaattctgcctcagggtgttagataaacttttccatctcattttacatttcaccttttaaagtagaacaatttctccacacctagaccaaaatctgtccttaaaaatggtccagaaacttaaggttagcttcaaagaaagttgttaagcgttcctcctttggcccaaatcaccatttcacttttgtacgtactcttacttactcaatctttccaacaaacccataaactattaatactattataattcccatgttgaagatgaattataagcaataatttcttatagaaaattagaaacttgccacaccagcacactcaaaatgagattaaaactagaattcaacccgtctgtccgattctaaagttcatgttattaatgacagtgctgtgatgtcatgcttgttagagctttcatgactccatttttgcctagcctcttattaaaactgtgccctgcattccctagtcactctgttcatagaagggaaccactgttttcattaaatagaaggctatgatgcaaacatgctgaacgcttaagaaacacctaaccttggaaaaagaaagcagacgagacctacaatcccacaatgaaaggaggcctcagcactgggcagtgagtatgccttcatcctaacagagaatcgtaagatcaaaaaggggggagagtaccagcttgcctgaactggaggaagtaaagagggatacaaagctggcattttgccccttctcatcctgactttgggttgcttcaaggtgacttgggctccatcatgggccagactcctgagaaagtttagatactgcagcctctatcactgggtcaggttgtcagacacactgaatccattgcttgttggacagtctaattactgagaattatggaccttctcacaacacatgattcatatcacaagagactaccagaaacttggcaatcctttctttttgttttcccttttcgtctcctcctcttcatgctcaccaccagcccagaactgactatctctctttttgaacatgaacactttaggtgtttttgctgcattaaagtggtgtgaccacatgccaagccctatgctgaactcttgctgacacactgccaactcagaatacacacaatgaaagaaagacatattcgcattagtcaggtgcctagagctggtgtggtttgctatttgcaaatgtgaccacaagaatccctcccatcctacacatgctgttttgctctctggctttcccccactttccatcaagagttgcagtctatttcccctccccttgagtgtctatcttactttgtgtttgtgttgttataaaagaacacctgaagctgggtcgtttacaaagaaaagaggtttatctggctcacagttctgaaggctgtccaagaagcacgatgctggcttctgaatttggtggaggcctcaagatgcttccattcatggcagaagtggaagggaaaacagtttgcagagatcatatggtgagaaaggaggcaagagagacaggagggaggtgccagacccttttcaacaaccagctcttctgggaactaatagagcagtagagagctcactggttaccacaaagatgacatcaagtgattcatgaaggatctgcccccaaacacttcccattagaccctaccgccaacatcagggatcaaatttcaacatgaggtttggagggtcaaatatccaatctatagcagtgttgctgtgtgactttccaaggttaggccttaagtgaccttgaaacctctgattattgctctcttggaagcctgagaccaacatgctataaaaaatcccagctagcctgttaagtggcaacatgaagaaagaactaaggcacctcagctgatagtcagcaataactgtcagagatcatctcagaccttctagagtcaggagagccactgacttccagtttctatatcacttatctactgctgcataataaactaccccaaatcatagagccttaaaacaacattgatcggccgggcgcagtggctcacgcctgtaatcccagcactttgggaggccaaagcgcgcgaatcacctgaggtcagcagttcaagaccagcctggccaacgtggtgaaaccccatctctactaaaaatacaaaaaaaacagctgggcatggtggcgggcatctgtaatcccagctactcaggaggcagagacagaagaatcccttgaatccgggaggtggaggttgcagtgagccaaggtcacgccattgcactccagcctgggctacaagagcaaaactctgtctcaaaacaacaacaacaacaacaaaccaacattgataggttttactaccataagtctgtggatggtttttgctgagggtctcacctggactcactcatgcaactgctttcagatggaaggtaggctggagtctgggctcagctgcatccactaggcccttcactctacatgctcttccatcccaatagatgcagaatctctgaatttgcttaaggcttacattgtcccacattctatcggtcaaagaaaatcacaagccaacccagattcaaggtagagatattctgtcttctaaaaggaggagtggaaagatgacagtcaaaagggatatggacactaggaagttccagggatgtttaaaaattaacaggggcccaaggtatcttggctgtcctagtgagtaaatacaggatggcattttagagttgagatgctcctttttttttttttttttcctgagatggagtttcgctctcgttgcccaggctggagagcaatggcacaatctcagctcagtgcaacctctgcttcctgggttcaagtgattctcctgcctcagcctcccaagtagctgggaatacaggcatgcaccaccatgcccagctaattttgtatttttagtagagatggggtttctccacgttggtcaggctggtcgtaaactcccgaccttaggtgatccacctgccttcacctcccaaagtgctggggttacaggcatgagccgccgtgcccagccgagatggatcttaaacatcaactactccaataccttcactgtcagattttaaaaatagggagagaaaggttacttaacttgttcaaagtcacacagttaggagcacagttgggattggagctcaactggtgagcttccccaaccaaagctctttctgttacactgagatggcaaaacattgcacatctgccactattttccaatggtaaacttatggcagaataatcgaccacagaattctctcctttaaccaaagtgtccccaaatacttgccaatataacctctgagcagtcaacaccagtgagaatgggcacgcgacatgagatgcatgtgccatttctgtggcctcccacactgcctcatgaaacacagaaccaactgcaaaggactggtggagtcagaacaaagggggatgctgcaaaagggagaatcttcccaactacataaaatttccattatgttgccacatttttattcaaaataaatttgataagttcaaaatttgctcatcaaggataataattgattaaaaatatttttaggaggatttccatgacaaatacgaaatatttaaacatggagcactgacagataaatggaaatgtactgattcagatgattaattaaagatgacagcagaatattatgatcggagttgctcagactcgcccccatttagttttctatatctgatctattctagggattcagaatatagaagtcaccaaaataaagcaaatcatcaaaatatcactgattttgattaggctgattagcctgtgtatatattaatatgaagtaaggcagtatcagataatacaacacagaattaatcattcttctgaactaataaaaaagagtctgtattcatctcgactgcagatctgtgtgtagtttagtgataagcaaggaacattccagcttgcaatgcagacctcagcagaccctgtataattcattatttgctctaacaaacactcctaggccttgtaaatgtttaaaataattcttaatgtcacttcacaaaacaatagcaggatggactgtcagctacttttcaagaaaatattcaatttatttgatttaaatagcacaattacagagctttgagtcaaagtaggcggcatctcaaaaagtaatctattcacaacgtaagcactttgatggattttcatatcagaaaggcagaaatatcacccttaaatattaataaatacaattctgaagaagcatcttgctttgtttgggccacaccttttttcagtggggattaacatactcatttcagtaactcaataaagggttcatgggatattcatcaaccataaccataaatgacacagatgtaattttaagcaaatgtgatttccagaatatgataaattccagagcagtgtgattaagataatgataacactctgctcagagctggttctcaaggcaagcatctcacaaatatccactatctcatgttttgccctgggatatgctttgggtcagagatatgatgagaccttgttcatctggaggaagagaacccaggtatccttgtctaggcaacatgccctgagctgccctcaaaactccggtaccgatctggatgctcaaaagtaagaatcactttcatcgagagaagcaaacagttgcctttcaaagaaagtaaattgacaggggagtccgcagcccgatagcattctggtacagattctttggttgaatttcacatatttttctgtgaacttttcaatgcaaagtaatcttatactgattgagggaagagcatcatatctggaaaaaaatatgctcatataaactaagtatgtgggaaagaagtaaatgatatcattaaaggaaagaaacaatatataacatttgtttgctgcctagtatggtctagtgataatcaataaccctttgagttaggataatatcacctcccaatgtccagattcagaagttgaggccaaaaaagtttaactgcataaccaaggtcacgtagctattaagtgaaaatcccagccaggggcatgtgctacaacactgttacaatgtccatgctgtttcaatgcctctcaaggttataaaaacctccatgtataatacctactgcagtgtttactagagtgggatagcagagccctgcttccacgggatgctgttatacattatacagaaaaaaaactgtgcggtcaaagaagattgagaaacactgcatgaaatgaagtaaaatagctctctttaccgcagtattcatcagcatatttactgtactactatgcattctggcttctcaaaaataagaaatagtatgcagcactgctcaaatttgcttatctacaaaataataatgattattaattattagtaatattgtagaacactacacaggacacatgtttcagaggatgttctttggaaaccttgagcatcatttcccaaaacacagagaggcctgagtaatttttctgttttttcaaacaaaaagttgagtacatgtcctattaatcacatgggcaaagaaagagagcattctgtgaaatgaaatatgctgagaagttgagcattaaaatacatcaaatgggatatggcagtcattagtgctgtttgccaaacagttcaggttactgccatgtctgggcatatggtaggccttctggacccttgcagttgggtgaagctcaaggaatacaggtcaaagagttgtgagcgaaaatgatatacgtcacttctgggctaaagcccttaacttctagtatgtgaccgacagctttatttccttcaccaagacaggcagcaatgctttgcaatggtagctgctctggcagtgagaccccgaattataggtcagcaggggcctctgagcatcgtggtcacagtgactagggcaagtttgttcttaaataggttttacctcttttgctaaccccaaccaacttgtagtagctatttacagcagcatgttgaagaggattctgaagctctgataaggagcaggaggaaagaactgaggaatttattagttttggctgccaccagggaggaaaaaaatattagcgtgtataccaagtacctgccattcttcaattagacggcaataaaaatgttttttcaagaattctctctcccccattcttaatgatatagaagtcatttctgggacttgcaatgtctctcagtaaccgttatgaaaatctattattattgttattgtcctagagatatacagaagtgtctagaatttagataattctggttaggagagtactgaaaaggaaaattaactgtcactcgaaagagtctgtccacaatgtgtaaacatgagaatgggaacacaccaatatgaaaatgagcatgttgtaaaaatgctcttaggagttaagacttgaaggagtatggcaatagaagaaataaattgcactcagcagctgaagaaatatttaaagataactccaatgagagattattttaaacttcagatacactttgctatgagaatcatttcaaaaactctgtaaaaagctttttagtgaagtagagatgagaaagtaatactaaaaatctgcaattcattgcagatctagaaaaccacatgcaacataaataatttaatagcaccctcaccatatacacagtttcatttcaccagtatgtgaatgaggggagtgccctgagcacatacctccatagggtggctagagtgaaacctggggcccaaactcccacatagacaggattcttccagtgcaagctctatcaggttttgaaattatggattccaaatttaggtttgcttatgtcatttaagagactaaaaattccagtttccctcagatcttccatatagctggccaagccaatggagcaaccagacaacacagttcagatgccatctgaaggcaaaaagtagccaaactataaatatgaaaggaaagaaataggaaatgagagaaagggagagaggagattaaaggtaggggtggtatttagcagatgaagcctccttagaagagaggaaatactcctttatagataggctcaactaggattcctggtgctacacacagagcttaacatagcattggcctttaataaatacttggtgaaaaaataaatgtcatgtaggcttattcattgtttaatctgggaaacaattctttctaatgaataatttcttcaaaatgctccccaaactgtgggttcttaaaagaccagtgaaccagtccagactcaacttacttaaatgtaaaccattaagaaaaatatacttcatggtaaaaaaaaaaagaattatgaattcctaatacaaatgtaacatacccagctaaagggatagaaaaataaatacaaactggtctttccttcacacatcaaaagtagtgcatgtgttttaaatggaaaacttcagaactattaactcagtgaagcttggaaaagttcaaagataacagtgttctatgctttttaataacaatgaggaaccctcttctatgacagatactaatgttaatagaaacatcctttatttcaaataaatgaaagagagtcacacttaacactaatttggcattctcacagaatatgaatcaacgtctttctctcttaaaatcagtcctccatgagctagcaacctaaaataaatgtgaagatttcgtagtgagaggtattcatcatgtgttcagtgaatgaacttctgaatgaattagtgaaagatcacaaagttgaatattagagaaaaggataaagccaaaagactttcaagaactctgtatttttttgtatattcattcagtaaatatttgtgaattaagagccgactacctggcaagtactatataagacactgaggatacagcacaaccaggtacagtcatcctctcccttccaaagatgtgaaatctagagggtgagcagacaaaggcaactgacatagtaactactgtgaaaatataaggggtgagatgagaaagaaaaggtgcaagaatgcaagggcaagaccgtaacaagccaaaccagctaaggtggctgtgaactaggcccagttcacttggtctaactggatcttcaggaaagagtgcaggcccttgatagccttggtcagcagtctgtatttattcgccatgcatggagaagccactgaagcatttcggagagtggagatgtatgacagattctgggttctctttgcaaagctgaaggccactgggaatatctttattgcagactaggtaaaagattcaaagcaggcctggcctgtggtggtggcagtagagatgcagagaatttgagatgtatgtttgaggtaggagcaacaagacttaactaatgggggcaaaaaggaagagaaggatcaaagaggattccaaggttctggcttgggtagtaggtgaagagtgatgtaattttgagatacggtgggtgggacagtgtcatgtagctcaccatttggagacttttctttcttgaatttatagaattctccagaaataactagagcagagtttcctaacctgggtctacagataggctccagggcttctatgaatctcctgaaattgtttgcaaaatggtgcatatgtgcacgcacacacattgttttcctctggtataaaattcttaaatagtctcctgaccccaactaagataagaaatctagatttaaatcagaagaattctttgaagattagtccccaagagaatgattagaaacaggctcagacttttgctcactttggcttagaatctaatatacccagtactaaagagtaagaaaagaagttcactctgtctgagcaatgtgccataattcacaagcatgaagcctccataaaagacaaacaaaagattttttaatgccataacaccgaagtcattttaatctgattcagcagtgaacaatttaagacatgtctcctccaacaaaggcagctggacacataaagatgattgtgtgatccattcaaaattaaagaataagctaaatcatttacaacaataaaaatgcagaaaattctaccagaaaaaaaaaaaaaaagagagagtgaaaactttcagcagcaagtgatttccaaatgtttccaaaacaggaagcaaaagacattttaatgtcactgtggcagcttccagaatagagtaagttaatcaggcagcctctaaaaacaaagcagcaattcattaaaaacaacaactgctactcagcaatgaactgtactgccagagtgtcaagaaagcaaactttttcaagatagtgatttgtatgcaaatatagctcagcatttatcactaaacctccaaggcctgtaaagggggggaaagaaaagttctttccatctgcttacacctgtctcctaataaaatcaactgccaatcacaggggaggctggggcattttaaaaacagtcaaagaaatacattcacaaatccagggtttcaaacaaaaaactcctgtctactctttcttcttcaaatctcctagcctactgtcctcttcctaaattggagttaatatctgtacctacttcattgggatgttaaaagtgttttttcaaaataatagcatatttcacaccaacaaataaaagctgaacgaatggttggtttagaaaaaaaaaaaatagtcaatggaaatgaaatccttcaaagcttccctcaatccagcaatggtaatgcggttatgtgattgaaacagtgtctcactagcaccagtgttatcgtttggaacccagatcttcattcatctcatgtttaaaatgtctgtacttttctacattccactcacccacccatctccattttctcatttgatctctgttttttatttccccctcataatgtaagcatcactggtagcagagtctaggaattaatcatcttataatcatttagtcttcctctccagttctaacttacgactttttcaaaatatggttgctaacaataaaaaaaatctcaaaatgtgaaaacaaacaatggaaaaatattgtaaatatttaaacgcatttagaatttgcaagtttttttcactctaatgtcatttttcaagctatgtttagacagcacagaacactatatggtttacctaatgtttaaattagtagatctggccaggtgtggtggctcacgcctgtaatcccagcactttgggaggccaaggtgggtgggtcacttgagatcaggagtttgagagcagtctagccaacatggtgcaatcctgtctctactaaaaatacaaaaatcagctaggcatggtggcacacacctgtaatcccagctactcggaaagctgaggcaggagaatttcttgaacccaggaagcagagcttgcagtgagccaagataacgccactgcactctagcctgggtgacagagtgagtaagactgtttcacacacagacacacacacacacacacacacacacacacacacacacacaaaattagtaaacccaataatccacaaagatctataaaaatatgaacttacaagatttctatatatttgaatttcattttgtatataactgaaaaaaaatatttaagcatgcctaaggaaaaagaaaactgtggaaacaaaacaaatgttctggcaattctgcaacagtttcacatttgtatattgttattcctcctgaagaatcctaaaattcactctcattttctttatatgcttagatattaaaaacatgtctttgacaaccaacagtcttctgtcatggggaatcagacatcggccccataatctctcattaccaacatcaccattgtcactgtctttaccatcatcacttaaaagaaaatagaaactgcttaaataaccacagctaaaataagtgtcacaagtttcttactgattaaatgctcctccgcgagactgcaacctcgaatactacgccatagagttcagattccaacacctttaatgtttctataaggaaaaaaaaccacaagcgttctccctgaaaacgtactcttaactcagaatctcttctggttccatttagtttataaaaaaaaaaaaaagaataattcagattgaaggatagtattttggattttcagtgttattgatattcctcgatccatcataatttagctaacatagatcactgcctatagagcagtgctgtctagtggaactttctatatcctatactgttcaatatagtagccactagccatatgtggctactgagcacttgaaatatggctgatgtaatcaaccatatttaattgcattttgttttaattttaattttacatttaaaaattaaatttaaactttacattttaaataccaccctgtagctagtaatcacttgtagctagtagctattacattgtacagttcatcaggagaggccacaaatttatggtaacaaggagtggtggaactggcacaactggaaaacacatgccccaaggtgggtggccaccacctagagatttttttgttcctgaagaaactagaaatttgaattgctatgtgtaattctcttctatttaacttttggcaactataggcagtccttctcatggttccaatatgcacatatttcagttactccagtttaaacaacaccaattccccaacaacacggtttaaatttcagttaccatgtcacattaactctgggtcattgggtaaagtacaagctccactactagctcttcaattcacaaattaccatgtagatcatagatgtgcatgatgatcagagaccagtcacatcacttcttccaaagtctgtcagtgactgatcactgcacatctggtattcagtcagaggcagccagcaaagtatgtagttttgtatcccactgatcttccagtgatgaacccacatatttcaccaaaatggataatcgaaagagggaactggccaagaaatatgaaacacaagtgaccaaaaacaaaaacaaaaaaccaaatgtgacaaccccagaagtgcactttgaatcaaatgtaaataaaattatagaacaaataactgactttgggaatgccaattgcgctgatgttcaggagattctagatatgtaacccaaggaatttagtaaagacaaacttattaacataaattaccaaagaatttatgatgcagaagaaaaagatgtaccagaggaagtgacatcaaaaaagtcacattttaaaaaacgtcctatttcatgacattgaaaacacaaaggatgaaatattggaaggagatccacactttaggagggattatgacaatcagccaaagcacagaaaagatgccccatctgtactgttagttgcaggataagaaaaacaaggcaagaattgttcaagagactctcaataagtgattttcaaagaaataaagcacttcaattcttagtgtttctaatgttttaaattacagtgtactaaattagtattagttcgttttttacttctttcattatatttttctatttctttatactctgataacttatagagggtttttaatgattagagaaaaacgttaaaggtcatagaacagtcatacgttttcccattgattactaagtggacattgcatggtttccgcttgcgtggtcatttttatagtcccacactgctgtataagatgaggggtacttgtacttccaatgtgttaaaaaatattgggtggggcaaataaaacatataggtaacaggccacaaatttaaaacctgtgccaagaactagtgtcatatgtgatgtgcatcttaatattaggagagagcagatgaaggaaaatcaaggactgtgactttaaaaagacatatatatgcagtctctctccagaaagagcagacccgtcgtcatatgctcctgaattctcccaccacactgcctggcaaaattaaagtcaaagttctcttttgtttcccaagtagcctgagaactgcatgttactgtctacctaaataacagaggctctctaaaagaaaatgatatttattgagaaatgggccttgtcttgggaatacatgtgccacagtaaattatgagtattcagccaggtgaaggaagacaaaggtttttaaagggcaagtgaggagaattacctaattgttttgaggtaattatccttggttactaggatcaataacattgtagcaccagaaagaggttggacaggcagttgttgggcagatgtcctcatagaagcattgtgtgtgtgtgtgtgtctgtgtgtgtgtgtgtgtgtgtgtgtgtgtgtacaaatgtgatggccttggtgcagcgtggctttttgcagagtcttttatgatagtttttgttatcaggcatttgtacatgagaacgctcccgtcatggcctttcctagctctatttgtcagggttttgtttgtgactccatttgattctgacaacttttatattatcaaacctcctgaactctgaatgcatcattaaacctggctgttagcattaaggtttccccaccaaatgttctcttgtacatcacaatatgactgaagggagattacataatgagtaacatcaataccatgcatgttctatattccatatggataatgcgcaacaagcaaaattcctgccaaaatccttattttgacacaaaaaacagaatgcagctatagctgtatgttttccttcacaatgttccactataggccctttctgtagtgcattatctgccgctggtccagaagctctttaaaaacagaggccacttatttttcatccttggatccaaagaccagcatatggagcccaggttaggacagatgtcacctcttagtagacttatcaatcccatcccatgaaggtatccctccttccttttcttcccatttgtttgtatccctcatagcttatatcaatcttgaaattttagtactcatttatgattacttgttttctattgagaatgcaaactgaaatgagggcagaaatcaggaatgtctgcttctcagctgtattctacctggatacagtatactgcccatagagcacttgctaaacactgaattggtgggtcaatggatggatggatggctgggatgcatggacggatggtagatgactgggtgggtggtttgaaaaaatgtctaagggaatgactattagaacgaatgactgttgaatgaattactgtttcattaataaataaaaataaataaataaaagctaaaactattattttagtaagtagagagtagaaaaaataactgttattttcttaatgttttataaccataaacataacattctctgggttgtcttccttttcccaagttatgtcctcagataaatctaaaaatgagaattcttccaatgggtgatctcccctggtccagtccactatttgctgaactacaagatggagaagtttcactttgcagcagcatgtgtgaaaacagcttggaaatttttgtagagaataagctcaagaagagtcaacagagaaatgttgtttctacaaaacacgttttatctcagattgtgaatgcaagtctggtgttgagttgagggaggtgatttctcactctgatcttattgacagggatagtcatggagttttctgtcaacctgggagccaccaggaacagcctatagcacattcacaaaagagatcagtatggctgaagaaaatcaaagaaaagagaaatgaggaaacaagggtcaacctttgactatagcattgcaaaggcagtcattctaggaaggaggaaagatgcaggtgaaccaactagtaaatggtagaacagaatctgaatccagcatatgacctgtggagtgactcagatctggattccaattccatttttgccactttttagccatttgactctgggcaaataaactcttatcagtaacctcacctgcaaaatggggcttatttattctcatggaactgcatttcagagtaaccaaacagcaccaatgatggacaattcttcaaagaattctagcattaaaagcaaaaggacccccaccattttaaatccctaaaaatataactgactcatgcaaaattatcaacaggtaatttggggcttaggtcaggagttcttaacctgggggtcccacagaggcttagcagagggtgcatggataaaaggaaggaaacacatgaacatgaatgaaaaaaatgacacacagttatttttactaatttttaactaaaattttgtatcttattaaatcacagatgtaggcaatgaaccactgtagtaacagcagtacctatgagttgtgtcacagtataaatcacaggtatttaaaaaatatgtaaagtaataacttgatagttattgcagttaccttgaaatatcatttattctagaagtacttatcattacaattactatcacacaattatgatggtcattatagctgctaccacttctcattatttaatatgtaataaagaaatgcataattcactgtatcacaaatttgctgttaatactgtgttaactggtattaaataacatgaatttccttggtacttctctatacttaactgtccttaattaaaatcattattgggtgggagggttgctcgaggctaggagtttcaatccagcctgggcaaagtagtgagaccccatatctaaaaaaaattagctgggcatagtggcgtgcacgtgtggtctcagctactcaggagactgagatgggaggactgcttgagcctaggagttcaaagttgcagtaagctatgatcatactactgcactccagcctaggtgaaggagcaagaccgtaccttgaaaaaaataataaaaataaaaaataaaaacattattgggggaaaaggtatacaagcgtcaccaacagccaaaaaggtgactgaaccaaaaaggttaagaactcctgctttggatgaaagtgtgacgggaaactttataatggagaaccaggctgtcactacctaaatctgctgatcaatttcaggattctaagagcaggacatccagacattatgcctccctatacactgtgatttgaagcacataatactactactacaaatgcttatatctgaaaataatccatagacccgcagctgtctaatagaactttttgcgattgtttacactatgcaacacagcagacactagctgcatttgaaatgtggctagagcaaagaagcaacctgaatttctaattttacttaagtgtataatcagccacctatagctagcatctaccctggagcccaccttagagctaacttactttacaccaaacacaagatagagaaacaagttaagtaacactaaagggaagcaaacagacaaatccgtactatagaacagtctacaggacaactgactcagttaaaaaaaaattcaatggcataacaatattggattaaaacagcactaaaacaaataataacctaatataaggtgtggatcttttttggatcctgatccaaccaagcaatgataaaaagacattttaaaacagtcaaagaacttgactactgcattaagaaattcctattaattttgtgaaatatgataatggggccaggtgcagtggctcatgcctgtaatgagcactttgagaggctgaggcggggggatcacctgaggccaggagttcaagacaagcctgaccaacatggagaaaccccgtctctactaaaaatacaaatcagccgggcgtggtggcgcatgcctgtaatctcagctactcaggaggttgaggcaggagaatcgcttgaacctgggaggcagaggctgcggtgagccaagatcgcgccattgcactccagcctaggcaacaagaacgaaactccatcccaaaaaaaaaagagagaaagaaagaaaagaaagaaagaaaaagaaatatgataataatattgccaattagggaattttcgtagtctttaaagatacatgctgatgtgtgtagagctaagaaaatacttctagcaattgccttaaaatatttcagcaaaaactcaagtggataaatgaagcaagtgtggcaaaatccgaatgacatttgaatctggttgaaggtaaacaggccatcctttgtattgtttttggtgctttttctgagtatgtctgaaacatttcaaaattaattttaaatgggataatgcattgggtacagtgaccaacacatagtaaacattcagtaaatgttaattagcaagtattagcatcatcaacattatcatttatgttctcaaaagtcaaaactaagatcaatcagtaaaaaatacaaagaggtagctttcagcttcatctaagaacaggctctgggaagatgaaaatacaccgtctcgtgagggagtagccaacagcatattcaagataacaataacagcagtgacttacatgattgagtacttataatggggcagatgtggttctaagcactttccatataacccctcactcaatcttcacaacaatttcataaggtaggtactctaactgtccctgctggagcagagattgatcacttggtgaggatgctgcagaagagggtcaaggtgaatggctttgctagttgccctttaacatccctgataaccctgaactcctctgattcaatgaacatgtcattcagatgaattgtgcaggttggccagctggctggctcacacacacatacagggcaattcttgcttttacttactgaaaggtctttaaacaccacctttccctttcaagtaggagactaaaacgtcacaggaatttaattatctgtaggcaagaagatgatatgatcaagaaaatgctacatttaaactactccatttacccactttcaaatttcccatcaattagaggggaacatcttccctaggcagccatttgaccaagaaatgtccgtggtatatcttcgtcaacatgtttcagaatataaatccagattacacaaactaaagttggtataaaggctgtcatcatatattatatcatttggaaagaaatattggtgaccttatccagtatgactgttataatggtaataaaattgaatctttgaagattacacttctggtcaaagtagtaaaatgtgaccttattctattcaacattgacatttattatattaatttacatgtaaaaaactgcattagaatgatattaaagccctggttagaaatgttagaaatgggaatgttcaagaacttcagaaataagatttcactttaccagccattcacagcattgagtttgtttgatgcaaattaaactaaatttccttcaccaatctctgattcggttctaattttattattatcactatctcattcatacaggagatatttttcccaatgcctctttaaacattttataaaccttaactcattttcatcatgctctggataaaaagataacacagagcactgaatatataaacctgagtcagaggatcaagccatctgcttatgacggggagagtctcctcagcccagtaaaaatgagcttagcgatgagtatacatcagatagtgcactaggtcctagaaggataccaaggtccagaggtgagaaaagagagtcagaccgccacgtgggtttcacagaatggccaccatgcagcaaaaagatcgctcttgttgcccaggctggagtgcaatggcacagtctctgctcactgcaacccctgcctcctgggttcaagcaattttcctgcctcagcctcccgagtagctgggattacaggtgcctgccaccatgcccagctaattttttgtatttttagtagagaagaggtttcaccttgttggccaggctagtctcgaactccttgccttggcctcccaaagtgttgggattacaggcgtgagccaccacacccagccaaaaacatttttttatactggtcaaaattttatagggaggtccctcccttaaatataagttttgcaaactttcagtttgggggtagaacatggaatcatgcaatgaattaaggacaagattcagccacacctcaacagattattctattttcaccattagcccaaagtccaggcttgctaggatgggtcccaactgtccttccaattttgtttctcactattctcgccagcacttcaaggttccaaccaaaattaactttttgctatgtatttcctcatatgccttagttaatattgtcttctactctgaatatcttttgactttctatcaataggttaagctaggtgttgctatgataacaagcagtcccagcatttcagaagcttgtaacaaaaaaggtttacttcttgcctgctatttgtccatggtgggccagcagatcagctctgcccatctctggcactctgatatccaggctaagagagcaaaaaccagctcaaatactgttaggaaccatcccaaggggaagagaaaactgcagggtcttacaccagaagttaggtgcttagtccaaagtgacacaattcactgccataactagtcatgtggttccaccaaaccacaagaagcataatgctaccatacacctggaagaaagaagaactaaaaatatttggtcaataccatcaatgactccctatctccatgtgtcccaaatctgataatttttccagatctaagttagattccacctcctcctaaaagaaaaccacagtccttcctgctaaaaggaaaccgttcatatggttaatatacagagcatgttattttacctcataagactctcatgactctctgagaaccgtgtctctattggaattccgtgtttcccataatgccttgctagataaatactgcttgaatgattgaacaaggctgtctgtataatgagagtttcatctccaaagacttcgaataccctggaggctagtaatacgtggtaagcaataaaactttattttttcttatttatatcataaagatacttaaaacaatattaaaatgatcataaagatgaaataaaaatgagcccatagtcccgccaccctaaaccaacaaatgttttcatttcttttcctcctggtcctattcaaagggcatccatttcctttacatagctgtattcagggtgcatacaaagagagaattctaaatagaacagaagtaactgcccagtcaacaggttttgtttgtttgtttgtttgtttttgctcttccccaagatagagacacattgggccatatcctaatactgagacttattttctgcaataaaatttccgttaatttaaagcttctaagctgtttaatacagtcaccatcattaggaaatatcagtgtagtcttcaccactacttcctctccttggctcaacactggaagaaattgcctctagtgaaaggagattgacttccaacatgagaagaaggaagaaaaggagaagtgtgtgctaaatcttggacagttctggggaacatcgtagaccaacgtcaccttgtcacggtccgacgttaagacatcattaacaagagctaacaaccaacattgaagttttaacctcattcgtgaatttatctgattattattttgctccatttagctcatccaattcttttcattttatcatgcactctttttatttgtgtagtctgagttgaaccttttctaaaacaaggtagaaaatacatacataatgcttcaaaaaaatgttttccatactgccaaataggcactaggaagtctcaccagagttgataaacaatctagatggccatttaacccactcagcttacttaaaaccaagtctttcttttttttttttttttgagacggagtcttgctctgtcgcccgagtgcagtggcgaaatcttggctcactgcaacctccgcctcccaggttcaagcaattctcatgcttcagcctcctgagtagctgggactacaggcacgcaccaccgcactggctaatttttgtatttttagtagagacagggtttcaccatgatggccagcctggtctcgaactcctaacctcaggtgatccgcccgacttggcctctcaaagtgctgggattacaggcatgagccactgcacccggcctaaaaccaagtaagtcttaaaatttgtactcagaactactttttttttttgagatggagtcttgctctgtcacccaggctggagtgcagtgacatgatctcggctcactgcaacctctgcctcccgggttcaagcaattctcccgcctcagcctcccaagtagctgggactacaggtgcatactgccatgcccggctaattttttgtattttagtagagacagggtttcattgtattgcccaggctggtcttgaactcctgagctcaggcaatctgcccgcctcggcctcccaaagtgttgggattacaggtgtgaggcactgtaccttgcctcagagctacttctatactgagaataaataaacacccaaacacctttcaatgttattaaatttcagagtaatgactttttgtctattttctattttaatagctgatagattagtaggttttcaagctatattttaaaattttatgttcagtttcctaaccactgccacatgtacacataatttatactcttacatttttgaaagggtttattattttatgtgctatagttattgatctgaatcaaatctttcttacttgattcaacagactatagtgggaataaaatgtgactatttacgaatgttaaccactgctgtaattcatatgaaatctgccaagcctattatattaggaataatgttatatattttatctaagagtctgataacacctacctcaagtctaaatattctctgaaaaatttgtcagaataaaacaagtgcccttaaataatattttcaggtataactgcagacagttgcttgtacgtttgtctttaactttaatactgtctcaatatgcatgaaacgcttgatagttcaatagttgttttcatgagttgtgccttcattaaggtacaaaacattaaacacctggaatgctgctcgaactattcctaagggagaaattttggtgacaaatgaaagggatacatttttaagctgaaaaagttgctcgctactgataaaagaatttatatcagaatattccaatagagcagaagaaagcaacatgaaaagaaaattaacattcattaagaaacagctaccatggtgcgaaacaaagatcacaaagccaaaactgaacaacaatcaaatttctacacaaaaaataagacacatacaatgcctacagttccgattgtctaatgctgtgtaacaaactaccctaaaactaagtgacttaaataacggtcattatgtactgcctcttatggtttctggagggggtggtcaggaattttggatcatctcagtcagaaggtctggctctgaactttcatgacactccagtcataccgtggctgagactagggccatctcagtggcttctatatgtatgcctgaaacctaagctaggatttgaatagttaggggcatccctctctggctccttaaggtgtttccatgtgctctctcccatacggtggcttcaaggtagccagacttatcatatattgccttgaggttcccaagacatatatctcaagctagaaagaaaaccaagaaaagccaaagttcctttaaggacctagtcttaaaactcatttggccttacttctcccatcatctgagcagctccacttttatctgtttcatacatggggctttggcataagagcatgttgaccaaaggctgtcaaagtaaccaaacataaaaagtttaaaagctagtggctgggatgaagtctaatgccccaaacttcaacaaagctaggtgatggaaaaatactgctgaggggaaggctgcttaggtgatgggcaagagagtccttggagaatgcagataatcaaaacagcacctaattaaggtacagataattgagagctggattatcactaagattgtatgtataaagatgcactaaatatcttattttcaatttctcttatttttctatactgttataatagaaataatgtaataacagcaaaagcaaaaaatagtcctataaagtgttcacatggtgaattcaatactttcacactgggaagatgatggtggaagatagtatctcaggcagtgcagtccaatggaagatcttagaaccaaatgtattgagttgaaaacattaatgctgtcatttctgagccatcttaactttggcaaagtaattaacctgtcagagtctaaatgtcctcatctgtgaaatggaagaaattatgagttcacaaatttacactgaagagtcactgatccaccattctttaattcagtcataaaatatttatggagagccaaatatatgccaggtatgatatggtatggaaatacaataatgagccaaatgcctacaataatcaatcaccaaacaaatgtttatcttaagatgacacccataaacatgtccaacaaagatagtgtcaaaaaattgatgtcacctaatgaataatttccttctttctttttatttatttatttatttttttgagacagagtcttgctctgtctccaggctggagtacaatgatgtgatctcggctcactgcaacctccgcctcccaggctcaagcaattctcctgcttcagcctcccgagtagctgggattacaggcatgtaccaccatgcccagctaatttttctatttttagtagagacggggtttcaccatgttggtcaggatggtctcgatctcttgacctggtgatccacccacctcggcctcccaaagtgctgggattacaggcatgagccaccgcgcctggcctttccttctttcttgaccttcctttcttcataccataactcagtgataattagtagggggtgaaacagagccataatacattcatttgtgaatctcccctgtcctcctcacacttaccttttctctattcccttctcccaagcctggttctggctctctcatgcttcagaatctgtgaaattggttcggagggcttcaagagaactgcggaggctaagcctgtatcataaagatttaggactaggggagaggaagcgaacacaaagaaaagttggaccatgtaagaactagaaggagagactggggagctggtcctggagtgactccagggcaccaacatgtaggggagaaatactgctgaggggaatgacatgatttctgtttctttgagagattcaagactggatttccttttaattaacatggggtggctgatctatacttcttgaaggcaactctaggtgggggtaaaccacctggggcctcaagatttattaggacctcacaatagcaaacctgttgctcccctaaaagctagaaaggggggtttacaaaggagataaaccacaggtgtcagatatgtatccaaaacatctctctgaaggacttttctcaataaaaaaaagctactgatgcatttaaaattaagtaataaaacaagaagtacctgtgcatgaaatatttttacatctcccacctccaaccctgaagccatcctattagcaacctaccctatgatcctgacatgacccgacagaaggagacttgcagatccaactgctcctcagactctcacttgcacagggggcattttcaacatgtccagggagcatttgctgccttgataatgacctttgaggagaggaaaccaactcagaagtaccttcatcctccttttagtttgtcttttatgtttttttcttgagccaatgacttctttcagacagcaataatttacacttcaggaaaatgtcaaagtatagcaatgccctgaataataattaccgccaaggttggaatgaagcctttcgaagaaatgctaagttaattagccacacacttgtttaccattaggccagtggagaaaacaaggagcacaggatcagaacatgcctgcaacatatggtctttattaatggcggcatctcaattagtctatgggaccccacttctgtcaacccagagatgatctgaataaagaaggagaagaaatgttcacaaagctgtcatggggagaagatgctacctgagaccactcaggacacccacaaaagaaacttggatttctgttgttttctgtcataccttcatacatgaaattgcctcttttaatctttccacaatgcatttgttttgggacaaaggtcaagagaagggcagattaggaaataaggaggtttacccattattaccaaaaatctatttaaaaaatcatgtttccatgaatatctcaatttatcccttctaattcttattctcatttctgaaatatatactttgtttagctttttggaaaaatccacattttaaagaagtatacaataaaaaaataatactccttatttacatgcttctgcaatcatggccgcctttccacagaacactctcagacgaaggcccttttgtgccggcctacttagatgttaccaaaggtgtacaaaaacgcatctcttgcagatggctggaagatagctctgagctctttgtgttcaatcaatcccccaggaaaaggcattagaaatttattagaagcagctccctgttctcctcagtttctgagcttggaaaaagcacactacactgaaaaagcattttgaatggaaaatgtaacctgaagtatcttacttttttctttcctccatagtcctaccatcgatatatcctttgtaggactctattagtttgctaggacgagcataacaaaataccaagtaccacaaactggctggcttagaaaagagacatgtacgatcccacagttctgaggacaggggcctaaaccaatgggtcaccagggttggttccttctgaggactgtgaaggaggatgtgttccaggactctctccttggcttgtggatggctgtcttcttgatggatttcctcacactgtcttccctctttgcttgtctgttgctatgtctaaatttccctttctttaagaatacaagtcatattgcactagggcccaccccagtgacctcatcttaacctgattacctctgtaaaggccgtctccagatacactcacattcagaggcactagggattaggacttcaacttatctttctttgcaagggatacaattcaacccataacagagatgagtaaaaaaaaaagatattaatgttcaaaaaattaagtaaccaaacataaaaactttaaaagctagtggctgggataatgtctaatgccccaaagtggaaaggtaccattgtcacatatttcaaagaggaaaggtaccattgccacctatttccctggctgtttgttaccttgatgaagtgtctactgtggcaaggcattatgcatggcactgggcaacagagggaaaaaaacatggagcctctatgctcatgaatttaccctctccttttatgccagccttttcaacctgggggaaagtggactggctagagtactaatcaagctgtgaaggactttgggcttctacttcattctcccttgcattgacagctggacagttaaaagcagcaacaccaacagctgcacagcacccaactcatcaacccacaacaacggtgacatcacctaagttagcatggaagtggccagtctgcttttgccaattctttgggacattaaacccatgataatacttttaatataattctgtgtgaaccaataatgatgacaaactattcttcttgcctggttggagataataagtaacaatacctcctattttctacgaactgtactttttttctagcaccgtgccaggcacttaccatgataattttatgccattttcacaaggtgagactgatattactagctccattttacagatggagagattacatgtcttgctaaagctaccagctaatacagagtaaaggttaaatctgaaatcaaggtgtctagaaaatcaaccccatgctcttgagccttacacaatagtgtctctttcaaccttttgaacctgagcacttatgacaactgcccagtatatgtgtacacatattctgtgcatgttatagatagacagatagatagatagataaaatatctattttctccccccaaaatctatgactaatgcaataaacctcccactgattagacagttatggctttttctcacatctccatcagtgacataacatattaagcaaaaaagtccgacccagctgattagtatttgatgtgctgaagagcctaatgtttctttatatgaaacatcagacagtggcagcctacttaattactaggttgactttatgtcttcaaaataataaaacagaataatccaaacgacaggccaacgtggtgagtgatatttgaacatctactcgaccctaaaactgttaaagcaaaagtacttatccaaaatccaatactttccatttttcttttaaatgttgtaagtcaaaaccagctaaattgattttttgcctttgacttctgctgaaaagttcattcctaagcagattacatgtgtggctttgcagctcagaggaaattttacagccaagtaaaaccctaaaatcaggaaaacatgggtttgctgaatacagtagaaagacgtgacagatcttaattataaaagaacaaatatatcttgatagatgaactgtcttttgtgaattaagactcaaaagttttaactccttgattaaccgttacccattagtaatatagaaagttgtgaggcaacgtcttcaaacttctaagtagaacagagcactcccaaagcatgcagaaccccctgtaacatcactcaacgcattttcagcatgagtgcccagggtaagccttcctcacaatgttgcaaagcaaatcgtgtccctcattcccttttctactcccagcactccttggttaagtgttttaacagggtaagtgatgacggtacaggaagagaagaaggaagaggaggagaaagaacaacaatgatatcatggtaaaggcctgtagaaattgatctaccagacaaaactcaagagctcatatgatacaggattttgcttgcacatggtcacaattaaataaatgatgaaaatgagactcaaatatagattgtatacctcattccactgttacaagctttcttctaaatgaggaatcatcaaaaccaaacagaagtgtctatcttaggtcaccttaccctcttttctgattgttgaaattaaggcagtgcaagaaacctggggagacactggaaagtgtccccatgccaagccctgtgagcacaatgagctcatgaaagaaaagcccagagccaacaactaataatcgtgcttaaaactcatcatttaagaatttcaaaataaacactgatcaattgaagttattttgacccaaagtcttacgtaccttcttttgcttgtccatattggccatcataaaaaacagcaaaaaaaagaaagaaagaaacaaagatggggagttgttgcttaatgggtatacagtttcagtttcgtaagatgagtgagttctgaagatctgttgcacagtaatgtgagtatgtttaacactacagaactgtacacttaaaatggttaaaatgatgtattattccattaacttaaaatggttaaaatgatgtattattctcaggtatgataaagacatacctgagactgggcaatttacaaaagaaagaggtttaatggacttacagttccacatggctggggaggcctcacaatcatggcagaagacaaggaggagcaagtcacttcttacatggatggcagcaggcaaagagagagtttgtgcagggaaactcccccttacaaaaccatcagatcttatgagactcacccaccatcatgagaacagcttgggaaagacctgcccccatgattcaattacctcccactgtatccctcccacaacacgtgagatttgggtggggacacagccaaacaatatcaaatgataaattttatgtttttttaatggaaaataaaatttaaaagaaggaaaaagaattctctccccttccctctctccctacctccctaccttgctttctcccctccagggaagacatgtgcctccaggatggaaacaaatggattgatctggaaaatacttaggaggcagaactgaaaaaatttgaatgtgaggatgagaaacagggagatcatgggtgatttccaagtctctggatcaactgaaatggagaatggataaggaggaacacctggaggagagcacgcttggaaaggcatggtgagtttcatctaactagagatcaccagcaggagtctgccctgtccatctggagcccaggaaggagggttagggtggagattctgtacatttctacagccaactctaatttttggttacaatcaaagcctatgcccttctaaaacctttttcttccatcactaatgatcagctgtgtttccagaagtatgaatggatttatcctatatttctgcctaatatttcatatatgaatacttctaggcaggcattgggtcatatgtgtaaaacgaaagcaagtacttaacacaatagaccattcaataaagctgcttttcacatgcttcatttactactttccattgcctttttcgcaagcaattaccatctcacacatgcccagtttcaccattctgcagaaccaaatgttgaatttaggcaaacatagggtgttcaataaacaggtggattttgaacagaacaccaatgaattcaggaagcacggtcaaccagctgcgtctgtcaatggaataatcagtagctggctgcatctgtgctggctgggctgccatcggtgtttacaagctggaattgaagagggctcggccagctgacagcagaagtttgcgcagcacctgtctaaagtatatatgactgcctccaggcaatcccattagttctccactttcatggacactaggacttgttcacaaatttagggggaaaaataaaaaagacaaacagagctagcctctgactgagaaaggacacctgaaagagaaacaatcccatatggagaaacagaacaagggggtgagaatgagaaagacaagaaatcactcaagaaagccagtaatgtttacagatagtagaaaaattttgtctgtaaacagtgggcttggtagcatttttttaaatcagagatgttctggagaaatatgtaaagaactcagcccaagctttctgatgccaggcagggcataagtagtttacatggaaccttctgacttgtttatctgacatagtaaacagctttctctgatcccactgtcccttttacgcattacaagataacaaaaagttatgcgattttaggaaatcaagtatataaacagggctattctcagcacatccactgaatattaagtgcccacttttatctgctagaacttgatgtgtgaaggtaaccaacttaaatgcactgaagagattgcattcacacagtgaatagtgacattttgctaggaatttgttaaattttataatgcaagcatactgccgtaatgttccacaaaacgtaacagtcggtgcacagcaatactgccctctggtttgtgagggctatttccatcctcaattcattctagcaggaaaaagaaattaaagatatgatagaatgctatccacattgttataatgctggttctttctgaggttagtggtcacacacagtgctatagaggcggttgttctttcttgtgcctgtaactgctgaggttaatctctcagtgcttccaaatgcatatggacatttacacatatggacactgaccaatcctaaaagaaaactcaggataaatcatgttcaacttcaaaagtccagcagctaattcaaagccatgctcttgtagaaggagccattgaaaacaacagagaaaccagacaacagtctttaacgtcttatctttgtttatgattcttaagaccacacctggcgtgaaccgatatgctaggtcaccctggttcctcaggtgcattaggcatatgtgagcagtgaaactatgacaaccagaatgcaacatccaattataatgattagaataacaacaaacacttaggcaataattatttccattcattcacttcatctccccaataactctacgaggtaagtacaattattattccccacttcatggaccactcagtgccatactaagagtcccagagccagtaacgagcagactagatttaagatcaaccccatctgacttaggggttctgctcttactgttgttctgtacctaaagctatctgatgtattttaaaatgtaggtgtatcagtttggtggggttgccataaccgtgagttgggtggcttaaacagcagaaatttttcttacagttctagaaactgaaagtccaagatcaaggcatgggcaggtttggtttctcctgaggcctctctctccccttggcttgcagatggtcttcaccgtgtgtgcaccttcctggtatgcctttgtgtgtcctaatctcctccacgtataagaacatcagccagaccagattgggacccaccgtaatggtttcattttaagttctctctttctttgttttcttcttttgagacagagtctcactctgctgtccaggctggagtgcagtggcgtgatctcagatcactgcaccttctgcctcctgggttcaagctattctcctgcctcagcctcccgagtagctgggactacggacatgtgccaccacgcttccctaattttttgtatttttagtagagatggggtttcactatgttagccaggatgggctcgatctcctgacctcgtgatccacctgcctcggcctcccagagtgctgggattacaggcgtgagtctctacgaccggccttaagttctcttttcaaaggccttagctacaaatgcggtcacattctgaggtactgtgggttagggcttcggtgtgaatttttggggaaaccacaacgcaccccataacagcaggtgtgttaacgttctacaaaacgcaacggtgggtgaattgtaggacttccctctgctttatgagggcttaattgtatagggccttattttggatctttccacattcaacaagttctgagaatgtgatacttggaaaccatgttcatcagaagagtgaaaggctttcaggtaaacgtcctttgatctttttcaccgtgatgccctccgatgacattaactgtggtagtaaccagcatcattcagttgctgttttagaaggaacttaaaaatggaagatttgaaaacatgattgtgaaaccataattttgcactgagtccagtattaacagtttttcaacagagttaactcttgctgctttttgttttaaccctgagtgtctagaactgagttgggcaagctccttaacccacagcacaccagcagcctagaactctccaagatgtcacttggattttccttctgacctgcctttcctgatcccttgctacctcaccctatagacataggcttacttttccctaatattttcctgtactttaacgcatagctgtgtttttatgaaaaataaaatactggggttttatgctcaacttatttaaatgatatttcactacaaattatgttcttcttctatttgtttacatcattatgcttttgaaaaccaccagaatatgtatgtgtacctctggatctaagctgttaaacatagtagccactagccacatgcagctaccgggcatttgaaatacggctcatgcaagtggaaaactaaatttgtaattttaatttatctttaatttaaatttgaaaacctgtatcttaattatgagaatacttttaaatatttttggaatatcttgatgaatcttcttttttcagttgtacattttataaaacttaaatatgaatcaatcagttccaatgaaaatttagcctctgatttaagatgtactataaaatacacatcagatactgaaaatagtacaaaataggaatgtaaaacatatcagtaagttttatgttgatgatatactgaaatactactttacatatattaaataaaatacagcattaacatgatcacctaattctttaaatttaaaaaagtaaaaataaattttcttggtacttttttgtgtggctactaaaaatctttaaattacacatgtggttcacattatacttctaccagacaggggtgatctaggttttaattcctctaactactacaagtattctataataagcataaataataattttacttcattctcttatcagcaggcaaatagattgtttctaattctttaccatatcaaacaaccctccaaattcctgtttttatgcatcctcactaatacttattatgatctttcttgttgcttttggtcaacttggtggttatagagcagtgtttcttatttaaatattcatgtctcagaatactgaaagtgtacatattagccattcaaagttcccctttcgtaaactgcccatttatatctttgcttattaaaaattttgaattcacatcttttatttaccaattagtagaagtaaaaagatatattcccagtataaatctcttgtccactgttagacgtaatttttcagctattatacgtatctccaatattttcttagcttgtactttgttcatttttcccatagtttatttcattgaacacaaatctttaattataattaaattccttaaattttacctttattatttcaagaaattctaccctagtaagaaattgtgaagaaatttcatcttttctactcttggtttatagtttcgccttccatatttggatcttcagtccatcatgaagccctatagcacttagagcagcagatggttgccaacatcctaggcttaggtacttgccatttgagaatctgaacaaaactgaagactttcttactgaaagaatgtatgtgcataaaatactatatatataatttcaggctgttcccagacctctactgcaagccctttcatgtatccttatgcagtccacagaatccaggcgcaggatccccgagtctcacagattctactctctattcaaaaacttcattgtatttttcatggctttgctcaccatctttttctgggttatctcatattctcaactagtttatgagctccttacggacagagacctagatccaggcatctccaagatttttcatggcacctgagagctgggagtgctcaataaatacgccccttagcaagtgatattccagaaatcagactcagagaagagaatgtggtgtaaggcccaggggattactctaaagaggcctccattaattcatgcattcaatcaacagtcattgagcttgtccactgtttcaggtcctgggctacatggaagataatcaagggaaaggccacagtttgtgtcctcagagggttcctattctagaggggacagcaaaggagaagtaattataacacggggcatcaatgctctgctaaagtaaggaagtagggagcttctggtctgcataacaggagggtacctaatggggcctttgaggtaggggaaggttgggcctctcagcaggagtcatgtttaggcggagactcacaaaaatgcatagtgttaaaaaaattaaatttagcctgaggctgtctccgtaatttgagtccctacctaaggaactgcagcctaacctaacttagtctattaaacacaccgaaagcctaatttaggatgctttttttttttttttttgtaacagcagctgagcttcagccaatcacaggctgccaactgatcagaccatgaccaaataaggtgaacacctagacataacttaaggaggaggcaggatttgactgaggaggcagggctcggacaccagatcaaatcaaagactacctagaacagggacagagtggaagtacatttccgtaagatatgcccaccactggtgccatgccactttatctctccagcacttaatagattctacctgaacccctcaccctcaactgctattaactgaacctggaaatctgagtatctatatctgtagtgcattaatgattctatattttgcacccactgtgtattaatgacacaaaagtggaggtttcccttcaatgctttgatccaactctaagctgccaagtccccaaggctgtaacagtgtatacaggattctacttgtgagcaaggaaacaaaccatatatggtgacttctctcagataacaacatacaggaaaaaaataaaacaaacaaacaaaacaactgcctaatctgggaaggtaggagtactgacccactctgtgaaacaaagattggttgggtatctccattggaacagggcaagaatatctctacagacccaatttggcagcaatggatagatatcagatgttgtggagcctctatttgcaccccaactggactaatttttgtttgtggccattaatggggaaaagtcataccccatattcactcttgactaccccatgagccacttgtttttaggagtggctttcccttgtatataaaaaacttggaacagaggtgaatgtaggatggccactcttgcttctctaggggtcacagtctataatcccataagaaccaagaacaccagaaataaacaagcaacagcattaattctagcaggaatcagagcagcaatagaacgagtggcatcctggggcagctttgcctatcacgagtacaccctgaaaaactagactcaaactctagaatccctagccaccaacacaggtcatgtactaaagggaatcctagagtccttagaatctttggcaaatgtacttcttggtaactcattctgagggctgcccgattagttgactgctctttggtcaaactctgttaaattaaacttgtctacagtttttcttttaccagtaggcagctcatctgaaaacagtaggagggaaaagagggaatcctagaaatcgatctgtcataaacattgtgaactggctagagtgctcctgccttttcctgggaatcagaaagtagcagccagacaggaaaccaaaccacctgatcttttacaaacaggaatcagatcactgtactgccacatttaaagccaccaggggcatcccatctaggatgggatgggaaaaagtatgtctaaaatatatatacatagtgtatataaatatatattatatataatataaatagtatataaaatatataagtatatattacacatataattttttcttagtataagtatgtcccgcgtaatatttgcaatgtaacttacactaacaaagtatgtgttatttatcagaaagtcaaatttatggcagttaaacctgccagcccaaagcacttaaaatataaaattacacttaaaatagagtcttcagtattatattttctctggctttcatcttagtgtgagctctgcattgttccccatgcttcaggcatgctgaccagtgagaatgagaataagaatgccaagctccatcccatcttagcaccttggcttctgtatcttctttccatttagaatgtgttttccctctttcttagcgtggttggtttcttctcttctttcaaataccagtttagatgtcacctccatagagaggccttccctaaccacaccacctaaagtaggctatcccaattattttctctctagatacatatatatatgtcagtccataaacattttattctttcacttctaaactgttgccctcaccattatgtcagagacttctgccttttgcatctttgtgtccctagcccttagcaaaatgtctgtcacatacgagatactcaacaaatttttatcatataatggaaatcttaagttagtattttctctggtgcttccaagacatgcattttgcctagacatgttattgttcgtcatgtgaactggctatggcaaaacacattgccttcagagagaaagagccacacaagttggaaaggaaaggtcacaaggatgaaagaactctatcaacattaatgccttataaaaaaatctcttaagagataccaaaagatggaaagaaattgagtctatcatttgaagacatcccccacccccgcttttttgctttcctgcaagtcatatctgagtcatacctaaggcactttggctgtgcctccttgtggtcctctccatttcttactacttcatctcatcactttaccaccttcaaagagtcctttcctcatataacctcacatgatgttcacaggattaaaaaactccaaacgttcaatagagaaacaacattttcttaaaaatatacagacagacatatgcgaattctttcaacatgcttataaatctatccacaaccctactcagagtatgcttcaaatgtaaatcagaagccatatatattgtattcttccaagtgattactctggaaaagaaaaatcacacatatttattgagaggagaacaaatttaataattttgctcaatcatcaaaaacatttctaaatatgagctatgataggaaaaaaatcagtttaactttacatatgaattattttcctgttttaatcatagaattttttaaagttttggattagattcaaatttcttcagagaactaaatgataagtttgcaaacaattactggaaagaaataaggacaggtgagagcaaaagaaagaaaaacggttacagagtgtaaaactattttcaagcacaaagttaaaaacttctaatacagaacctggaaaacactttatgtgtgtgagataaatgaaagcgttgaggtcagattagaaaaacaaaacaaaacaaaacatagcttctactgacaaatgtaaatgcaccctgtgatcctgttgccaatgaagtggcattgctctgatgtaccactcccatcccaacccaagcacacacttgtcaatgagcaccagggttttcaaattatccagaactctatcataatgatggagctaggaagttctttcagcctcttaacagcagcgcattattttccctatagataatactgagaacatggcaacacttctgcctgatctgcttattaataatacccaacacagcatttattagatagagaactactagatgttaggtgctgggttaagcacaggaaaagaatcaacaaattctacatcattttctttgttgtgttggtggtggtggttactgttgtttataccttcagatctctttctacactaaatttttgggtagaaatgtttaaatatcatccttagcctccgcaataataatagcatttcatcactatcactggtgagaaatttgtgttttatttttgtttacattttacattaagaaattaatgaagtgggaatggctacctttgctgtatactccaaactcccactgatctgtgtgtgggttgcgtgtttgtctagagaggacagttgcccaacacaggaaaaaaaataccctgtcattatatgatttttcacagaactaaaaagaaataaactacccccattccaaagcgtggcctcctatctttttgctacacctcatatacttttctcacatggcaagaagggtacccttgactgctcagtgcctctccctcctcttgatgctgagatgctccaaaacaccactggggttcttcaggagggatttcattgtcaactccagcttgcagtacagggaagtgacatctagagtgggcctctttttgtcactttccccatactaccacacacataaaaatgcctgtcaaacactgtcctacatacatggatgagaaaaagaaataagcactctactatgaaagactctaactagaaaaagcaaggagatgccaactgacaaatgtatggtgatggactttctttttttttttttttccaattctcagatttatttctgaggctctcagccaatttctgtgtcataaagatggtgcagttcagagcttaattgctttagcacttgcaccaagaaaaactgtattgcaaacaatgaagaaagaagagaggaaaccaacattttctaggcactggccacgtggcaaccagtgtacaaggcatttagagaaagctttttgattccattcaatcctggaaaccaacatgttgaagggccagatttttcaccattttatagggatgcaaactttagctcagagaggttaaatgacttgccaacagtcacacaactagcacttagaggaacgggaaggctaactcggagctgatgctgcagcttacactcactccccactcccacgcaacacaaactctttctaggcagcttcgaaggtaccaaacaagtggctcctaaggactcagtaaacattcctgtcagctggccaagatgaatattttggataatgtccagacacgtgaaataccagctttaagttgtggaagtgcttcaggcacaaccaagtctcatttacgtcctttaaaaaatagtcatgacctgcccccttcacacactgtcattcttctggaaggtatctgagagcacagctctgcaaatgccaagagcattatgcagtttccatacatagggcttcctgagtcaggtttggcagggcaggggttcagtgtacaatatttctgccttatttctttaagtttctcttggctacagctcttaagagacacacagagggaatggattctgtagaagatttctcccagaaattttggtgtagattagaaagcttggtttgcttctggttctattacttgagatttatttggaactaaaaggttttctgcctgagagtaaccatttaatatattggggaggggggaagaataaaatgctccttttgttttgctatttgcaccaccctgtcccgattctattgtttgcagtaagttttgtaagagaaactcttctgcactccttattgtgttacaagtttagatgtacccaaaccatcagcagttagattccaagtatacgcttttgattgattcaagtgcattacccgggagggtgtgtgctttgctctgttgttcttccagccaactcccttgccagctgctgaaatgatgccaccaccggtctccatgtcatgcagattttacaccctgataccaggaaagcagaagcatttctcaaaagactttttgctggcttggcaggaaaacagaaattgctttttatcaaaatgaaaaaggttttcttcatgggaaacagcaaaagcagtttgaaagaggggccaatacttttatcctagataaggtgttttcagcagagcagacagaaaaacatgttttccttcctttcatgacatcaatcagatccccaaagccagctacctttattcacagaacagatggagcggtaatggtcccagaggccactcttcctggtctggggatcttgccatccctgcctgaaagttctcaaatccaagctctgggaacttgggatgcttttttctgcctctcccacactccaagaggaacacatccactattatgcatgtcttcattctttgtcctgggtggaacttctgggggtgggagaatgggtgataaagggggaagtgggattcactttgtgaacacctactagaagccaagccaggtacatcctatgcattatttcatataaaccttaccacaaaactttgagtggtattattatgtccatatgacagacgccaaagaagtagactaggggagttaaatgaaatcccaaaagtcatatactaatatgtggaatactagtaaaatctggaatgtgaaccctgcctggtctgttgcttcagagctttgatgtgccaccaacaaacacttccatgcctctctgcttagaggcccagtttaaaatgctatcctctggataaatatgtggtaggtccatacaatggaatattactcagccatgaaaatgaaattctgacacgttacaacatgaatgaaccttgaaaacataagctaagtgaaataagccagtcacaaaggatgatattgtgattctgaaaccaacccaataatcccatagatagttttttggatagacgtagaaattgacctttgtggtcttaatgcttgaagtttatatttgttttaactgagttccttcctcaggaaatgaccttcaggcctctcgaaaaaaaaaaaaaagtattggcaaactgaaactcaccagatcaccacattttgacaatgagatgctggacccctcattctcaggattgcttccttgcctctccctagttcctgttttcttatacattattacatttcttcctggctatataaacccctggttttacatagtctggttttggtcagggaaatggatttgagactgaactcccttcttcttggcaatactcatcatctcagtgactggttttctgcacggcaaacagcaggacctagaccgaacccctagtgttttggtaacaattccacttctgtgaggtacctagaataggcaagcttacagagacagaaaagtagaacacagattaccaggggctgggggagggagaaagtagtccggggaatagggagttattgtataatgagtacagagttgtgttttttttttttttttttttttttttttgagacagagtctcgctctgtcaccaggctggagtgcagtggctcgactcgatctcggctcactgcaatctccgcctcctgggttcaagcaattctcctgcctcagcctcctgagtagctgggattacatgcccagctaatttttgtatttttagtagagatggggtttcaccatgttgggcaggatggtctggatctcttgacctcatgatctgcccgcctcagcctcccacactgttgggattacaggcgtgagccaccgtgctgaccgtgtacagagtttctatttgagatgacagaaacttctggagttggatagtgtgatgactgcacaacattgtgaatgtactcagtaccactgaatgacacagttagaaatggttaacatgctaaattttatgttatgtgtagtttgccatcacacaaaaatgttccctgcttttccctttgaaagatgccacatctgccctgattccaaagctctttcttagaattgactcccactagctgtaaagtgacacaaaagatgatctactccaggcatgccaactcaaatccactgatagtgacagctagcaacactgtgttaagaaagattatgaggatgttttcagggccaaaaaagataaataacatgatcgatttgtaaaaatcccctcacaatgagacatcgaaatgttggataaaatacaacaaaatattaattgttctgggaaatgtgaattgggaaacacagaccaagtggcaaaagcttgggcagagagtcatggtattcagaggccatgatggtcaaatacaggttgatcttctaaaaacataggaaccgagtgagtaagaaaatcaaggcaactaaaacgaagaaaatgttacagtaggtaggtagtcaggcgtgatggggcaggagagggccctcccaacacccccaccaggaaagccacgctaccatcaggtgatggtcaggtggttgttaactctctttaaaataataatttgtcacagccagcaccagggaaagaccgtcttcctatattgataggaaacacctgtaactggtaatcagcagttttcaggagttgggcgagtgagcacaagcatgcgcattaagagacaaaatggcagaatatggttttctggggcattccactggaaaagggaagaaagcctcaggtgggcatacatacaacttcttaaacacactcacatgctcacctcccacatgttagcaggccacacacatgtgggtggcccaccttaagagaagaaccatgggaaaagggacacaaggcccagaagtacaacaacatataaaacccacgtcaaaaggtcaaacgttacatgtgaccttcacagtgcctgcttgggtctcttccagatatactttcctttctttcctgtgctaaagctttttaataaacttccactcctgctctaaaacttgtctcagtctcttttcctgccttatgcccctcagctgaattctttctcaggaggcaagaactgaggttgctgcaggcccatatcgattagccgccagtaacccaaatattcattgcccccaacaaaaagagcagaggttttctgtgcctacgaggttcatgaatgagggctgcctagagctccccccattcttgttgggtctccccttctagtacaagactccttgtagctttgcaataagtttaccttttccttataaaactttactagctattcttcaaatcgacaatggtttgacttcaacaggtcttcatggggtgatcacatcatgtgtcatccatagagggtaatttgaacttataagcattaaccgtgctccatgagttgttgttttttgttttgttttgttttccttttgctttgataaacaacatacccagatacatgggggaaaaatggtagtcatccaatttcttcatattgccagactcacagcaacaggaaagtgacgttattaaccctggggagcctctataacttcttaaaccataaacaaaaataaagaacataatggaaggtataattggtgttaaaaaaaaaaacccaaatgttttctgaattccatcctcatgttacacactcaaaaagtttctctgtaaagaaagaaaatctttgactcaagaatcaactttctagctatctcaaaaccaaattataatgaatttagaccgtagaatcaatactgggggactaactaaggatcactaaatcctgtgttattgattgcttggagaaaactatctttttaaatatgcatcacataacaaagttctttatttctaagaactttctccaaatcctcccatcacatggtttatgtaatgattaatcctttgtattaactactttatgtgtcagaaatattaaaatgcatattaactgttcctgggaaatggttctgcagtttctcctaaaagtatactacctactttgaataagttacatgaaaactgtggcacatttgggaagaaagcagcttagtaggagaaaaatgagatttgcaattataagaactcaatacatgggtgtcttaggcatttccagattttaaaaaagtataatgacttttctcccccagtgtgataccaaaatcaatggaatggttttggtttgttttctactggagtgtaccagttagatttaatcacagagggaaaaatcttgttttgatttctcttattaattacttcttggaaaaatgcactgtagcattcttattcagaatttcaggaacaaaaacttttcacttttcaaactgcaaatgaaggtggggtaaatgtgtgaaggagctaagatctagatatattagagtttctatctctgaatccaggaaggactttgtttatagtggtggaaatcaagcaaggagctattggttggtccacacaatgcctaggtgttggctgtcatgctccattcagacccacaatcccaatgaaacctgtcactttcaagagtgcaaataataggatggggaaagagtgttagagtaggacgttttctaacaagagcccagtggattcctacctttcatctaataaatttcaatggtttaagagagcagatccataggtgccacacagcgaaaggacctgtgtaaaaatcacagtgagactctggagtaagagatggaatgtgatggcccgaggccctgccctccaaccttgagtccacaacatacgacctctttaaaaaactccctccagaagccctacagtttcctctctggtttgcgtcttactgctgaagagtctgtttgtagagatggatatctgactaagctagctttccttttttatgctctttccctcaagaaccaagggtttttcacattccaaaataaaatgcaaactgagagcattttgtatttttgcatttcgattccctgttttgtcagtgagtaattatagcaaataaaatattgcagctgaatgtaaattgttaggcaaccagatcacagcaggatatttttcttccacaagttttacatcatagagtgttaaatattaaaatattgcaagtcaagtaaacagagagggttctttgctcaaaacattaattttaaacaaacatttcactgttattcagatcggatgctaggaaacaaatgacattttctttcaaataaggtgaatagatcatatgaaaggaaagcagacaagggaatcatacagaaggaagggcatttatgacacgagagatgaatttcagccagaagaacaggagagaattcacatgtaggagagaaagcaaaagaaagagaaattggcaaaacaacatggaaaagagcaagaaatgagaaagactgacttactgctagaaggggaaaaaatgaagatacgtctcatgtcagagtacagagacctgactcaaaataaggcagctggggaagaaatgaaattctttctaacatcatgaatttctgtttccttaggttattaccagaaaggtagaaaggagatgaattttcagacctccaaaagatcaccaatcaataaaataccaatcaataagcattgattgagtacctaatgtgtgctcaacaaccaagtacaaaattagacatggccttcttctgaggtaccttactatggagttgagatgaggagatgctgaaacaatgaatgagagtggaaatgtattctatgctgtggagtgaagaaaacacacagctcaggattcaatgataatgacaatgagggtggttgagagtaactgtcgtaacactcttattttctaagcacctcctacattccaagtactgtgctggatgcttaatattttcatttccaacatttaaaacaatccattaagaattatctcctctagtgaagaaaataaagcttcaaaacttaagttgcttgtattacacaatgagtaaatggtagggcctgaatttaaccccaggtctcccaacccaaagatcacgatctttcttctactgaagtgctggatttatcctaagaaggcattcttctgttaatccttacaccagaatgccagctaattaaaacagaaacaaaaacaaacagaaacgctgtttgagaaatgttctttgtaagggagatgacctaacatgaatttttggatgaaattataatggatatggaggagttttgtttttttggtttgagaaagaatcttcaggaaaacatatagaatttgcaggagagtcatgttcattaaaccatctcagagttaaagactggagggaatagatgttaatagccataaaggccttgcagaaaaaggcaaaccttcttttccagtaggagagaagaagtgaaaagggatggaggaggagaagagtcaactgaggagcaagaaatgttccacaatgagaccgcttcacaatatctcccagttcacaactaaattaaaataatgcctggggagaagactgttacagatacatgcaaacaaattgcacatcctgttaagtagggcaaaacagacacttggacagagaaaccagaggaagacaaaattcacagagaaggtggagagaactttaacttctcatgaactgtggaattggtagtttgagtacattatagttagatctccattgagcaacaaggtcccgactgacatctggtctacaagatcaactttctggcaatacggtaaattttttgacagttactaaatgagactgaatataagcaaaataaaaatcatcttgtgtttcaagaaactgatatactccagatacatcaccatagcatatggagatttctttaactagaaaaaatagtccatccaaattcacattggttgaggaagccagaacactgacttatccatgtttaccacagctcatctgccttccctcccttaataaaagcagaggcccagagtgactgccaaacaaaatctacctaaaaaacatgccattcaatttttttagaaggccattgaaagataagcaaattaaattaaaagaaaggaatgaagagattttccttctgtctggttgttgagagagaacatttcttgcatatccagcatttggcaatctcttagcaaaatggcaaattcacaaaccctttaacccagcaaatgcattgctaagaatttgccctacagatatacttccaaatagtatgccagaatttgtgcaagaatgtcctttgtagtattgcccataaaaacaaacaaaaaaatggagaagaaaacccatataccatccattgggttaaacgcgttttgatttatcaatacaaaacaatatgtacagctattaagaataatgaggtaggtctgctcttcaagatatactatgctttgaaacaagctaagtgtgaagaatgtatataatatgccatttaagtaaagattttaaaggctccgtgtcgttttgtttagatgtcaacatgtgcataatttctttttctgaaaagctacagaagaaacttcacaatggtaatatttggaggacaagaggccagcatgtcagagaagagaaggaaaggaaagttttcattttcctcttatacctttccttcctgcctgaagttataggtatggctaatttgatttaaatcaataatattaatgaaacataaaagtaaaataattacctagtaataataaaactatgttgtttataactcttatttgatgtttggattctcagaatttacttcactgaactccgaaatgggtggtatttttgaaatttttagctgcaatgaaagaacacagtataactgatgcaccccacccccaaccaaaccaccctcataccttgtccaccactgccatctctatcttgcatttgaaaatatgcagagaagactctgtttccatgctacagacagtacttctagaattttgaccgcatagtaaacagtcattgtatcatccacaccctgaatgatgagggacagggacagacagaacctacctaccatgtgagcagctctagagctgtcatagctatagctgactctagctcacaaagcagacatgaggaaaagcaaagtttgcatgtgcacatacacacaacacaagcacactgagaatgaaggagaacaatgtgagactatactggtcaaagagtatttaggatctgccaaataatccagttttgtttgtattttcatttacatccctttcaccttaaccattttcacagttatcaactctctaatacactgacacatgctgtgttaggcacttcgcaagtattatctcatttacttctcatttaaaatgccattggttaatatcataatcttcccattgcatatgaagaaattgacacttaaagatataacacttaccctactcaaagtcacacatctacatctagcaagtgggaggtggcattcaaacataaacacagctggcctcaaaggcactatgactcactgtattcattcctgattcaagtctcatgccttgccctgagactgttctttaggacataaattgggcaaagagcaatcaactcacaaaaagagaagaccttccagaccaaaactaggaagtttggaaaaatgagaatcatgaaaatatgcgtattacacatacagccaggttgaagaagacagaaagcattagaatgtggaggaaccttatgagctagaatgcttagtacttaaagaaatgtctttgggatcagccatgctcctgggatgaatcctgacctggccatgatctaactgtcaccttaaccatgtcaccgagaggcttaacctgcacttacttctttcatctgtaaaatggatggcataatagtgcctgcttcacagaggcatggtgagggttgaataagatcatgcacattaagtacctaggacccagtaactctctgtaattatgctgtgtttgagatcataaagctcttaatcattataaaagtacctgagaaattctggaatgctataacaggaaaacttctgaaaatatagactacccctaggcaagccctttgttttacacagcaagaaagtgagacctaatcagttagaggcaagatgcttctcaagtcagtctattgagtttttattttgcactgaattacacatctacagagcttcctgtagcaggaaactctgctcagtttgcccattgctcattcctaacacctttttctcctgcctgttcccatcccatggccaactactcattctctcagaccatcttgaagccagtgaaaatctgctggggaatactcgggggaagcatatgattttccagtagcaacactgctgctgccacctctctccctttcttcctaccgtgaatttgatcatggttccaggaaatagggtggccatcttgcaaataggcagattaaaacaatcactaagacactgcctacctccaggaggtcttcttgttaccaaagaaaatacacccctatttttttaagcaactgttaaaggcagggtttctgttacatgcagctgaactcattcccagaaaatgatagaagtcctttttccatggacattgacacagtctaggatgggatggtggggatagtacagggtactcaccagctgttggagggaaatccccaggttgtgagagctcttttatttaaaaaaaaattaaaatgtaagtcaaactcaggcttagttttgaagttcatttctcaccttgttctcatttttatcttgatactccgaatgaatttcccaacgatatctaagagcttcccattcccaggctggtccagtgatttttagtgaaattaggttttattgaaagtgagttgatttttacttattaatgttctgctaattagagcactttgtcaatatctccatgcatgcattatattctcatgtccacagcatgtgtttagaaatatgtggataacaagatggagagttagactgttctggccctaatgacctcccgccctctcaaaacgccaacataacttctggtcacgtaatcatgggccaccttgtactgttcactgactatttgttataggttgattttaatccctgacaaattttttttttttttttttttttttttttttttttttttttttttgagatggagtcttgctctgtcacccaggctggagtgcagaggcacgatctcggctcactgcaagctccgcctcgcgggttcacgccattctcctgcctcagcctcccgagtagctggaacaacaggcacccaccaccatgcccggctaattttttatatttttagtagagacggggtttcaccgtggtctcgatctcctgaccttgtgatccgcccacctcggcctcccaaagtgctgggattacaggcgtgagccactgcgcctgacagacaaaatttttaaacctgtgaatactgacacagcgcttcatgttttgctagtcactctcagtgcctatcacagaggtaggcaaatcaaaaattctcatgaagtactagaaaatagatgcacctgtcccccaaatgcacagcataagaagatacccagggactaaaagctcccaactccaaaataaacctattcatgaacatgagtctctattcctttgctcagggaattcagtgctaaagtagatagcaaatatatttatattaggggaaatatctaaaaaatggcacttatagatacatttgctaaatagatatggaagtctatctgaagacctagcactatgccagccatacaacaatctcttcacaaatatgtattgaatgaatgaatgaatgaatgaatgaatgaataagcacacatacacagcagaaaaacagactatgaatgaatatatatcctttcccctaaagaaagatactctaaaacaaatgggcagtcaaaactacaatctctcatttaactgggaaaagtaaagaaccctctatttcatctttgatttcctccttacatgatgtacaatgcaaagggcttgctagtcatatttgtcaagagagcccacaggtactatctggctcatcacagcttaacttatcaattgccattgttgtttggtggatattgatctgggaagaccttgtatcttgcgaaagtcacttctacagcaactcatcactttttctttttagtcgacatgaaggctcaagtgttgtggtatactgggaatttccacgcgacagccccattccatcattaaatacccagtgagagcttgttaactagatgaatgtcccaattaaaccagcacgttcttgtcgctgcctaacagtgatggtgggttcagactaacagtttgaagggcaataactaaaatggtttgaggagcctcaagtgtagtttcaatggtttcacacttatccattcatttgttcattcaacaaatcactcaggggcccagcatggtggctcacacctgtaatcccagcactttgggaggccaaggtgggtggatcatatgaggccaggagtttgagaccagcctggtcaacgtggtgaaaccccgtctctactaaaaaaacaaaaattagccaagtgtgatggcacacacctgtaaccccagctactctggaggctgaggcaggagaattctttgaaccaggaggcagaggttgcagtgagctgagatcgcaccactgcactccagcctgggcaacagagcgagactctgcctcaaaaaaaacaaaacaaaacaaaacaaaaagcatttttttggcaggtcccaatgtctatttccaagctgaaaatgtttgctttcccaaaggggcataaaactgtgatttttcttaacagcacagtttaagtggtcttgactctgcatcttaagttcccagggttaagctggagatcttgagaacaagaaaagagtaaaaatagcaacagtgcaaaactccagacatcatgttggctccatacggctgtgtgggttgtgcactgtgcaagttcagtgtgttccattactaggaccatgatacaaatggcagggaagtggtagaaaccccacccaaggggtatcctaggcccatagtgctccctagtacaagggccacaaactactaaatgtccaaaatcacaagtaaaaactgttcattttggtagaggaaatacttgatttcatacacatctaaatttcacaattaaagtctcaaataaaaagctgccaagtaaaaatgctcaatgaaacataattttttcctctacctgatttttaagtaaaacaggcaaagaagaaacaaggcaatgattgaatagaaatgctattcttgttttaaaaaaaattagacggtcctaagaatctatgctaaatgattacattaatatgcataaaatacataaaacatatgtacaaggatgtttattgtaagactgtttctctattactaaaatacagaagtggttatataaattatggtacttccatacatgaaatgctattaagtcaataaaaagaatgagtaaacttgtaattgctatcctaaggacaaagctccaaaacatactctgaaagacaaaaaggtaatcatagaaaaatataatatgatcctgtttataatcaaatctagataatgtacataaagggatattaagtcatgaaacagtgcttggaaagatacacaccagtcatctgacagtaataacctatgaagatgaacgaggaagtagagaaatttcatattttatatattgtaatttgaactacttttttttaaataatgaaaagtgtttgtgtattaagtgtattataaaaaatatccaaatagttcaaaatgacagtaaattacaggttatgtatagtttaatcccaacctgttacaattcatgacaaaacaaatggtttaaagttaaaatttctaatgtaacctatgtcaattacacattctgacaacatatattcattgagcacatacattacataaaacactgctccaggggctgcaggtccagcaaagagacaggtaaggcccctgcttgtatagcgcttttgtccaagacagtaaaagagactcatatattttaaagagattttcagttaaccatcattttcatagtaaataattcaactaactatgacattttgggcactgtggctgagaggtttgctgtgactctagtaaagtttcttcttggaaagacattctgtgccataaagagcattccctgcctatcaaatattcatccttctcagccatcaatcaactgaagttccctcaaacagaatccataaaacagtcatactttccatccttagaggggtttacacctttccaagcactttcacacatctacggtgtcctaagagatgggtgactaagatgcaggagcaaaataatataaatttaccatataaaaactttcttctgtctagcacacttttctcctcgctctttactcgctcaagttttgctggtccttcagtttgcaacttagaagtcacctcttccaggtggcattccaggctggtatagggatcccccctacatgcttttattgctccctattgcctccattccctcacaaggtgtggaccatgctgctttgcaatgaccaacttggtggccacatccaagtcacagggctcaggatcacctggagtgccctgggtccaaactcaccctcaagaactgactcaccaggtaggtgagtatctgacagtcatatttacagaagctctccaggtgttctgaagcagttaatcccaagatatgatgatggaggtgtggaccatgtctgtctctacatcaccatcattgaagccacggcttctgacagtgcctgatatattgctggtgcccaataaggagctgctcctttatctactggttctttcaaaaaatatttactgagcacctcagcatgccagacttctggtgaatgacaaaatgaaccaatcatgcatcatgacgatgatacagctttcattaataagactttttgagttatctgatacctgaagcaactacaggaacccaatccacacctgtccctctgtcccctgctgggtagattagggaagacaaacaaagatttgggagcttttgtcacattctttaggtgcttccgggatgccaccagtgggttccaactgctcagctatgtttagaggtcacaggcaaacagagtgggcccattgcagactgcgaggcagggtgcctctgttcaatataaggatatagtccatgagacagaaggttattacaatgaggttgcctgggttttcctccccagttttattctgtacgccttttaggtaaattccttaatatctttcttcaaaatagttggatggcatttgtcttacctttaagggattcggctaaaatccacttgagtgctggcgcctaggcagggaacaggcagcaattcctacaggtccatctacctgatgacatgaagactagtttatggttaacaaactgtttttcactctctttagaagagaaatctctgtcaaaggtcacataaactttaccgtagtcagcaaagccccttcttataggatcctccctctatatttccaccctcatctagcactgtcttccttgcttgccatgccctagtcctgctgtatcaatagagtagagccaccagccacatgcggctcctgagcacctgaattgtggctagcccaaactgagatgtaccagaagtgtaaaatacaacccagatttcaaacacttagtacaagggaaacagaaggtgaaagaatcctattcataattttctacacagcttatatgttgaaatcatactattttagatatatcgagttttaacaacatattattaatttcttttactttttatggtgactaccggaaaaactaaaattacacaagtggcttgcatcatatttctaccgggcactgcaaccgtgtctgtattggcctcttgatttctgtactataacaagcatttcccccacttctgaggctgtgtgtttttttgtcttcacatgaatgactctctttccatgtctggcatgcctgactgctgttcacccttctaaatgcagcttgtatagcatctctggaataagacttgttgaatgtctatctgtttatgacctgcagcaaagttagccaaaatgctcaaaagggggacagaattgtctgcccagacttaaggctggggctccccgaagctgactttccagtgataataaaatgtccccacccaaatctcatcttgaattgtagctcccataattcccgtatgttatgagatggacccggtgagaggtaattgacccatgggggcagttctttcccatgctgttctcatgatagtgaataagtctaatgagatctgatggttttataaagcggagttcccctctacacaagccctcttgcctgccaccatgtaagacgttcctttgcttctcttttgccttccaccatgattatgaggcttcctcagccacgtggaactgtgagtccgttaaacctcttccctttatgatttaccaagtctcaggtttgtctttactaacagagtgagaacagactaatacaggtaataaagacttgaaggacatgaggtaggaaggaaagacaaaggtagaggaggagaaaccaagagtgttaccaagccttagcctgatgacaacaggcagttgcttgaagagagacaaacactcttgctttaagaggaataaatcaaagtggcttcggatacattaaccctagcttgtcatttgagaagacagccctttatatttagaatggctaggaaagactccttctagatgatttggtgctaatgttaagaacatcacgcaaggtgtccagttcgatggctgtcaacaccttctctaaaccttgtggcccataccatatcaacaacaaaataaagaaaccaaccaagtcaacaacaacaaaacatcgtcaacaacaacaaaacatcaccaacaacaataaaaattagaatatttaagagcctgtgcatgcttacttatgtgctgggcactgttttacacattccatatattaacttagtctttccaattaagtcttcaaggtagccaccgttattgttcccattctatagatggagactgaaacctaaaaaagtcaaggacttgcccagcatcactgagctggtaagtggacgatcaaagatttaaacataggcagtgtggatcccaagcctgtgctcttaacccttgcagcatataccactctacatcttctgtactattctctattgacagtatctatgaagctagcgcttcatggtatcaggatatgatactttcttaattattcattattttgtctatgtatgccttcttttcccagctacagcattcactgtttgaagggagagattcaaccatctccttctctggaccccacacccaacttatcctgttataggctcatggtcaacagatgactgcactgtgttactaaatgccagggaatacacagaagttgtgactgcttacatattcatggaagaaaaccccaactcctatcatccaagtttgaaactaggtcttctttcctattgggggaaatttctgcaggtgtgagtaattagaaaattaaacattaattaacaattcaagtgactgattgtgttagcaagttgcttgctaaccatacaggtaaatattgtgcccccatatgatgtttaaaaataaggtcccttgagcatattaagtagtagagatggttgactcaagattcaagagtttcctgacccctttaatatgtcacattttaagtctgtatataacaaaactattgggaaaggggattgccttactcactcaccttgccttatcatcttacaaaatatcttatattaaaagagagaaaaggatgacagctctgtatctatcacctattactcattatcctgggacaacaaacagccccagaatctttctttaatgaatataggctctcatagtacatgcttatgttcgtctcacgtttgctctctctcatttcaaaaccctatttctcttctgccctttatgtcttcaaaagagacgctgatattaattaccttgcttctctaacccctcatcgttttcagccccaaacaatcagcttcctgcttttaatcttctaccaaatctattttctcatgatctaccgaagtcaccctactaagtaagtgtttctggaaaggtattttcagtgcccatttcccttgaccaacctgtggcccttgactcactggaaaaaatcactccactcctgccctttgtaatattattctcagctggaattctagcctctgtcctgcaacctccagcttgattttacaatataaacactgctacttcctaacaagttcaccagatatacgaaataaccctgtatttcccactgaagtaaattagattgttgttcagtaaatattcactctctctttacttcttattcctgagaggagtatactgtcacattcctttgatatcagacttgatttggcttaagacatgtgaatggagcaggggcttaaaatgtcatgtgcattcctgtctttcactatgagaagcagatgtcttagttttttgctgggtcttggagggtgacagacacatggacttaactcacaccctatagtcaaaacaagccaagctggcccacagacacaagaatcagagtaaatgactcttatttcaatccaccaagtactggggacagtttggtacacatgagttttatgaaacagttaactgatgcacccatacaaatgttaaacctttgttcactggaacaaaggttggaagttttctccaacctttgttggatggaaattttctcttgttcctctacttctatggtattacctctcccatgccacttctctaacttcatgtcctgtattctctcccttattatgttttaaactcctttgaagagcaaagcatcaaaagttcttatccctagacagacacaaattaaaatttgcttattcattcattcattcattcattcagcaaatgtgtggattttagaaatgagtttctgtctcaaaggtatttaatacaacacctggctcagcttcatggactagagacacattatcactgaggtcacgttgttactgtttttgctactcctgctaactgttccaaaggggaaaaaaaaacaacatgcactttaaaagcatgatgttcttgttggcagaaattacaatagtttcttctcttggtgtttactcccccaacactttcctcagctctttatttctgatattcaattaccctttttctgcctggcttttctcactttcccagaagacttaccctgggaaactttactgttttcactggtgtacatttgcactagttggtttaattaccaagtgaatctacagcctctcagaacatttgacacgtctccctttcactggatccaagacatgaagcaatgaaaacgaatgggtgaatgttacagcaaactcaaccaaaatttattttgcctggattcaaggattaggctaacatgctagccagtttctgcccccctaaaatgtcaccctctggaatgacaaaaaccttaataagatttggaaccaaagttcctatgaccagaaactgctcaacatatatgcgtcacacacaggaaataaaggcacattttaaactagagctgctgggtcatctttaaaatagcagactgcctgtcaggagaaccaatggaataatcaatcactcaatttaaagtggggagctcctttaaaatgctagggtgatggggtatgggcacaaagtgaatagctgtgacagtacagttcctcagccaagatccacgaatgtaagcaccagtgggaagagcactagaccaagaggctcaaaaatatactgtgaccttcaactagtcacttaacaagtgctcattgtatcatttaaaaaataatacaatagaactccatgaatccaattaaatttaattccatattattcgagtgtttgtttaaaatgatatttctcaaagcaatggtcaaatgagtttggaaatcagtagattaaagaaggttaagcaggtttctgttccatgcaacttctcagtaactttaatagtctactgtgcaccgtgaagctctcagacctggtggatgtggtatggaacattccccagactaataggaatcaaagatcctgtttgtttaccatggacagccttgtagaactcctattctctataatacatggccatcaattatagaagacacagagatactaaagagaatagttttcttgggtcctggtcctgaggcctggcattctcatgaagctgagtttatgccctcccctgtgatttatgccatacctctgaatccttataatgatgtccctttttgatcttaagatggctttaactggtaactatcatttgtaagcaaaagtaccttattaaacaagaaaaacagctacgtgtgagttctgagtaaatattgctaatttatgtctatctgcaattgttacttgggctgaaacaaaagttccaggtaagtatgatagtcattttgccagaggagcctcaataatccctgagctgaaatactttcatacatcaagacgtaatcatctaatattaggaaagccattaagaaatacaattactactggaaatgaagaccttttacaggagaacagacatgatggttttccttaaaagctcttcccttttccacatccactttcttctactttaaaatgaaagtgacttcattttcaagtgaccttttataaagtccaaacatcaagtgtcgtaaatattctaagtattcagaatgaggtccagtactgtaatattaagttggatatgccagaaactcagaaaagcctatttctctttaaatagccaacttataaaattattcatattgtcttcctggattcccattatgttcctcgtgcaagaaagtgaaagtgttttatacaagccacactgtggggtaatatggccaaactaagagctttcagaaggattcttctcttattctctacttctgcttctgctgctgctgctttttttaaacaaatgagatcagaggcatactgtgattagcaatgcatgtttatgtagtgagacaccagattagaaatgattattatcatgtcacctaacagagtgataataatggtactctgagatggtacagctcagctgttgaggattcctactacaataattattttaaaattaattttgaagagaaaaaggaaagaaagaaagatgattgaaaccattaaagcaatcctgataaataagaaaaaaaaacccaaacactatgttttattcctaaggcaagcacaaaaaataaaataatcaccaaagtgagacacgactgactgaaaggtaaaaggaacattcattttccccatccaaggaaaacaataactgaaaacaatttaaggcaaaaagttaagcttctattctgagcaaaggagagttggactgtatttatgtgctaataatctatttataagaaataactgattaaataagatagataaaacttagtagacagaaatatatttttttcatagcaaacaaagcaatcaaaagagaagtgttgctgaaaatattgacaattaaaaatcattcaaggactctgaagtatatttcaggcagaaagagagcagcctaaggaggacttattacaggattgaaagcatcaccgtgaattcataatttttaatatataaactgagagatatggaaatatatatatagtatgtgtataagtacacatgcatataaatacacacgcatgtattgcctacctctactcacagagaggctgaagcaatgataccccactataaattagcatacctgatgtccagatcttggtttctaaataccattctccaaaaaataaaaataaaaaaggaaccagacctccttggagaagtggttggctccattaatgggacaggacaggaacaagatgagattagaatatcctgtggtgccacaaagttacaaatggctaaaaaaaaacaaagaaaaaccaaaattgtggggacaggtcaaaagaacacatgaaccagaatgaagggattcccctggctaaatagggacataaaataaaataaaaactgataatatcccagagactacagaattaaaaaaaatctacgattttacttcacacacacacacacacacacacacacacacacacacacacacatatatagaggggggggggaggatacaaagtaacatgtaggatgaacaagtctagagatctaatatacaatatgatgactacagtcaataaaattgaattagagttttttgttaaataagtagattttagctgctctcttcacaaaaaaagtaactctgagataacagacgttgatttgctttatgtagtaaccatcttattgtatatatgtatcccatatcatactttaaacctcaaatacacaaaataaaatttatttttaaaaaaatgggaggtgggggagaaaagcccttccttacagaatttcaagtcataaataaggagtaattaaattagaaagttaccatttaacaatcatcacaaaagtaactgtttcaggtaagaatcagtagtagtgaatgcaaaaaaagaatgggtaaaagtataagaaaaaacatactacattttctacaagtatattcctataagatacttattgattacaaaaggaaaaatagcaattttccaatggagaaacctggtagacaccacaccaaccaagtgatcaaagttaataccaagaatgggagaaaggagcatcagtgtctcctgatataatgcactaagaaggatataatactacctctgtaggattctggccaatatgcaaaatctgattctaaccatgaagaaatgccacatcagacaaactcaaattaagaaacattctgaaaagcaataggctgtgcttttcaaaaatgtcaaggtcatgaaagacaaagtctggggaattgtttgagattaaagaacactaaaagacaggacaactaaacacaatgtgtgatcctggaatggatcctggacccaaataaaagacaatggcagcatttccataaggtctgcagaccagaaatagctttatatcaaggttaatttcctggttcagtaattacactatgtttttctaagaaaatgtcttgtttaaatacactaaaggagcaaagaggcatcatgtaacttgctttcaaatatttcactaaaaattatatatacatttatacacatataacatatatggtacacacactcatatataggtgagagagagaaaatataatggaagtaagtaaagtattaatatctggggatctgagggaggagggtagagggattctttacattatgcttgcaactttttttttttgcaactctaaaattatttcagaattaaaagttaaaaaagaaaagagagggagcttgacttaatattgcagctgtaccataaagtgttcttgaacaagtgacttgtcttcattgaggctcggctccccctttgcaaaatagagacaacatgacttcacagggtgatcggggtggacaaacaagatggtgctgcaaagctccaacccaagagctggcccctgaagcacacagtaagtatagcttgtttttggtaaatccaaaatacaacaacccattagagggcgttactgtctgaaagcagtttgggggcacccgaggtgatgtgcaggccgcagagacaatgctgttctaggtcaggagcagaaacacaggctcctcacacatgcttttaaatggggctttttactttctaaaatgtgtttctacacaattgaaaacaacattactttttccagagtgggaggatgaaagcaatcgtgggtgggggcttcttgagaagaggggttattttttttacttttaaaaaggtctcagaacagttaaaaatagtttttccttaagcagcctccctctgctccctgctcccaccagctgctccttctctcagcctgcccttctctttgtcccttcaccattttcccctctctcctttttgcttccagtcactcatatgccacccactcctgagaaccctaccttctcttatttttttgtttggctttgttttgaaaaaaatattaatcccaaatgaacaaagaagatacgtgggaaggaaataaatggtgagctcttccttacttcaccacctgtcaagttttaagtttttcctccaactcacactaacctcctgcgcaaccataaacttcagtgcttgccaaagcccagaaaattctaagtaaaaagcagaaaatgaatgcagggaagggggtgcattcttattgttcatcagatctgaaaaaaataatgcccagaatgtcaaatgatattacactattaaaaaggtacagtaaagatgtgctaatgatagattttttttctactccaatatgttgtaaatattataaactatcatttactgtcattactttaatgatgtagaatgttgaaaactcaatctgggttaatttacaaataagtaattttgaaaggagaaaaaaatatcttttctatttccgtgtaatgtcccattacttgacagtcaaaatgtggatacagccaaaagaaaaataatgaaggtcaaggaggatcaaaatttacctgatagagtacctatctgttagaaatcactttcctgaaataccttctctgattttagaaaactgaaaaaacagaaaatacactacctttgacaatgcttgcgattcagggttgtgcttgtgtatgggggtgggagaacctctgctaggataggagaaagctgccagacacaagttcagatttaatagaaatagctttcaaatcaggagtctagccatcaaccagttttagatggacagtcccagtttcaagtaaataaaatatttgcatattagagcctcgtagccctacttagctgcaagtaaattttctgagatttactctgccttgcttcatttcatccaggcactgattattttttcattctttattcaccaaacatttactaagcacttctttatacaataaattctgagcaaggtactaagacatgaagaataaaacaggtctggctggagactgcacgaaattgccagtctgtctgagcctgtttgaattcataaagtccccgagaaagaagaaataggtgaggattagcaaccctgtaagagcatttacaaagaagggagtgcaaaagaagaaaatagcaccacagctcaggagggcaatggtattacttaccaagggtgcagtttgtttgatgacaaatctcaaaactgaatgcagtgattgtgttagatgcaaacacttggatgaaatagatgactgttcttgtgaccttgccaggaaagaggaggagtgaaagagagggctagagttctagtctcctttctgagttttgcattcattggcaaccatgtacctctagacatgggagtgcaggcatctatctctatcaaggtacatgacatgtaatgaaaggaagggatagagaccaggcaagagaaagcaaagagagagaaatagacagggagatggaatgaggtagacaaatcttagaggaatgcagtgcttctccaagtttggtgcaggaatgttcccattagaatcacctgagggggttatttaaaatgcagattcctgggctctgacccaggtctggtgagcctgaatgtctgtggctgggactctaagatttgcattttatatacgttttggggggtggttctgcatattaaaatttaagatcagaccactccctaaatccaagggtgctattttactgtttacttgaccaacagtataaatgggtgtcttcaaagccttgtcaccacaaccccatgcagcctgatccacttacttctctgtatcacactccctcctctcccaccaaggaaaacagagtgatcctgaagttccttaaaactcaactcaatctactgctcctcattagtaataaggttctgttcaaggaactattggctaatcattcatatcctgattgagataccagcatatcctacccaattattaactatggatggactccaaccaggaaatccaaaactatatgctgcttactgaatgacaataataaatgtaggctcttatttaattatgctgcggtttattaactatccgataataaggaaaacccctagtttattatagatctgtggggtgtgtgaatatgtgtgtgtgttttgagagatatatacaggaccctaatcagagagagtgccaggaataacagccatgcatgccaggcatcttttcctgtttctttttcagttacttgaatccacctgtgataaacttgccaaaagaaagaggaagtacaataaccacaaacgttaagtgatttttttttttgttctacaaactcgatgagttcactgcattgtctacttatctgtttttgtaatttcaacttttatttttgatttcggggtgcacatgtgggtttgttccataggtatattgcatgatgctcatgtttggggtatgattaataccatcacccaggtagtgagcatagtacccaatagctctttttcaatccttgaccccctccttccctcccactagtccccagtgtttatggctgccattttcatgtccatgtgtaccatgtttgtctgtttaactctcacttataagagagaacatgtagtatttggttttctgttcctgtgttaatttgcttaggataatgacctgcagctgcattcatggtgctgcaacagacatgatttcattctttttttatggccatgtagtattccactgtgtatgtgtaccgtatttcctttatctaatccaccattgatgggcacctaagttgatttcatgtctttgctattgtaaatagtgctacaataaacatacaggtagatgtatcagtttggtggaacagtttcttttcttttgaatatatatccagtaatggaattactgggttgaacagtagctctgttttaagttcactgaaaaacctcccaactgctttccacagaggctaaactaatttacattcccaccaacagtgtataagcatccccctttctccacggtttcaccagcatctgtgtctttttggctttttattaataactattctgaatggtgtgaaatggtctctcaccgtggtttggatttgtatttctctgatgattagtgaggttgagcattttttcatgtttgtttgctgcttgtatgtgttgttttgagaagtgtctgttcatgtattttgtccactttgtaatagggctgttttttgcttgttgaattgttgaagttccatatagattctgggtattagacctttgtcagatgcatagtttgcaaatattttctcccatcctgtaggttgtctgtttctctgttggtagtttcttttgctgtgctcaagctcttcgattaggccctacttgttaaattgtgtttatgttacattgcttttgaagactttgtcataaattatttcccaaggctgatgtccagaaagacatttcctaacttttcttctaggatttttatagtttaaggtcttacatttaaatatttagtcaattttgaggtaatttttgtatatggtgaaaggtaggggtccagtttctttcttgtgcatatagttagccagctatcccagcaataacaatagggtgtcctttttccattgcttaatttgttgactttgtcaagatcaggcagttggaggtgtgaggttttatttctgggttttttattctgttccattggtctttgtctgttttcacgccagtaccatgctgttttggttaatgtagccttatagtacagtttgaagtcagataacatgatacctctggctgtcttctttttgcttaggattgctttggctactcgggctcctttttggttccatgtgaatagtcttttctaattccgtgaaaaatgacattggtagtttgataggaataccactgaaaacctgtatattgctttgggcaacattgccatattaatgatactgattcttccaatccatgagcatactgtgcggtctttgatattgggtcctgactaggccaagaagacagagatagactggtccctcaaaccttttctctaatgtctggagagtacatattttatgcttttcagtatgtatggcctctattgcaacaactcaactctgccattacagcattaaagcagtcatatataatatataaacaaatgggtgtggctgtgttccagtgaaactttatttacaaaaacaaatagtgggccaaatttagcctgcaggctcttgtttgccaaccccagctcaaatcatcctcagacaaaatttagggagctgctaataataacaaggccatgctctgctatagtgctattaagctattgcctcagcatcaaattcaccctttggtattctcttctgtgataactggcacgtttatgtattgacaagaaagatgaccaccacatattaagtggggaaaaaatcacactttttatagcaatatcactttttttaacaaaatatgatcctctatacgtacatacataatgttgtataaggattcataagtctcagaaaggataatactgaaaggttcagaggggtaacctctggaaaatggaatcaggagtaggaagaaaagattactctgattttttgctttacattcttttgtagtctttgaatttatttagagtaagcaaatattaccattgtaagttacaacaataaaaaggaataaatcaaggtggagtcttaacagtgctgaaacacttttgttaatccatttccccagttccaacctaagctttacagaggtgctattgtcaagcaatcactcattcgttcactctacacatataataggcatccactttgggccagaccctacgctatgtgtgaggaattcatgaagtttaggatctaggtggaaaaacataattatataagctaaaattgtaattaaaacaaataatgtacatgaaggagagatggcatcacatttctttattaatatatttattgggtattatatcccattattgctggaggataaaatctatgccagggaatataaaaagatgagacagagaaaatgatacgagtaaacacgctgaggactttagactcagcatataggtgtttggttcctaccatatcatctacataatttccttaaaactgctgtgaatataaaatcacaacagctgttttaaagagactgaaattgaaattcaatgaaacaaggcatttgtaagtcttccttggctttctacattgatagtgacttttttttttctttttcacactcttagaatcagggatgggttagatgttatgatcttgctgttacttcaggcatcttctgttatcattctccctagaggccaaaggcagagaccatgtcttcttttctatatgttggaggcactgtcttttgagttatatgccaaacaccttctctggaattggtttgccacttctagggactggctccctgtcgccatgtttgtgtaatatgacaacagacttaggcaagtgatcctagctgggccagaattccttcctcacacactcaaaacaggaacaaaagagagtggtctagattttacaatgtattaactcaagggatgaagaattccttataaactagacagagacaaagatcttcagagataaaagacgggtacagacaagcagagagaagattaccaagagcagatcattctgtccaggtgcctctgattttttgaggtctaggttcttccaaaggccctactacatcctttgcttgggtttttttccatatgacatcattctacacttacattatatcttcccttttcactgaagcatctatatataaattaaagcatcactaactgatgcatgtgtatatattccaagatgtttaatattgctttcctgacagtagggatttttatctgcagtgcttcagagccaaagcaaattctaatgttatttttttcctccggaatgttctcccagaaagtttctaccagtttgctacaagttgaatgccacttgttgtcatttcagaacctcatatacagtattctttaatagccagaaacacaattataggggaggtcagaagatacatctccaaagtcttctaagtgttctctcctgtgccctacaggccaaaatggtttatatatcaaatgaccttggacaagttgtttatcttttgagtttcagttgtctcatttgtatacaggcaattctgttggctctacagtgctgctggcaggataagtgacaaactctttggaaagtccctcacacacagtcagtgtcatttaaggtggctcctcctgtgagattttgcaattagggatatgatcagtcttagtccattttttgtttttgtgaagaaatacctgaggtggtataatttataaagaaaagaggtttatttggctcatgattctgatggctggaaagttcaagattgggtatctgcatctggtgagggcctcaggcttcttcatcatctcatggcagaaggcaaatggaagccattgtatgcacaaatcacatggtgagagaggaagcaagagagagagtaaaagggtggggggatgccaggctctttttaacaaccatctcttctggaaactaatagagtgagaacttgcttaacccaaaggacaggcatcgatctattcatgaaggatctgccctcctgacccaaacacctcccccaggccccacctcccatcattggggatcaagtttcaacatgtggttttgagaagacaaacatccaaaccatagcattccactcctggattcccaaaacccatgtacttctcacatgtgaaatacaattgtttcatctcaatagtcccaaaagtcttaactcatttcaaaatcaactcaaaagtttaaagtccgaagtctcatctgtgacccaaggtaatttctttccagctatgagcctataggatcaaaaataagatgtttgttttcaacatacaatggtttcatgggcactgggtaaacagtcccattccaaaagggagaaattggccaaaagaaagagaaaacaggccctgtgcaagtctgaaacttagccgggcagacatgatatcttaaagctacaaaataatcttctttgcctccatgccctacatcctaggtactgcaaggggtgggctcctaatgcctcaggcagctctgcccctataacttcagtgggtgcagctcaagtagctgctttccttggttggagttgaatgcctgtggcttttccaggttgaggttacacactgctgctgctgctggtggctgtataatttgggagtccctttggtagctccacttccatagctccactaggaaccctgatagagattctgtggtggctgcacctctgtggaaggtctctgtctatgctttcagagatctatgagtcatctctaaaatcctctgaaatctatgagtcatcaagcctccaccacccttgcattctgggtgcctgcagacgtaacgtcatgcaaaaactgacaaggctcatggcttgcaccctccagagaaggagcctgagctatatctggggccatttgagccatggctggagccagagcagctgggatgcagggagcaacatccagaggcagcccagggcagcaatactttaggcctgtcacctgaaccattctgtccatctacacctctgggcctatgataggaggggtggttgtgaagatctttgaaatgccttaagggcctttttcccattggcttgactactagcacctggctccattttaatcatgctaatctctttagcaatttcactggactgggcaatagcattggattcctcttctgaaaatgtttcctttcccaccaaatggccaggctgcaaattttccaaacttttacactctgcttcgcttttaattataaattacacctttagatctttcctttgctgctttaattcagcataacctgttaaaagtagccatgccactaactgaggtctttgcagcctagcattttcatccaccagataccccaccctcatcacttttaagttcgaccttccacaaagccctaggacatggacacgatgcagccaagttatttgctactatgtaacaagggtgacagttcccagtaagtttttcattttcatctgagaccttgtcagcatggattttacagtctatatttctatcagcattttggtcacaaccacttagccattctctaagaagttcaacactttcccttgtctttttttcttcttctgagacctccaaactcttccgactgctgcccattacccccaaccactgggtactaattttctgtcttagttcattttgtatcgctacaaaggtgtcactgaggctgtgtaatttataaataaaaggatttatgtggatcacaattctaatggctaaaaaattcaagattgaatatctgcatctgctgagggcccctggctgcttacactcatggtggaagatgaaagggagcttatgagcttatgtatggagagatcacatgacagagaggaagcaagatgtcaacaaggtgctagtctcttttcaacaattagttcccttgggaattaacagatggagaactcatcccccaaaggcaggcattaatctattcatgacggatctgccttcatgatccgaacacctcccaccaggccccacctccaatactggggatcaaatttcaacatgtgccttgacagggacaaacaaatcaagcatgatccttagaaacaccacatggtagagtggaaagagtatttaaatgttagtcaggagacctctattctagttccctgttctcactaactagttgcacggccatgctgcttacttctttccaagaaacctgtaccttcatgcataaagtgctattccctatgcccgagtatcatcctacatcatcatgtcatggaaaccccaactctaattcatgattcatcttgagtcctgacttcttcagcaaggtctcctcagtttccacaatcagaggagaacattcctttttttgcataaataaacactgtacttggatctctcttatgggagttattaggctcaaccctactttatagatctagcactactcaattccttcttatttactttctaaagacaattcatcttccaaagttatagaaaaacaaagtttagcatttgctgcatatgtccaacaaacataattaattggataagaaacttggcaggtaattagtactaggcataccatttgcttttttatgcccagaacctagaaaagtgcctgacacatggtaggtactcaataaatatttattaaatgaaaaaatacccagacttggttaggaaagactatgtaaggcaacaatttcaagggtatatgcttttaggccaattcagtttgccaaaatctagcccttgatgttaaaaggaagctggggcttacagaaatggaggaccccaacgctaatggcaagggcagaaatcatcatttatgagacatagtctcttgtttggtggggaatgtttgacagctagctgcataattccacacggttccacaggagatgattttggatgtggagggaacactccaagcacacttcttatgaagacctataatcagaggtcttaacaaacacaagtgattaatatttgttgacttcatgacacatttattttctttagagcacttaccacagcttactctaactttattaaactttttagtatatttttgggttttttttgttgttggtggtatcctcaataaactatgagttctgtgggggaaggaaccatgattccctgtccattgttgtacatccactacacagcacagagtagatgaagctcaacaaatgttggatgaataaatatgcatatagtatgatggatggatggttgagtggataaatggacggaaagaggccagctagtcacccatacaagcttctgggttatgaacctaaataataacacaagttcaacagcaacaaaaataatcccattccattataggctggatgaaaggcttacccactgtcttacaccattagcgctgctctaacaaaatacctgacaatgggtgatttataaagaacagaaaattatttctcacagatctgggaaatccaagatcaaggtcctagcatcttgtttctgatgagggtagtcttctgcttccaaaatggtaacttgttggcagctccttcggaggaaacaagtgatcacctcccaatggcaacatctcgtaatattgttgaattggggattaagttttaacatgcaatttggaggagacacaaatattcaaaccatagaacccacttagagatgacagaataacgaatatatatgaattaaaatgaatggaacaacaacaataacaacagccatcacttatgtagtgcttactgtgttccaggcattgatctaaatgctttacatatatgaattcttaattcctaatacaaaaaagtgagtgttccttcttgatctggagccaagactgcatctatcaaaatgggaatctgatcatctctcccatctgccccccaccccacgtacatcaatggtctacatgacaatgctacaattaattccagaagtaaacttaacctctcactaagtgcccaaccaaagagactgcatggtttcccagtatgaaaatgtgaaggatcaattcacaatttgtttcctgcaaaactgtcattcctctcttcatacccatcactggagaaattacttttcagaccattctacagcttgggaatactaaataagccctaatgagttcaaaagtcggtaatgacagtactaattcagtggcctgtttggtagaaagtcagtctcccttcttcaaaagcaaaataggattatcaagtgagctgggagcattttctttacgtgattgatgggtagaaaaagtaatcacctttgaagtgccacaacatataatatatctcctgtgttctctttcttcttctgacacccacaagtaattgaagggaagggagcctcttagaatgaccaacgaagtgaaggtgacaaccctttctctgctatctaccactagagtgacatgctggggtcttgaatagttgagaactgacatgagtgtctttgatgggctgctttgatgcttggttcagagtgtacctgccaccagtcaggccacacagactttgggtgaaacatacatctaaggagacaagtgttactacttcttagaagcaaagggcctgtgcacctgtgaaagaagatctgttgtctgagctctggggtcggggtaaggtccgcaaggtggaagtgaaggaagtcaaggagcaaagcaagttgaagcaggtaagaaacactgaatatgatttcaaaacagtttctcatcatactcatccataatgaccgattaaccacaatgttcagactgacaactaggagatcattagcctcttgacctcagctcactgatgcagaagcagacagtcgtctccttggaaaaggcactgctctacagtagcttactttgtaaggggatttttgcaactacaagtaattcaactgaaacagagttgacactcaaaaaccttaagaagcagggattatcaggcaggtgaacagttttattcttaagagctcactctttctgaactctcctaaagcccatccaggcaaggacatatgagtttgttatctgaaggaagaaaaatgctttgaagaagatttataaagaggaagggtctttggtttattgacaagaaagtaaaagactttctagagttgtaagcgaaatgtcgctgttcaggttctagaacttgctggctagagaacagatggctgccacttgttggcacctggagtgacaaggagttgaggaaggaagagagtgtcatccatgtgatctggcacagaacattcttctctggagccactcttataaagaagagactggcatgtttggtgggtttactgtatgatatggtttgaatctgtgtccctgcccaaatttcacgtgggattgtaatccttaatgttggaagtggggcacggtgagaggtgatttgatcatgggggcggtttctcacgaatggtttcgcaccatccccttggtgctgttctcatgatagtaagttaccatgagatctggctgtttaaaagtgtgcggcacctcccaccttgcctttcttctcctgctcccaccacatgagatgcctcactccccctttccctttgccatgactggaagcttgctgagacctccctagaagccgaagctgctatgcttcctgtatggcatacagaactgtgagccaattaaacctcttttctttataaattacccagtctcagatatttctttacagcaatgtgagaacagacaaatacaccatagtacctccaacctgctaattaagtcaggagtctccccctggttggctgctacccacaggctccactactggtgagtcgtagaagacaaataaaggcattttaaggaatagtacgacaataatctctagatacatctgcaatcaagtaacagtaacccctctcagaagctatgccagtatgttgcagatactgaacacacatctgttaaatgaatgaaaatgaatgaaagaataaatgattatacagtgtacttgtttcataattgtaactggtttatattgatttggttatatctgcttggtaccatgtgagttttgattacataaagatctacagtctttgtatgacatggcctcagaacacaagtcaacttcttcatctggttctcaacctaagaaataatgatctgttgcaaggacaggctggccatggtagaagtacgaagcaacattttatctacatagtactttagaggtaatgtaagagattttcaaaatcatgcttttacaatgtctacattaaggtctggcttttaactaaaaagtatgtgaaacatgatagcatttctagattgattccattcagaggtgcttttatttcacacatatatctcagaccaagggtaagtatggtaagaacaagtcactaggaggccagcaagagaggattaatgaatggaagaaatggaaaggagagtgaaacactggtaaactcatcccagctccagcaagaggggccaagatatctgagctagctggaacagcacaataataaaaataataacaataatgacattcactgtgagcaaaagaactctgtaagcaaatcaaaaatatcagtgctaagggtcttaatagctgattataatgaacttcctcatgtaatctcagggagcagaaaagagaaaatagattgtgcatctgttcaaactaaacatatttcaagctggaaccagcttggtgccaaagacatctctgtcacagagaagaaaaaattccaaatggaagaaaaattccacttcatgctcaaacaccatgaacttcgacaggaaaattaggtaaccactgcctcacttacaaggcaacgcatcagtttcctatggctgcagtaacagattaacacaaacttagtggcttcaaaccacaccactttcttatcttgctcttctggaagttgggggtctgacacaggtctccaggtgtgggcagagctgacaccttgagcctgacgcaggtctaaaatcaagttgtgcgcagaggtgacttcctttccagaggcttcttttccagtttctagagtccaactacattccttggctcgtggcctcttccttcatctttaaagtcagcaataatgggacgaaaccatctcacatcacatcactctgacctgcttttctgcctcccacctccacttctaagaatccttgagattacactgagcccacctggacagtctaggataatcttcctattttaacatcagctattgagcaacctcaattccatctgcaaccttaattccccactgcatataaggtaacacagccacagtttctggggattacgacatggaggtctttggtaggaggggggtattctatccagggatccccaaccgccgtgccacacagcaggaggtgagtggcgggtgagcaagcattactgcctgaggttagcttcctatcagatcagcagcagcattcatttctcacaggagcaagaaccctactatgaactgcacatgcgaaggatttagaatgcgggctccttatgagaatttaatgcctaatgatatagggtggaacagtttcatcccgaaaccactccctccaccaccgggtctgtgggaaaattgtcttccatgaaacaaggtccctggtgtcctaaaggttggggactgctgttctatattgcctactacaggcatcaatgtttcaaatttacttaaaaatctgttcaggtccagctaccacaaatacaagtgagtgcctctcatttgtgaaaaactgtgtatgtgtaaggtgtgagaatcctatcttattttgctaggcagagctgactatatgtgctctcagagcccccagaattccagaaaaccaaaatttaaaaaaaaatattgaagattaaaaaacagagagacagtgttacccagtgaagtttctaagagaatctacccactaacagacttttccccatctcaagttctcaatcattcattttgttacatttttttatatttgacaaatgatatctaatgcatttcattgctgttagcagtttagacacttatgagaaattaaaaccccattaagtgtgaaggcatctaaacaataccagatctgccttccactgaatatattttgggatgacaggtctgcttcatctgactcctcaacaagaacagcttatgaaactcacagttttagtgacagggcccaaccggcacctatttttgtatcacctggaaaaaaaaaatgcccacataggcaatacatctgatacagaaatgaaattaaatagaacaatactgaggcatcaaccactcagatccatttcactgtttcctattctgagacaacctaattgaaggtggcattccaaggttaaatcctagctctgacagcatctcctgtcagacacctgtcaaaatgtaataagacacctgtgaaagggaagtgatgccaaagccacatcattttcccctacaccttgattcctaacttgcaggattcatgtcacccagcaaacagagtggtagctgggtgctgctggcactgtgccaccatttgcaggtgagggagggaagggaagggaacacaaggggtgggggagagagagagagagaagaagagagagagagaaggagagagggagagaaaaaaaaagacaacactgcaaaaggaagcacccaagcgttttaagtttagcaaatgattatgagcataaaaggacaactctgaacggacttgaattttaggattcatccctagagtcttgatcatgatcagaagcagggaattattttttaatatctgttttacataattaaggggtggtagctttcatgcaaatgaacgctttgaatgctcacaacaccaaatgggcttcattagcttagctgggcaattatgaagcaggaagtaaaaagctgagataaagacttatctcaaaaaggtctgaagcagggcgtgttgatagccaagaggcacaacgatgcattttgtacatttattacctcggaggcaaaacttctaggattctagatagctttgaaagcagtgcatacattccatttaacacccaaatgaaacaggtggaatgtttaaagatctgtagaaagtcttgaaatcgttcccacacattggaaggttttaccaaaccttctctatttattctaagtgctttttctattgtttttcaattgcttctctcatttccctcccgtgtacatttcagagaaaattggagagcttaaaatgcgactaaatataacccctgcactaagcaaacagtgaataaatccttaagaaattatttttgaagcatattctttctgatttgatttaaaaactgcaatatcacatgtgagtcttgctcaggagaaaggctatttgttcacaagacgaccaagcatgtagagggaaagctgagggtgaagggactgaatccggttctcagctatttcaatacagatgtttttctagataatcggcctcattgtaagttaaagaatcaaacataaatcagatctctcacaggctgagaaaaggcaaaacaacagcctgttcgttctgtaaaaggaccattctagttggcctatctggtacaaccaccttgtttaaaagacagtaaactgaatccagcaaaagtttattgacttggtccagaatattactgagccaccaccacagccaggcttacatcccagagctcctgtttcccatcctgggctgtgtatattcttccacgtcacctccccaggtggctggctttgagaagaagggaatcataaaaagaccagaaataacatatacaccttgaaggagttgacacaggattttttcttgatcactttgcaagccagggacctctggccagtgacaccctgcccaggcctcactcggccatgctacttgctataggagatggcccgcccacttagcccgctcaggccgagtctgacttgcacactagttcccaagttcttgtcctgcgccccagcagaatgaggatacactgacaatcaaagaaaaagtcagggagttttattgagtgatgaaaacagctttcagcagagtggggatgcaggggtggtccccctatctgaaggcaggaaagtccacccaatttgtctgagtctggggcttttataggctcagaataggggaggggcaggcagtaggtagtactcgaaaaagcaacattagattggttcaacggcattattcagaaagaatcaaccaagaaaggtcaggcaaacagaaacgcaagttctcactctgggtcgcaggtttcatccaggaccagcagtctggtctttcagccttcaggctgtttctgttggttcggaggtgggatttcactggggactcacctctatctgactaggtatttggctgcctcctactgtcctcagagtcatctgttcatcagtttgttttccctgtaccttcctttctcacaaacattccattggcagatttctgttttgttctgtgtgtttcctttccttctccccagttcaagctgaggcagacgcatggacaaagaaaaacaaactgctggctaaatacagagcagagagtgtcatggaatgtttacagaggaaatggttttaggaaccagagagtaggaaaagctcaggctggggaaggggcaggaggatgcaagagggaatgactttagggtataaaaggaatggaaacggccaggcacagtggcttgtgcctataatcctagcaccttgggagactggggcaggaggattccttcaggctaggagttcaaggccaacctggccaacacagtgagaccctatctctgttattattaaaaaaaaaaaaaaaaaggaatagaagaactcgagtccttaaagaattagggtctccatgtagagtaccaggtggccaggtgaaaacatacccaaatatcaagtaaggacacccattggccagcacccccaaattttagtccagttattacacccaacttggactggcaatttatcccctacaggtaactgaacatcttatggtctgggaaatctaccagcccctccaaacagaagatgaggagcttaaatggaatagtaggaagggggagctttaccccttgaccatgatgggtctaaataaaatgagctgggaatttccctaggagcccagggtagtgctacaaagaggacacactgcccctgaggtatactgtgttcatttgggagctatctagtcccagttttccaagacagactccagggaaaacaggtctaccttgaacaacatgagtttgaactgtgtgagcccacttacacatggattttctttcaccttcacaacctctgagacagcaacaccaacccctcctcttcctcctcctttacagcctacttaatgtgaagacgataaggatgaaaagtctttacaatgatccatttccacttaatagtaattataattcctctttctgattttctttttttaatcttttcttaattctaccaattaattttttcttttttttaaaattttattattattatactttaagttttagggtacatgtgcacaatgtgcaggtttgttacatatgtatacatgtgccatgttggtgtgctgcacccattaactcatcatttagcattaggtatatctcctaatgctatccctccccccgccccccaccccacaacaggccccggtgtgtgatgttccccttcctgtgtccatgtgttctcattgttcaattcccacctatgagtgagaacatgcagtgtttggtttttttgtccttgccatagtttgctgagaatgatggtttccagtttcatccatgtccctgcaaaggacatgaactgattattttttatggctgcatagtattccatggtgtatatgtgccacgttttcttaatccagtctatccttgttggacatttgggttggttccaagtctttgctattgtgaatagtgccgcaataaacatacgtgtgcatgtgtctttatagcagcatgatttataatcctttgggtatatacccagtaatgggatggctgggtcaaatggtatttctagttctagatccctgaggaatcgccacactgacttccacaatggttgaactagtttacagtcccaccaacagtgtaaaagtgttcctatttctccacatcctctccagcacctgttgtttcctgactttttaatgattgccattctaactggtgtgacatggtatctcattgtggttttgatttgcatttctctgatggccagtgatgatgagcattttttcatgtgttttttggctgcataaatgtcttcttttgagaaatgtctgttcatatcctttgcccactttttgatggggttgtttgtttttttcttgtaaatttgtttgagttcattgcagattctggatattagccctttgtcagatgaatagattgcaaaaattttctcccattttgtaggttgcctgttcactctgatggtagtttcttttgctgtgcagaagctctttagttcttactaatattttcttttctctagcaaactttattgtaagaaaacagtatataatacatacaacatacaaaatgtgttaactgattgtgttatcagtaaggcttctggtaaacagtagtcaaattttgggagagtcaaaagttatatgtagacttttgactgcctgggagtcagcacccctaacccctgtgatgttcaagggtcagttgtattctgttagctcaccaatgtttacctgatcttacacttgtcctaacttctaatatggaaaggataggccaatgatatagtagagtgcttagatttgactgttgaccactggctctcaaagcctctccagtataactgcctctgcctcttcaccccatctcccactgtgcctaaaacccaacactccagccaaagagtaatcatgcgctgttgcctgaacataccccatacttgtctcctactagtctttgctcatgccagtcttcctacctcaaaggctctccctttgctctgtttacctcttgataacttatccatctaccaaccaagaatttttaacatctgaaatgattcacaaatggaatgggatgggctcaaacgataaaaataataatggctaatttggtgtcaggaactgtgctaagcatgtggaatacattattctcataattacctaagagggagctataataatcctcatttcatagatgaggcccaggagggtcaaagaacatttccaaggtcactcagctgggattctgacccaatcagtaggactttagagctgggctgttaacctgtaccctctatgcctctaatggtccttctaacactgtgaccctggcattttataatgtaactgtttctccccagatccctttctgaatgcccccaatgaggtgtaagccctccttactctggaagttatctcactggcctcacccgacatatttacatacttttttcatctcaccaaatacagatggtccctaacttcaatggttcatctcaaatttttttgactttttaatggtttactgggagtattaaatgcattttaactcatgataagtttattgggacacagctccatcatatgtcatagagcatgtatactgggtaagcttcatgaaagcggaaactctggctgatttacccacaatcagactgtctgagctgcagcagatattaaagtatttttcgtgaatgaacatctttcatgcttcacacagtagaagtgctccgtaaatggttgtggtgtgtgttgaattctgttcaaacaattatcaggaacaacagtcacagtttttcacagtagcacactggaaccccctttcttcactgtgagtgctgccctgaccctgacaatcaggtcaactggacagtctgttctcaccagtctcaatataggactgaaaagctatcttctccaaccaagttgtttggatcacctgaggtcaggagttcgagaccagcctgacccccgtcaatatggtaaaaccccgtctctactaaaaataaaaaattagccaggcatggtggtggacgcctgtagtcccagctactcgggaggctgagacaagagaatcgcttgaacccgggaggtggaggttgcactgagctgagattgtgccactgtactccatcctgggcaacagagcaagactctgcctcaaaaaaaaaaattgtgattttttgaaaccattaaattcttcactggtgtcatggtacaaacaaaatcacttgctttgactcttggccaagtccagaattgtgtcattttaaaaaactggtttttaaaaatcctaagttgtttccacctgcaggcataggcagaggagccttcgtccctcactacgctgaccccgagtggttccagtcccatcattccagaaacccctctctggtcttgtatcaaaaacaccacaaatcactgggattgctctgtcatggggtagaaggggctcgaggacaaagtttagcttaaaaccagagtgaatttatttctattacatatggttaaatcatgacttcttttctaatccctaaagctaaacagtagagtcatgctggagacacaccatcatctatgtcaatcagacaaaattaaaacagagaccaacatctccttgtttcatttaattttgttctcttgttactgcatgtgtgacaccaagaaccacttgacctttggacaaaaaagtagttatatataagccatgtatggctaaggtcctgttttcacaggccaggaacatgtaacagctctaattcttgttgactctatttctgaaatagagtctgaatatgtacacttctttctgtctcaaagtctaccccctaggccagaccaccattgcttcttacctggggaacagggcagtatctgctcttaactgacctgccggcccccgctccctattctaatcctttctgtatacagccgccagaagggcttgacacaaatgtaaagcagggaaccctgaccctgtgcttcaatgacttttcaatgcatggagaataaccaagcacattacctggcctgcaaggccctgcataatgtgatgtggcactgtacagatggccatgtccacctcgggccactctccctcacacctcctgcaccctgggctcactggcttcctctcacacctgagcacttgctgctcctttgacctggagctctcttctttcagctccccaggactggctcttgctcatccgttaagtttcagctaagtgtcaccttcagaaagtcctctctacctatgctttctacaaaggtctctgccttccctcacccaccccatgctattttctattacattacgtatttttttcttcctgctcctttttacacaaactgcaatgattgtctttacgtattgacttacttatcttcaattttccctattggaatgtaattccatgagggcacagcccttgtttatcttctttggcattgtaccccctattaacctgcaacacatcacatggatgtaaacagtatctgtgcaatgaataaattaacgaatgccaagttccatcacattccaaggtctgtcattacctgggcccctgccatcctttccagccttatcaaccagcgctctcccacatggacaattacgcaaggcacactgagccacttccttcaggaataggtcactttttcttgcctctgaaattttataccagctgttgcctctcgctaggatgtctttcttcccttcctcactcaagtctaattctgctcaaggatcagtttaattgttacttcctctaggatttcaaaagaatttttgaatgcaccaaggcaaagttaaatgtggcaacaatctgtcagaaaagctgccttttggtgggtgagtcccagaagtacagaaatcatggctaaatcgtacctttatcttcaatacaatacctggcacacaataggtgttcaataagtgttaggcaaatgagtgagtttaactaaattataacttcctgagaactaacaacatctcaatcactacgctcagtatagattgaggctgagggccgccaatgttggcagcagcaaagcctgcttaaatataataactacagctgcattgcacagaagtccagttagtgcagaagcataaagttttgagggtgtgtgaaaggaacaaagacaaagttcaggtgagacatggaagcaacgagaaatgcaacatggggcgagtaagccagcactttctgctttcacttctatcactttggaaacatttagtccagaatgatctgggggttcttacttatggttctaagacagcctccacattcctcagcatgtccagtcacaatcaccatctccccaagaaggcacaaagtaagcatctgtaaatccatagttggctattttggaaaattagtgttaaataagaataaaaaaaaaaaacccttcacctttatgtgtaataaagcactgcttaacaatcaaggtcacccatgtcaataacactccccaagcaaagcttcatatctttttaattcctaggctcataaagaccattgtcacttacatcattacaggattcaagggagaataacataaagagaatgtgcaggataattttcaaaataaaagagaaaaaaatgacacatctacatatcaaaccacacaagtcccgtgtctgataaaatcacaattatagatttggtgcatttaaccagtcatacatgccatgcatttgcgaaggtgccatatgggggagttgtggaaagtcaaataattcctagactttttctttctgagcacatgtgacaatgaatattatttacccctgtagtatagaaattatgaagcttaagaccccattgcttctttttaataaaagctaacacatcacagcttactgcttgacccagctccttggtctttgcacgttctcctctctgggcagctctctctcagttttaccccctaccacaggaaaggagacagctgtgtttctagacttgacagacttgtttttacttgataaacacattgtatattgtaggggagaaaacgatcacccctattcccctccttagttcttatgtgggctctttggcccgatctaggaaccaaattgacacaacacagattaacaaagaaaggcgtacacattttattaattttacacatacatgggaatcttcacaagacagtgaagttcaaagaagtgaccaaagcaacatgcttttacacgttttagacaaaaacaaacaaacaccacgataaatttgtgaagaaatgacaggataaaaagggatctggctagggaaaataatttctatgggagtgaccaggagctatatgaatgtaaaacaagtagaaggtaaggattatttcaggaagtttatttgctcagacacattgcagcacctaatcacagtctccactgataaggaatattctcttacccttgtacggagaaggcagccctcccaaaagaatctttatggcttgctacgtgtagaaaaagactggtcagttagccctctgcaattatactttttccaacgttttcagctcgaaataatcaacataccaattcgcatattctgggatggcatgtccttcactgcttcaggaatatgttttcctttgtgctttacttggatattaagttccaaccaattttaattacatgtcgcttgtgcataatattgccacttctaaaaagcagatcactttctgagttagaaagcttatctgctttccctccttatagacacttctgaagcagaaaggaagtaattcctatgctcctatcagatatgggctcatatttctgtttcaaatttaagtctgtgacccctacatgaggccaggattttgagaagagtgaggaaggtagactctttttaaaccatgccacaggcaaaaactcagaactcattttggggaggaaaaaaagtcctatcaaaccagtatactataaattaaacaatgtagcatcaaagataacttttcctttagttgttacccctgagtggtcacgtagccataagaaaatcacctccttgtcaacacatcatcaatcaaccagtgttcattaaataccaactctgtgctagaacctgcttggtataaagaattctattttgtgttcaatgtgtgcattcagtgctttgattgtaattatctttgaaatgacccaaatcattccaaacaactataagtgactttatattcagaatagcaaaaagctgacttgaacacacaatgtaaaagtcttgaagagagagtgaattaaacttttttttttttttacaacaatcagtgggcttatagaatagaaagagaaagagggggagaggtttttatcttttagaattgcaatgcagtgaatagtgatactagaagaacaatcaccaaaagattacagatgagaacttcagatgaaaataacaatgaaacaaagcaaaattcaattaatggccttagagaaggtgagatcagaaagagaaactgaaagttttttagacttctctttaagacagataaaatttagaatttttaaaaatccataataaaaaccagaacaatgctacctcgccaaagttgagttcaaatttagtcacttcagtcaccaagaatccaggaaacttagttactatgggaacagaggtcctcctcttcagaaaggagggcagtgtttctttcaaattccaccagctaaattcaagatcaatgatggttgtttaatatcctctcttgaagctcttactgtctttagtatactttaaaataaaataaaaactcaacaataatggagctcaattaagcataatttgtgtgcttcaacctttggctgggtgactgctctgtaccgttcacacttgtactgtagagcattgcaatttttaattaagatcactcattctatttcccctgaaccaaccaatgttgaggttattgtttggatacaaaactctccaggatacggcttcacttaacaaggactttgtttctttcaagtaccaggcactcactggttctgagtataggctgcctgccctactttaaaatgcatctcaactttatttcagagacagtaagatttcattgttactctacaggacttagaaataaatgcatgcatgtactcacacacaaaatctctcgataattttgcatataatacagtttttgtgctctatgccaacaaagaacagaatgtttagtaaatcacagagaaacacttttatttcttgagactgagatatgtgtggcttctctacttttctaggaattacatttaaaatgtaagaggacaagacctcattcaaccttttatgcctactttagtgatcagggtgaaacatataagaatattgcaacaccaaagctgtgtgtcactactcagctaatggtacctataaagaaacttctcttaattagctttaccctgaactaacttcctttgctctgccatgtataattaaatatgttagcaagacagaaatgtgagatgtagcagctttcacacccaaatttccgactccaaatttataaaaagtgtggatttttttttagttgaaagcccatcatgaagtattttacttttactctaaaaactttcaaaattacattaaaagaagaaaaagaaaatgggcaggaaaattagtaatgagagatgaattttcagagaaaagaattctacagtagtccctcctgatctgcagtttcccattcagtgctttcagttacccttggttaaccatggtccaaaaatattaaatggaaaatcccagaaataaacaattcataagttttcaactgcaagcagttctgagtagtgtgatgaaatctcattgtctctcactctgtctcttctggagcgggaatctttcctttgtccagcatattctggctgtatatgccactcacctgttagatacttagtagctatctctgttaccagatcaactgttgtggtatggcagtgcttatgtttaagtaactcttctcttacttaacgatagccccacagaagagtagtgatgctgtaaatttggatatgccaaggaaaagtcccaaagtatctcttttaagtgaaaagtcaaaagttcctgatttagtaaagagaagtcatatgctaagggtggcaacacctataggaagaataaatcttctatccatgaaactgggaaaaaaagaaaaattcatgctagttttgctctcacacctcaaaccgcaaaagtttcaaccacagttcatgataagtgcttaattaagatggaaaaggcattaaatctgtgaaaggaagacatgaacagaaatgtgttcgttcctactgatggcaattaggttcggtaccatctgtgatttcaggcacccactgggggtctttgattgtatcccctgtggataagggggtactgttgtatatcaaacaaaatctgaggtgcccagccaaggacagtgctgcttcccagaagagatgagactcccctatcctttctatcttcccaaagggtgcatgtagtgtacgcccattggtctctccctttcaggagtgaatccaaaagccacaatattgatggacggcaggaaacgtccagtatctgggctctgaagaaccttgaggatagaatccagctccaatcatacagttcctctgtatggataccttaaacaaaagtgtattttatcctttttaatttggcatcccttagaaatgtgaaacttccttgtgaaaactgctctttaaggaaacgaaacttttttattgtaagccttcccattgtctgtatataattaagaaaagatcagtgatagttcacggtggttttataataggtgaattaatcagttttaaaaagctgaattttacatgcatttgacaaccaatctgggcactattttcctaggaaaaggctcatttgattaaataaattttaacctttaaaagctttaattcttttttttttttttttttttttgtacacaaaggactcttttgtgatggttggatcaacttacacatccagagcacatgtgcatagataaaactttgcagtaaactatcctgttacagatagcttttcttacacataaaaatacattctgatgagcaatctaggggaaacaaaactaaaaaaaattaaaatacagatatacaattcatattctaatcttatcagaataacctactgttaaaacacaaactgaggcaggataaaattttaaagagtttatttgatcgaacaacaattcatgcattgggcagcttctaactggaagtcattcacgagctccacagagggaacatgatgggtggacttttataggaaggtcacaaaagtaaagcaagtcagtatgtgactggttatagctctataattgccttatttgctctatcccattagaaagtcactaaatatatatacataagtttgttggctacttccaactggacaggcttaagttctgttttcctttaatataggcatttgcaaggaatagcttaagtttcacttaagctttgcaagccaagcaaggtttaggtcacttatgaggtctgatatcatctgtttctttcaggcctagtctccattttaatttactttaacactatccataagaatattaaaaacaggcagcagatatgcagatattttatcaatacaaccttttataaatacaggaaagaatagtgttgacagtctaaatttgcttccttgaggcattatctgtttgaccagatttaatcatttaatttgaaacaaagaaacaaatactactctggggttgctgtgaaaggacattcagagtggacaaaacctctttaaacttttcttcaaggtttcatcttcacatatatgttagtttggttactttgacagattggtcaacttaatccaatacagttttatgggtccggaaagtgctttgcttgactttgaccgtatgtgtcatgtcagttaagttaaaagctaattcaatgtgtccacttcggggttatttccatcataaggcattatgtttttacttgggttgtatgggggagttcctctgaattgactagacagatgggaggtttagacacagtttaatattctgtacttgcagaagcaactattgagagctttgattacaactaaattcaagctagctcaaaagttggttctcagccatttaagtcaaaaggttaggtaatgtcactccctccaggggttcattgtccagtttttctgtgtattcattttgtttttatttcatgcctatctagtacccacccctgtgtcccacctatgcctgaattcttactgtgtaaactcttttggatgggaaatgaccagctcctgctactgaccacagccctccctcttgccagagcctgaaggacaggggactcctagctcgacagatcatgctaaaattataccttgtgcttagcatttcttggcctttaatcctgtcccagttacttctctttttttttttttttgagacagagtctcgcttttgtcgtccaggcaggagtccaatggcttgacctcagctcaccacaacctccacctcctgggttcaagtgattctcctacctcagcctccccagtagctgggatcacaggtgtgcgccaccaagcccagctaattttacatttgtagtagagacggggtttctccatgttggtcaggctggtctcgtactcccgacctcaagtgatctgcccacttcaacctcccaaagtgccaggattacaggcgtgagccaccatgcccagccattccttctcttttctaagatttgagttctcattgttaatctggtaattttctttttcacaccagataagcagagctggtttctgcattgctaactgggagcttcctaactaaaagagcctcacaaacagttaattctgctctagatgctgtaaaagagggggacgggggtaggggcagggagagagagagattacagtgataaaatgaaaatgctgtttcagccaggaagttttttctcccccatctcatatattaaaatgggcctgattttctaacttcagcataaaagcccagtaagaaatattagctcttcagttaatgtcattcacacaaggaatttatcagcagagtttgtgtttgaacttttcatgtcatctcacgcatctcagagggtattaaactccataaaacacaatcccaaaagtgaaatatttcccacttttactctataagtgagtcttagggaacggaaaaaaaaattccatgtctggcttattcctaaagagagagtaaatagagatatttcttgggccaaataatgagaagaatcacaacccttagggtttatgttccaaaggcctccaaatcccaacaggtccagcaaagcagaacagagaaaggggctgaatatacatgaagagaataacagaagcaagtggttaatggtttccttaaatgcggcagaaaatggcttatgtgtacctaagtatcctatagtactgagacttaccaagaagaaaaggtgaaaatggaacttgaggcccctggaagacatgttcttagctttgcctgctggctttctgcataaatctgacctttctgcaggtgaagttcttctttacagcccagtttctcctcttagttggctactgacccacagtagcagccaaaattaaaccaatgatgtatttctcgtacttccccaaatcacttttctttaaataagttaataataatccaaacttgcatttttcagctgagtgctttgatacttgcttctcaaaaaactacttggaaggtaaaggagttttcttttcgagacctcgatcagaaatactccatgattcacgcactcagttaggcctaaattagcccaatgttatggctataaaggaaacaggaaacctgtgttccagggacaatcttcttcatcactctattcccagcgtcctctcatatgaggacacggggggttgggctacctccatagaatgataataaaagtttgcctccaaaataatttggaatttttgggttaagcatcaggacatttcatatcatgtaatatactaacattcagtataaatctctaagcagggtaagtgggctcagaataagtcacaatctctcaactcatttcaccatcttgaaaatttcttccatggagcacaaagatgaactaagtaatcaccacattcctcgcaacatttatactttctgatcaggacaaaatgattctaaggagtgattaaagcagggtaagagagtcttctcaccctaatgaatccaaagatcaccaaatagacacccagtttatggcttagtgatgtaaaacaggtgtgattcagagccaagtttacgtaagttcaaattctgtttccatctttggtagctgtgcattcttggataagttacatcacctccgagcctcagtttcttaatctgtaaaacagacatactaacatgacttcatagaggtgtttgaaatagattatctaaaataagcaccaagtgttacatataatggttatttcagttattcattgatttaattcaattaccattaaggttgagacctggtcatcattacccagttaaggaaggggtttgacataaaaaccactcaagatttcttcccactttaggactttatgattgcctttaatttttcatgtttcaattatgtaactaaaatcttctattccatatatatcagaacacaccccatctaatctctgctaagtgtttctctactctgcctgtcccatgaaacaattcccaaagcctaggagagtctcctgtgatacagataccaaaatgacgtgggtcagaagtaactcatacatccatattgtcagaggtgaactatacaaaatactgagtacactacagagtgatctgataggccaagaagaaaaaaaagtaatctgatagaccgagaagaaaaaaaaagtatatgttgtttctctactaaagaatgtcaccgcatattgatttttctagtcttttacaaagactgtgttcagaatttagatcagtgttagagaaattcacttataaattcacatatacccgtatataaggatacagtcctgtatctaaggataaagtcctagcttaaatctggaatgagtaaaaacaaagtgtaaagttaaaaatgcccctctggtaagacaaacatatgcttttcacccaaaggtgcagttaaagaataacaacaaaagttggtagtgagatccctctaaaaccactgatatataatagactcctactgacaccctagaaaaatgatgccaacccatgcagattagtttcttccagcaatgtaattacccatttctttggggctatctttccttcaatggtgatttgagaaatacctttcatttatactccattttgcacaaataaactacatttaaagctctataattagctgtcctttgctactgtaaaattcagtgtttttgtccaaaaggaacagactattgatttacaaagaagctgaaatgctgtcaaactacccactgaagaagtaagaaaaaagtggtccctatcttggctctgcctctagactagctcttgtcctacctcagctttgtatccacataccgagccttctgttaaggtttagacttgcacagccaaggcctcccaggcatctccccattgacatctaagagacacctcaaattaaacatccaactctttgcctgaaacaccgttccttaagggctttccagattagcccttttttgcctctattatttgtatctcttaaatgcttactattgcaagatgtagaaaatcccaactaaaacgggcataaaccataagagaaattattgtctcacacactaagataagtggctcagtgaagctaagtatgggattatttctctttgctcatgaaagcatcaatgtgtcagttgggttcaagtacaagaatcagaacccattctagatattttaagcaggggagatttaatacagcaaagttggtgctggagaaataacttggagggctgaaagtacaactctaggtagagccttcagtaaggactcccagaacaatatcccattgacctcatggaacttgtaaggagccactcctcctgaagctgtcttggagccatagtaaaatcaagaacttgtcaccattacaactgactctactaatgcaagaaaccatagaatgcttatctgtagctgtggtcccgagtttcagaagcctgatcatagcgctgccactgctgcttctgccatcccaaccatttcgtaaaactcagaaagctggagagtgggcagaaaaacacgactgcagggaacctggacattgccacagctacgtttaccagcagaaacagccaaaggagggctgaaatatggcctccacatggctttcaccttccacacatcacatatacacatctaattggagaagactttttttgaagctggctaaaagagaatctgagaaatgatgcttttagttttgcaacaactttaacttgaatgaggatagaatggaaactacataaattcatctagagcatacgaaaataccagcttcctgggtgagtctttacataggagcatgatggaagcaagcagcaatcaaggctgccacagcctttgatatgttctaacagtagagaagaaaaaaatctctttcctggctatggcatagaaggccttcctttactccttatggaaccactttaagccatttgctgactcacagtcgaataccactgaccatggaatgctatgggctgattggctcagatggacaatctgttgagtgtcaaccacagtgtagtctatagtgtgcctgcttacataacatctaatcattgagggctttcctgaccatccaatctcaagtagcctcttctcctgacccatgaattctgtgtctgcttaccaataggtaagtcttcatggcacttaatgcactctgaaattatcttgccaatttacttatttgcctgctccttatctcctttccctactaagacgcaagctctgtgaaggtaaggatcctgtctttttcacgtctgtatccccaacacttacagcagcatgaaacacataccaagcattcaataaattgtttaatgcataaatgaataggctataatccatgtactacagaaaccttaccaataaaatgcttatgttcttcccagttaggccagcttagcagtttatttaaaaggggatgagaaagagagagctgttcaacgtgtgtgtggccatacacagtgaatctactaactggttagtcttttgggattcagtgttacatctactatgcgccagtcactgtaccctactattagcgatgcataaatcagaaatcttggcccaaaggaggactactggtacatgaagattaagattctacgatgacagctgcattggaaaacagtatcatgaaaagtgttttggagacgggtgcacaacaatgtgaatgtacttaacacttctcaactgtacacttaaacatgatcaatgataaattttatcattgggccgggcgcggtggctcacacctgttatcccagcactttgggaggccgaggcgagcggatcacgaggtgaggagatcgagaccatcctggttaacatggtgaaaccccgtctctactaaaaatacaaaaaaattagctgggcgtggtggcgggcgcctgtagtcccagctactggggtggctgaggcaggagaatggcgtgaacccgggaggcggagcttgcagtgagccgacatcgcgccacagcactccagcctgggcaatagaacaagaccccgtctccaaaaaaaaaaaaaaaaaaaaaaaaaaaaaaaaaaatatatatatatatatatatatatatatatatatataatgttatatgtatcttaccacaattaagaaacaaaaataaaaataaaaaatacattataaaacaagcacaaccttttatgtaaattacttacttaatcctcataatcagacaaggtaaacagtatgaatattcctattttaaaaattctgacccagtaaggttaattagcttgatcaagtttatatagctacttaggagcagggctgcgactagaatttaaaaatctccaactcctaagatcatgagcacacagatacacaaataagcaatagcatcatgttttcaaacagtctggtctcttccctggctctgtctgaatgacagactctcccattgtttcttgtaaacaggcaattaattgtacacactaatacacagaaatggcccttaaaataaggaagaacaagagaaatccttttttttttttttttttttttttgagacaaggtctcagtctgtttcccaggcctgagtgaaggtgcaatctcagctcactgcactcttcacctcctggactcaagtcatcctcccgcctcagcctcctgagcagctgggactacaggttcatgccaccaagtccagctaatttttgtattttttctaaagatgaggtgtcaccgtctttgccaggctggtctcaaattcttgggctcaagcaatgcacctgtctcagcctcatgggaaatcttgcactgatgggctaaacttattcaaaaagaaaaatcttccttaaaattaaaaatgaagagtaatagcaattgttggaagtgtactgattcaagggtatccaggtcaactgacagaagagagaggccagaaaggaatcatagtatactgaaaagccgctgtctgataaaagttggcaaggcagattctaggaagaaagagctcttcaacaaacaatggctaactatttaaggaaaatatgttacattgttttctcatctcatgtcaaatattaaaattaatcacatgcttattaataaaataagagcagaaaattgagccatattatacacagaagaaacttttatctggattaaaatagattttaagtataaagatcttaaaacaaaatgacaaaggaaaaaatgaaacataacgccccagaaaattaaaactttcagctccccaaagccattatcaataaaatgaagtgaaagaatagggagaatatgtattgaaaaaagtattaaagacgaagagctaacatcttcagacagagtgctattcaaatcaatatggtacaaatcctttattagaaaactaaatttaaagcatgagtagttcacagaataagaaatatatgtggttaactaccatatgataaaatactcaacttcactatattcaattaactacgattttaaataataaaacggtaattttgttggaaaaataggcagagtattttcatttatattcaagtcttcagaggccacaggtatatgtcactataagggaaaattggcctacatatcaaaatatttattcatagcgttctggcaacttatgccaatgtaatgatcagagacccacacaaagattagttgtaaaacatttgtcacagttttatgtataaccataacaaaactgtaaaaaactaaatgagagaacaaattctgatacacaaaggtgaatacttgaaagacattaagaaatcaggttttcaatacttcataaaatgaaaaagtattgacatagtaaagtataaaaaagtagaacacaaaatgtacaaacacgaataggtattatgtgcatgtataatacatatatattataaatctacaaagacctatccatatatgcatatatgcatttagataggaattttttaaagcactggaaggaaatttactcaaatgttaatgatggttatagatgagaagttgaattaatgttaactcttctctttatttctctccatttttcaaatattctttaataaattggaagtgtattagaaaacatccaatgatgtcatgaacactcattccctagacatattaaatctgttagcgttaactatagactagtgtactatgctaaggtgttatgacaaagaaaaagaagcagtagacagatacaaagacattcctgacattaggagaacttctggagaaagagacacatgttggtacaaaggctgtaatgtaagtaaagtagaaatataaacaaaaaaagcatgagaattatattgtagttgaaagccagaaaggcttcctggaaaaggtggtgtgtaacttttatatgaaaaagctggagccccatctcatggaacagtggcacaaagtattctcgatagcgggcatcaccatttgaactcgatcctcagccttcaataaaaatcataaagcccatcttcagagcccctcttttcttgcttctccataaattatgtactttcctcttttctcacctccttgagatactgtttacctaggaatgagacaattcattttttacagcccatcatgaacaattctgaaaaagaatcccctcattcattacaagacagtatgaattaaagctcaagaatgaactcttcctggcatttctaattaaatatgtagtctacctatcctctaatggtgaaataaaaagtagccccaatattaaagcaattccaaggatcaagcaagcaggtaaggcagattggccaagaaggaagagcaaggcactgagaaatcacaccatgacgcaaatgactttctctgttgatatgaaaattttttcctgccataggtgatgttgatattctaacaattttaaaacacaaaaaaattaaggggagtaacaaaatttcccttctattttttgagttatttaccgctaacaatctcccctctagaaaaagttacggaaatattgtacaaaatgcaccatgggttaaaaaaatgatttaaatacaggaaataattgttattaaatacatcttctagggagatccactctgtcccaatccttaaattagaaagtcagcaaaaagatgaactgaatccctgatgttaattgtacaggcttactggattagaactagagataattaattgctaaattttaatatgcattggactaaatggctgataagatttccagtagttggcttgaattccagaagggaatgattatttcttccccggcctgggagccctacaagccgaagacatttaaaatgtctgtatttggaatgaaagaagttgggtaaatagtagaataggttacagaatggcaaaaacttctagaaagaaaatatggaagttcaaattgccttttcccatttgaaatttagaatataatactgtatagaaaagaggatttaaatttttttatttttattacagcttcagtgattagcattcctgtactataatgtcaatattaaatccagacagacccaaagtctattacttcctatctaaaaaaaaaaaaaaaaaaaaaaaaagacactgtttatcacctaggtaattatattttttatgttcttaagaatttaggagcttgctatggttaattgggaaaaatgtgaattatggttaagtcgtgcctttttttattaaacttgtaacaaagcaaatgatgaagaaccaacaacttgccaatgctgagggtccagatgaacagacgcgcagagaatgcagatgagctgattccattaaaaagttggctgcaagggtagatgatgaaggttaagaagatgtaggactatagaggccaccagtgaaaaggaaaaaaaaatcccctgcttcctctgtacaaccttcaggatgttcaaggaggaagaaagaccaccaactgcagggtcagtacccagatgccttaggatatccatgaggctgtcaggcaccagtgaaaatcaggtctggttgtgcatcagaatcacctgtggagtttgttaaaagatgggattctgacctccattcttgcaaaatgctgatgatccaagcggtgagtttgagaccaaggatattatttatcttttaacaaacctcacagtaatcgtgaatgtacagcaaggtgttataatgtattttgatatcttattttttagagacagggtcttgttctgttgcccaggctggagtgcagtagtgcaataatgtctcaccgtagcctccagtttctgggttcaagcgatcctcctgcttcagcctcctgagtagctaagaccagaggtgcacaccaccatatccagctcatttttaattttttttttttttttgtagagacagggtcttttccaggatggtcttgaactcctggcctcaaggaatcctcctgcctaagcctcccaaagcgctgggattatacgtgtgagccactgcacccggccctgttttaattttttaaatttaacttttaaaattcaaatataggtagcgttttggtaatctcttattttaatctgaatgatggaatatgtcaaggggtgactgacagtagggaggcataatactgtcaggagcttcctacagtgctttcttcaattactttagaatctttggtctccccagaggtaaagtgactcgcccaaggtcacacagtgaattaacaaaaataagaaacgaatgctaatattagaaagtacatacctcctataattacttgcttgggcaataaactagaagttagtaaatattaagaacttcagggtccgggcctgtaatcccagcatgttgggaggctgaggtgggggcggcgggggggggggggtggtgaatcacctgaagtcaggagtttgagaccagcctgggcaacacggcaaaactccatctctactgataatacaaaaaaaaaatagctgggcgtggtggcgggcacctgtaatcccagctactagggaggctgaggcagaagaatcacttaaacgtgggaggcggaggttgcagtgagctgagatgctgccactgcactccagcctgggcaacagaggaaggctccatctcaaaaacaaaaacaaaaaaaacntcagggtcattaccctatttcttcaatttttaatttattttttatttttgagacagagtctcactctgtcatccaggctggagtgcaatggcacaatctcagctcactgcaatctctccctcccaggttcaagtgattctcctgcctcagcctctcaagtagctgggactacaggtacctgccaccatgcccagctaattttttattttttgtagagacagggtttcaccatgttggccaggctggtctcgaactcctgacctcaagcaatctgcctgccttggcctcccaaagtgctgggattacaggcataagccatcatgcccagcctatatttctttaattttaagatgcctattttatgtttttaacataaataaatgaagatgcatcttgtaattgatatgtttaatatggaagcactcattttttccaaaatatgaaatcagtggtgtacttacaactaacagcattataaaatccaggatatatgggaggggtattgcatatttattgtttctttgaaacaaggttttctatgaattaattttgtccctgtatgggtactgtcatcgtgtcgggtaaggaaatcaagactcacctgtgctagaaacctggaaataaactgttggcatatacttgcctcctatggtcagcatctaaccactcattgagtactggtgactcaatttctacctcttcaggcttttttcccttcccagttttaaaacttcaaccgtccctccagtgtagcactaatcaaatctaccacagagctgtcacatttatcctcattaaacacatacttgattccatgacttcctttttataaaactctactggctccccagtgctttcagaatcaagcccaaataccatcaaatggcatttagggtcctgtgaaatctgtccttaccctgcctttctggtatcacagtcatcagctgcttcttccctgcttaaaaaatcagcctaatcaacattcctgaagcttacggcactgttaccacatttctaatagtttaaactttcaaggcccagcttgaacatcacaccttccaccaaccttttccagtcctctcattaaaatcaatttctcccatctcagcattcccacaatatacagcacaatgagcatgtagtcttgcctgatgtatgcctgtctgtccacccaactggacagtaaactctctggcagcagaaactgggccttaatcatttcagtttcctccacagagatcagcacagtgcctgcacgtagtagttatttgctaagcatgaaatctttaacaaagccagaattgattctgaggcagggttaaagatattataaataaaacttcactgaactgaaattcatagtcccatgcagggcacctgcatatttttattaggtttcaccatggaaggcataattttaggtattattatgctgatgaagcacaatcttcctgctccaacttggccaaacccagggaagcaatttcctatttgattaagagtacgacagcagcgaggactggagtataaaaatttactgtagggttgagaatgtaagcttaattgtggatcaaatgggaaacattctaaacagcattttttaaaggaagtatttgaacagcctattttaaaatattcaatatcatcttcagcaataggcaagttttggaaactagcaagtttcaagacaggtactcactcattctctcttctgcaggatcctaaagatggtcctggggactatcagttacttaaatgtctcaggttattaattcttactttaattatatctcagctaagtgattttttttttccaccatttgctcacatagcagcgaacaactttacactgttatcagtcttcacatagcagttcccaaattttgcctttaggtttatatcatgtgcaatgagttttaaaaggctttctccacaaaatcataagagagccttaagagtttcattctctgcctgacctcctgaaaccctcaaaagataattaaagaatcatgaaatcttcttgtgatttcatttaaaaaactttttttaaatcattgatcatgtcttcattctactaaaccatttaagaagtgggcaatttaaactacccctataatggttcactagcctcagcaatcaaggctgtaagaagacagaagcctatgtccaacattattattagtagtaattatctgttacatattaatgctactaaagtaaaatgtgatctatatataatcgataatatgactataataatgtatataacaatccaatatagtttccccctttatctgctgtttcacttttcatggtttcagttacctgcagtcaactgcagtttgaaaatacatgtgtacaggccgggcacagtggctcatccctgtaatcccaacactttgggaggcagaggtgggtggatcatttgaggtcaggaatttgagaccagcttggccaacatggtgagatcccatctctaccaaacataaaaattagccaggcgtggtggtgcgtgccagtaatcccagctgcttaggaggctgaggcaggaaaatcccttgaaccaaggaggcggaggtggcagtgagctgagatcatgccattgcactccagcctgtgagacaaagcaagactctgtctcaaaaaacaaacaaacaaacaaaacaaacacacacacacacacacacacacacacacacacacattagccctgtgcctaatgtcacagtgccatcccttggtcccactccaacaactatgtatgaaataaacctgtgatcctatcagtcatatcccttctccaagcctccctttctgaaactctatgcctctaattctatgagacatttcacaatgttgtatctacagtcaactaagaaataatatatttgggtttatttcactctttgctcaaaccaaggataatttatcaggcctgctaagtataatctgctttcctaagtattgtgagaaatatgaaacagactacacttgcaaatcttaaattgtgatagaagaaatgagagaatgcacaaaagttttcttttcttcagaagagaaattgcaactaaaaaaaaacgcctagagataataaaagagacgttagaaagcaacacacaactgtcaactcaaatgtactgctaattactctagaaagaagtgttcagcattctaataaaaacattatattagtataatgtttgtcattaacaaagagttgcttacaaccacatcaacagataagatcctatgatacgtgttgtctggggcaaagcagggaattgtgggaaatgtaaaacaaatttgtgttgaatcccggccctcagggaacatttgagttcatgaaataaaactaggaatcagaaagactgggcaagatttgttttgctaggaattcaggatacatgaatccatgaggaaacatgaacgtcttggaactcgaacaggaggtggtggtaaaaatctaggagttaggtaaacagtgtctagccacaagaacagaggaggggtttaaacctctaagagatcattttatgggaaaaagcagcccctcctgaaaacattcaattcaggacacgaaggacagatagacactcagagcctcagagaaaaaagtatctggtgaaatctcttctagaaactttggctggggagagtttggaatgttgacttaaagacccacagtgaagtctagaaaaagatagaggcagcttgttacaatttacaccaacaggaaaccatttagaagggaagaataaatgttagttaaactttaaagattaaattacaaatttactcaagtgattttaacttttactgcacaagtagcaattttaagtcataagggatctgaaatgtttccagagttttaaaatggactgttttacacaagtgaaaaaaagattttggcttctagtgctgagcacagagcaatcctatgccttgtaatgggctggtataattgtgcagtttcattaaaataattttattactgacttcctagttttctgttaattatcatttcagagtaagaaaaactattacttttaaagcctatattaaagtaggcttaagcaagcacggaaaagaaagccagtgagagaaaatataaaaagaagctattaatattaacagttacagttggacacttgttcatttcataaatctttgcagtattagcaagattgatgagaagtagtacaaatgagaagcacatgagataagcgatcatttgttatcattactgaaatataaagtatgattcagtgtttcataatggatgttaaacttgatttaacatatggttggctcatttgctgaaaactatccttaaagacataaactcattctaaagtcaaagacattgtcttaataacagtctctgaattatctttctataagagactgagtaacctcaataaatacaaacttagggagaagttgtgaaaaggctgttccttaaggagaaaaaaagcaaatgtgttatatactctgattcattaaacatattatagagaattctaaaatatcgttgaaagagtaaagaattaatgtgttttaataccaacacagagtcttttgaattgattttcaaatgatgagtagagaaacccaatcactgctgtcagtgcttcagcagctacctaagaaatcctcctttgtcaacttcatttctctaatcatgagagaacgccagtgcccactttaagtttagtggattaagcagaccactgcaagtgctgctaaaataatttataatctatcattatacttcagtagtgatagtatactactgaatgagaatacactggattctcattcaacctggaatgagacacttaaaaatatttgttacatgagtatattcctatccacgacttagttttgtctgaattctcacttccattaacagaaatgcactaaaaatatatatatatatatatatatatatatatatatatatatatagagagagagagagagagagagagagagagagagagagagagagagacagagagagagagagatacaaagtctcactctgttgcccagactggagtgcagtggcatgatcatggctcattgtagctttgaactcctgggttcaagtgatcctcctgcctcaccctcctaaagcactgggattacaggcatgaaccactgcacctggcctacattttttttaaaacaacaatttatgtacctcctagagacaccagaccagtttgaagactagccgtcttcaacagtccctgtagcaattatgctcagaaaggcttatttcttgagctagcaagtatctgccctaaaaccaggttcattaataaaatgtctatctttcaaaaaaaaatacttgaatcttctgttttccctgatgtttgtgtctttcttcatccttggatacctattcttataacacagcccatgctcatctgaaataagtgacttcaagtcagctccattatcctgcatcctgcctgcaaaaatgatctagatatggggagtagtgcttccccttgttctatacactatatcaatataagttgttagactgcatcttctttaatcaaagtgtcatctaattcacatttagccatcagaagcatgtctaccaaagagcaatgcagccaaataagctttatgcacccatccttaggttatactccttagctaatgttactcttatttggcattgatttgatttattgacaacaaaaatacccatgtttgacaccaactagccttgatgtgccactattactgactctctcgactttgctcccccaatttgtaaaatgagaagtccaagctttcagtgattcatgaaagcagagtccactgtcagcctggccacacaactagcccctgaggatcttgctaggggtcaaaacccacatattagatctgatggggccctccaaattctctattttagtaagttcccaaatgcttctcacgcatgtctcttacagaatagatatagctgaaacaatctacaatattatatactgaactcattcaaccattagctcaaaggaaatgcatgctaaaccagctgcacaatccactctgtggagaaatccagcagccactccaagaagctgacctccaaaggtcatggagcaagatggagatgaagagccagccagggtctagagttcccactttgctctcttaccagctgtacaactttggacaagtctgttaacctctcagagattaggatatcttttctgtaaaatggtggtaataaagcctaccttagagggaaattgtgcaaattaatttttaaaatacacatgtaggccaggcgtagtggcttacgcctgtaattccagcactttgggaggctgaggcggtcggatcgcctgaggtcaggagtttgagaccagcctggccaacatggtgaaaccccatctctactaaaaatacagaaataagccaggtgtggtggtgcatgcctgtaatcccagctactcagcaggctgaggcaggagcatcacttgaacccgggaggcggaggttgcagtgagccaagatcatgccattgcgacagaacaagacactgtctcaaaaaaaaaaaaaagtgtatatatacatatgtgtgtatgtgtttgtgtatatatatgtgtgtgcgtgtgtacatatatatatgtacacacacacgtatgtatatgtaatgtacttacaaaatgggaggagtagagacactcgggaggactgcatttggctttattcattgttccttctggtatagcagctaacacacagtgagtacactaaaaaaacaatgctttgaagaaacaatctaatccaactacccatgacacgtgttattcattcagaacagtttattgagaggcctctttgtgtgaaacactgtgacagtccatttgctccttcaaatctcttcctccccttctttctctgttctgtgctgcagaaggctgatctatgtggactacactgacaggccccttggtgttctggcttctcctgcaagttggccagtgagggcttcataaggataccaaatgagaggaaaaacaagaacttggtctgatctagcagaaagatcagaccaaggccccaatcacagagatctcctgtttctcccaaagtactctgttttcccaaacatctctcctactgtgttgcagtaccactccctcaccttatccctttgggcttgagtctttaaaactccactgcttaccatccccaggttcctgtactaaccttgtggttcctctaaaccccaccagtgcctctctatatcgtccctttataaagaagttctctggagcgcagcctcagttgagtgtaccctctcttccagttggaagtctgatataaacaatgtgtttgaagttagggaatacagtaacaaacaaacaagtcatgatctctcatggaattctaactactaccactgtcataacaaacagctaccgtttattggacacatatcccatacaagctctatagaagttgtatacctgaggttgctatcatcatctctgtttttcaaatcaaaaaaccaaaccttggaaatataaaacccacatgagtatcaaccaacagaatttgattcacaacagaactcagattcaagccagagtcaacccaatccacagcacacgctcataaatgctgaagtattaccacatttacctcaacaatgtccctgccaaatggatcttcaatgtgagtcataagaaattttccccaatccttctccccatgccagatctggggattttcagaaagcctagtgtgaaaattcaggagacctgaaatgtgccctcttatcatatctactcaccaactggcttgtgagtttcctcctctttgagctaatacctgcagggaggtgcgcgcttccgtaactagtggcctttgttctaaccaccatctctgccatttttcctgtgaaatttcaagataaatgcaggcaagcaagggagagagcccttggacactcttctctagtattctaggacttttcaggcctgcctggtgagatcaggtaccttatcactagcttctacttgtgcaatctcccaattacacaagcgatcccatctagatttacaagtggccatcctctctgacccacaggccagagaactcagcccacgcaatgtttttaaaatagaccccaacccaggggaggctgacaggcacacagctgcaccaactttattaatgagtacccagacctttagataattgatttccactttgatcccagcctacgcatttctatctctgatatctaaatagcaaatcatgttatcttacaattaagtgataatcttcatggcagaaaagttgacaggtctataaatggcttctgcaagtgattaaaataacttcctccccctttccacccagccctggaaatgttctacaacttcacaaggctattacttgttaataaactccccatgatatgaacctcattcatattcaacaagtttacatactaagttactctccagaaatgatatacatcttattttttatgcttaaataagaacattttatttattttttatatctatttttttggagaaagggtctcactctgtcaccctggctggagtgcagtagcatgatctaggcccactgtagcctccaccttccaggctcaaggatcctcccacctcagcctcctgagtagctagcactattggcgtgctcctccatgtcagctaatatatatatttgtatatatccatggcagccaatatgtatacatttgtagagatgaggccttactatgttgcccagtctggtctcaaactcctgggctcaagtgatcctccagctttggcctctccaagtgctgggattacagtcatgagccatctcatgcagcctgcaagtacattttattagccttagtaagttacacaaagtcagcaaaacctttgactttaatattcaagtaatattaagattgttaaattttgcatgtatatgcatggatatgaagtatatacaagtgcagagtaacttgaagatcagtgttgaaacaacattgagtatttaatatgaaatgagaataaatgactaaaagaagataagttttacttcaataagtgaattgaatattgaaccctgatatggtttggctgtgttcccactgaaatctcatcttgaattgtagttcccataatccccacatgtggtgggaaagacttagtgggaggtaactgaatcatggtggctgttccctcatgctattcttgtgatagtaagttctcacaagacctcatgttttaagggacttgacctttcacttggctctcattcttctccttcctgccatcacgtgaagaaggacatgtttgctttcccttctaccatgactataagtttcctgaggcctctccagccatgctgaactgtgagtcaattaaaactctttcctttataaattgtccagtctcggatatgtctattagcagcatgaaaatggactaatacaaacccttactatgcactgaattctggggcaagtacccaagatattacagcaaacaatacccaccaatctgcttctatggcagaactgggccacatgcccagaaggcaagtaagaattactctgcaaccaactgatcaccatagtaactgagcatcaggtagaaagagtgctgggattgattagcagagtctgtgatttggattggacatagaaatgatatagtccattccatgtatgctcaatgaacactgcacaggtgaacagataaggctgtgacctcctctgaggcaagctccctggttattccatctccatatacctcaagactcctaacacagttctttgcacataatagacattcattttgcaggacagataccaagatgaattgcttcagtttgtttttaacaacgtaattctatttccaatttagataattcattgatttcacacctttccttcctggttactctatacttaattttcccttttcttctttccttttttgtttgtttttttttttttttttgaaacagagtcttgctccattgcccagactggagtgcagtggcgcaatcttggctcactgcaacctccgcctcccgggttcaaacaattcttctgcctcagcctcccaagtagctgggactacaggtgagtgccaccacatccagctaatttttgtctttttagtagaggtggggtttcaccatgttggcagggatggtctttatctcctgaactcatgatccgacctctcaaagtgctgggattacaggcatgagccactgtgcctggcctcttctttctctttctaaaagcacatcaatttacatttctacatctgcttcctacaaagaatttcctctgaatgaattcaacaagtgtcctgtacatgtaaatatatgtatgaatcttttgtacctatccatgtcaaagggtttttgaagccaaactgaaaactttcctagactacatgttgatgttctgaatatccacatttcgaggctcttaacaaagctgtatcaaactccttttcttctgagtaatatattatgtacgtaaagtcctaggagatgccctaagtctactataagtgaatttactttttgttttctgctttgcttcattcatcctgctttgctttttttctcatcccaaatataaacatctgttttgttatcaagttaaagttaaggagatataaaaccctctcagattaatgtacagcccattattgaattctggatcttagtgatatccaatatattatcatgaattttatagaatatactgaacttttaattcttatctgatttatcttcttaatgatgcttagatttccattcaaaaatcctgtctcttctcaccctttccacactgtgtctgtttttgtgcccttttctagagttttacatttctctttaggattatctctctctttctctcgctcacctacatacacacaccacacactccatgtccaaattcacagtctaagcattttggtgatatgccattcctcttctacctttgttagaagttcctctttcccatggaatcaattctaccggaaaaaagtgaaaaggaaccttagagagcaatcattaaaggtgcaaagggaaaggtccccatgtctgggagtgtctctaaccagctgtgtgatacgtgccatgtaatatctggctttggttttctcatctctaaaactggagggtaaaacaagactatgtcttgaaacctttctaattctgaaatgttcactattatcagttaacatttattgtgcttttctgcatggcaggcctcaggctaacggctggctataactagcactatccatgctcacaacaactccataaggaaggtgccacggttatcctcattatgtcactgagaaaactgaggttctgagaggtaaagtcatttcacacctgatgggatatggatgtaagactggaactcagacggcatgactctcaggttacagattctgcatcacatgctcatatcaactgatctgtatttttatacaacttcaaaaatgaaaacactgggcatgtgacctataaataatgaaatcatatacaaaaataaagaaacaccccacattgttgaaaaattatttcctttccaaaaattacttgaaagggcatcagtaagccctggcatatttgttcaaaatacagtcttactgaataggggtgtgtgtgtgtgtgtgtgtttgtgtgtgtgtgtgtgtggtgtgtatatacacacatatatatgtgtgtatgtgtgtataggtgtgtacatacatacacatacatgtgtatacatgtatatagacacgtatacatgtatatacacacatacacatatatacacatatatgtatacatacatatatgtttatatatatacatatgtgacaataaaccagtagaaaggtatatatatacacatatatacacatatatacatatgtgtatatatacacatatatacatatgtgtatatatacacatatatacatacatacacatgtatgtatgtatacacatatatacacatatatacacacaaacccacagtcatcccttggattggtttcaagacccctgcatatacaaaaattagcagttgctcaattccctgatatgaatggtatagtatttgcatataaccttcccacctcctcccattaactttaaatcatctctagattacttataatacctaacacaatgtaatgctatatagttattctaacatattgtttttatttgcattatttttattgttgtattactttttatggtttttttcccaaatattcttgatccacagtggatgaaattcacacacgcagagcccatggatacagaggtccaactccatttttaaccaatactcatattcgcacagattcatataatctcacactttcaagtaacgtaagcactatatgatcccattatattatcagcttgtcaagaaaactgcctatgctctgtgtcctttataaaacaatgttcctacctaataagggcagctacagcctttccccccagttctccctgctataaggtggcacccacagatatgtctccttctcttttgcctaagaaggcccttttgatttctctttcaatcctgtccccaagcctgaactcatcagtatcccctactgctgccagtctaggagagactccaatcatcttcccctactgctgagacagcagccttctacctggtagcctctgccctcctcagtccattctccacactgcttgctttcctatctcttctcaaagccaatcacataggtcccttcctcacttaaaacccctttatgactcctcattgcatcagaaataaaatctgaactcccttccactgtttcagaggcccactctcaagctctccacatctataaagtgccaactagtctttgccagttgtcaaacagactgagcttagctttctctcaacccagaacctttacataccctggctccttgatttggagtgctctctctccatctgccttctacagtcggaccttcacatctttcaggctgagacagaaccctcctccagagagctttccatgtcccccttatttagtctgacccaagcccattattctctcttcactcttcatttgtttccttcataataattctgattgatcattgtgttatccatctccacgtgtgtgtgtgaactatattctctcactatcacacaagcctccggaggatggaaagcagctggccttgctgatagatacatcccatgcatttaactcagagcttggctcaggttagatggtcactagttatgtatttgttaaacgaatgaacatatgacctcagatctttttgccttaagagaaagaaaagtaaaccatttgaaaaggggggaaaaattataaggctagcaaaagttaatggtattggcaaacattactacaggcccttgatagatgttaaaagaatggagaaagccctttaacatatttaatatatcatccctagttggaagatacttttagaattgtgcctatgcccaaaagttaataaatgggtgaggatattctgtgtgactaagaggggctaatgaattgataagtatttctgtgagatttactggatggttgaaaaatctctgtacattttcccctgattgtctctacctttctgctggcttattgtcatgctgatttttatggatctacattcaacagctaaggtaaataaggtaaaatgccagagaataatccaccataatatagtagaaaacttttttaaaatcaaaattcctgttgctaaacccaccatctaacaccttttatcacatttgagtgatctttaaaagaacatcacacttaaattcgcttttgagttagattactgaagacaaatgacatactgaaatagcatctaaaagcgttaatatacaaacatctacccaatacagatttaaatatagcagtgactgtacacctaccgaaacatgaaagactaccaggagacagggatttaatgtggattgatactaaaaagctaatggaaatccggtggtctttatgattgagatggaacatctttcacggctcttaaaaccttaggctggacagtgaagacatgggctggtgctgatgaaggagggctataccccaagcctgggaatctggaaatctgatgtgttcggccagagaaactccaaagttctccgtgtttctgcctttctctacccccacaaacttcaattcttcccttgctaataaaatactggaaactgagtaataaaaggcaaatttcatttcaatcctttgggctcaaagccagctccctgccaaaacttctcctgcctggaggggtagagcagggaatgagttggggcaagcacagatgtcctgcttctactctagagggagagatctgcaaagggtatggctcagcatcttgtctaccagctaatgtgattcataaataaatcacacagggagaagtgtgggaggcccctgtggttcaattctttatctctttttctcttccccagtgtggaagattgtcctgagagtgtggggaccagggggcagagtcacctacatggtctgctgtacagcagctctggcagcttagcacaacccattcacatactgggcagagcccttccaatgttaacctctgccagagctcctcctgacttttttttttttaatcctaaaagaggaagcatttcaaatgacctaaatctaaaaatagagtacttcatgctcatgactattttaaatagcatctaaaataaagaattaaaaaaaaaaacatgtttccatttttgtgacagtttccccttcccttgaaaaaaagaaaatactgtagagcttgtcattcaatctaaaatcagacttcgtgccagctggaatcctaggtttatttattactgtgcacagttcttacattaactgtttgttaaagactgattttaccaccactgagacacaatgtaagtgaaggtctttccatgttttaccaaaaagagtgattcaagcatgacccgtccaggagaaatgatattaaagaaaagggacagaagtactactcagtcactgatccaactatatttctggagaaatcaagtttaaacataagtaattgcctaatggagttgggccaaggtggagataggaaaatatccatgacacttccagtatttgcaaaacaggttcaaaaataaaattgcaacattttatggtctgtaacatacttagtcacttagtcgcagagacatctggaaaaagataatccaatggggcaggtttttattctctactttagaaaattgttcacatttattccctatcatagtttcaagtagaatggttataattcatccaataagcttttttaaaaagcagggaatcacagtttctgggcgtggggcccacaggcctttacaaaacttcataggtttatacctacataggtcatagattgtgaatgacacacaacatgatgactatgttcatgaacacacatgctcatatacatatatacatgcagtcaagctcaacctagattcacaaatcttacaaggttttacttccacaataatgggctcctgttcagtctctcttgccagccaatcctccaagagagacaccgacaaatgtagacacgtaaacatgctcctccaaacatggaatagctatcacttatttcaagtcatcaaacgtatgagtcagctgtatcttgatacaattagttgaggttctctttcaatgtactccttagacactctgtggtgtcaagctgtggtactatggctctttcactagctcattaccacctccagcagagtctgccttggtatagcctcagaggcacagagcaagcactcaataaatatggagtagaggaaagagaaaggtggacaggaaaaaaggggggagggaggaaaggagatgaaaaaggatagaagagaaagggaagccagtgagggagtgaatatctagctgagaatggaggaggaatctcaaataaaaagggcaaagtcagaggacactcagaaaaacagaagtggatggacaacagtgccacaggaactcaaaggtgcaatgttttcaaaagatagatagattccaaagatggcacccactgatgaagcttttctattaccagggtcacatacaaacaaatcaattcggcacccagggctgaggtggtacagcgtcacgtccttaaaatgccttcagggaccaggcaaatagcataaatataagattataggcgagaaaatgcttaagtttcaagcacagcatctgtttcaagcagaaaaactgtgcagatcaaacagctcagcccagactctatccctacaccctggagctaacaaatcaatttgattcaaatatttgtggaatacctacaatggggttttaatcacaaaactttacttgaacagctgcaacctctagcctctccaggcttctttcctcatcatggggagaaaaacacaaacatttcaacatttgttgagaggagaagaggttctacatgaagtaacccgactgacttatttgtactgagaaaggaaaagcaactaaccctgacctaccagaacttctcacctcgggcagtggcagtgagcagaggtctcagcagcaggagcctgcacaaccccaaaggacatagcagagactccaataccatgtctgaagcaacttctttgaaatcaaaatgctgatcttctcacatgctgattacagacacttccattatcaaacagaagaatttggggcaaaatggattcttaatggtgtctgtttcctacattttcttatcagtagagtggctcaaaatctaaatccacctaaactgtccatcatcgccccctccccaccaacaatgctctcattttatcctgtatgtgtttttataaaacgtctcaccatctgtaacaatatatgtatttgagtaattgctggtttactgtccattgcctccactaaactgtaaactccatgaggtcaagtacagagtctagacttgctcatgactaaatcacctgcatctggcacatagtcagcatgggatatatatttatctgttggcccaacaaatatgactcttgctgctatctgattttacacaagcacacctccactggcacaacacaaggagaggagaagagggaggcatctggagagctcaatgtcaaggttacttcccagctgccattccttgtgtttcctgaatgcaagtgtaactagtaactgtactaacagagccaagggctatatattcttcttcatcccataaacagaaaaataaacagttctgtggaactgtgcaaacccaacttaaatttcagattccagacccattatctggcaccctttgctcagaaatactttactaccactagaagacaatctaacccctggtctcacataccacataatgctgaaattcttccccattctgtctcaaacctgcccacaactccgtttcatgagggctgagccactatccaatttctatccttataggggttcggttttagactatgctcacaaatcccaaattcccagtgagttcaggaatgatgcttccttaccttaccttacataggaccttgaagatttctattacccgcagatgtaacatgcagttgttaagaccgcacattgcatcagcccacgaaatgagttgggggctatccagcctggcccctctcacgaggccatgtaccttgtgggggagctgtgtctccacaaaaggagtatctttttctattttatacaaacatgccctatggattagtaacagtctgatactagaaaaaaggaagctcaaaacttcacaggacatggcaaataaaacccagtgacctgataagaggtacaatatctccttggtttaatatttcacctcttctaattagaataaaatattcactaggaaaaatttttatgatagtgtccttttggcattagcatgaatacctccaaggagccgtattattcaaacaattttctatttcaaaatacacaggtagtaagaactaacaaatcattacatttccaccaaatgcacggaaacaacaaacttaactaagaaaatactgaagcagcttttcccaacggtacctcgcctccctagagcggaatggttttcttttaaggaatccctattgatgccagaaccaccttggaagaataattaatgacattttgaaaactgaacttccttctcactgcctttcataatgcaaagtgaaggggaggcggggtgagagtcccccaggaacacacaatgcatttttacaagagcttctaaagcccctcagtgagacagaaacacactttctcatttaagcaaaactttagaaaactaacaattaaaatgtgagttaaactgaggaaacatcttacatctgtgattctccctccagaataatatgactaggtagctagctgccagacactcttgtttcagcaatcatgtgactatgtgatgagggctggcttcatgattcaggtggaactgatcagggcactgacactgatggagacaaagcttgtcaggcatgatgtccttgtaggcaacaatacctgaaactctgttaggaaatctgaggtctttggatagaaggaaggaaataagccaaaggctagagtcacacagtcagtatcacttcagacaagtcagcactggatcaacctcttcacctgtaaaatgagggtaagaatatccactcaataagtatatgataaaaagaaagtgacaacacaaagtgtaaatgaatatttaagcaacatctacacataagagaccctaaatgaatatccgttgaaataaaagcaatggttacatgcttctcatatcctgtggcccactgacctcattagtcattatcttgaccagctccacttgcacagcattatgaattacatgtgtgcagggctattcaattgtctagtttgatgttcttaaccttgtgaggcagtaaatatccattttaaagatgagaagactgaagtttacttcacaatcttagtggctccaatcgaagatcgtccactgtaaaattcagttatctgcctcatgatttcacggcttatggctctatggaagttctattcttaacatgacgcaaaggaagtcagaagttgcaaaactctgagttagataattaagccatgaaaagtgattgatgctaagcatctgtacacaacatgtgaaccaagggaatgagtgactagaacccaaagagagtttggagttatttggctgtgactgagaaatgatgggctaggaatccaggtaacaacaacaacaaaagtaaatacacattgtctctcctctttgagaagatgaaagaaaacatctttttcagttcaatgatgcttcctgtagacagaaattttctcattgaatggacaaaactagcaagtgcacaagttaataataaccttttacccaaggttccatagcaagttccacatgctatgctatcatctaggctccctgcctgcctcttctcattgcatcctcatgacaacctcataagttgtcatgctatctccaagttttggatagagactgagtctcagtagaggtaagtttgtttttcaggcagggttgagcttttcgaagtacagagagaactggggaatggggtgcttcaaagtcactgaaagagctgaagctgtgggctctagaaagacatccaggatgaccacgaggagtaccactacttctgccaccatcagaaaggcagagactcaggaagtcaccaacagaatcattattagaagtagactgtctgaattatgaacatggatcagaaagctgctgtcaccaacacagcctttgactttataggaaagccacactagcaacaaaataaacgctctatccactgcttctcagtggcccttcactgagtggccaggtactgaaagatgagtgcccaaaagcccgatgtctcctccaatgttctagccagcaaagatcacagagaatacagaaagttggcttcagtctcaattctgtcttccaaaactcaaacaagtgcatctaactggcaaacaaggaatcagatccagggccttagctgtaaagcatctggaaatgtaatgtttgaccttcccgcctttcagtacaggaaggcacgtgatgaggaggctagcaaggttcctgagagctcaatcactgtgtctacttcatcagatttgccatcccatagctgattcctaattaaagggagtgagaaccaaaaagggggcaaagccaagtatatgagtaaatgcacagaaacatgacagactaatttaaccagagaactaaaaagggtttagcacccactaagtgaagagtgcatttggaaacaaggtggaggatatagctggagaggcaagaaaaggccagatgatgaaaagtctatcaccccagcttagaagctttctcagcctaagctaggatatcccttctgaacttcttagaagccttgcacaatcctcagctactcattgatcacacagaattgtaaccattcatgttcttgcctgctttactgttccccctgactatgagggtgggaggtcaagggaaaggaggggctattccactttgtatttctagaacatagcacagtgcctggcccataaacgaaagctccagaaatacgtgttgtatggaattacgtcccgaggttccttccactatcaatcatctacttaaaaaggagaaaatgctctctttaccttaagtacctttcattattaaaaaaaaaaaatggttaactatggccacgcaatggctctcacctgtaatcttagcactttgggaggccaaggtgggtggatcatgaggtcaggagttcacgaccagcctggccaagatggtgaaaccctgtctctactaaaaatacaaaaattagccgggcatggtgacacatgcctataatcccagctactcaggaggctgaggcagagaattgcttaaacctgagagacagagtttgcagtgagcagagatcgtaccactgcacaacagcctgggcaacatagtgagattccatctcgaaaaaaaaaaaattggttaattgtagattacagattgataattgtaagaatatattcctatagacatatttttgtacatttatgtacagtagtagacaaatgttgtttctgttaactgaaccaccattctcccattctgatgatagtgcctcaattttcctgtaggaaaccacagctactcccctcacatgaagaaattcacatgaggggtatgacctcagccctggggtttcagtttggcacatgacatggctggatcaatgaaagttctccgtgggattcttgatatgagcaacttggcagtgagggggaaaaagttgctctcttatgctgagattgctactagtggcaagatagtaacattgtatggccaatgaccaccacatgagacaaggtgtccaaagaaggcaacatggaggaatcagagcccatggagggaaagacacagactctattttttttttttttttttttgagacagagtttcgctattgttgtccaggctgtagtgcaatggcgtgatctcagctcaccgcaacctccacctcccaggttcaagcaattctcctgcctcagcctcccaaatagctgggactacaggtatgcaccaccacgcccagctaattttgtatttttagtagatacagggtttctccatgttgatcaggctggtttcgaactcccaacctcagatgatccacctgcctcggccttccaaagtgctgggattacaggcgtgagccaatgcgcccagccgggagagacacagactcttaacaacactgagtactcggatctagggtgtcaaagctgtcatcggtcagtaaatttctttttctttttcttagaaggtctaggatggtttcagtctggtaacaccaaaagaaattcaaagttttaagtttaccatacataaactattagttgaagaaatggcaatgactaaatagcagaagaatgaaactcagctttgggggacatcaatctgtcagtcatctactgtgcagccatttcgaggggggataactggaagagatgaggctatcacctggacattcttaagagaattaaaacataataagccctctccctgtctaaatgcacagataattgattaacagaaaatgatcattactaaaatggcttcagagtttttcagggttgtgggaattacaattgttctgaaagaaaactgattacttacagtttcctcctaagattgtagttgtgcagtaatgatattgagacagcatgatgcccattaaaaaaaaaaaaaaaacactgaagactttacaaataactgagccaaatgagatattgaaaaatcaaagcgagaaagtcccatcactaaaagtatacaaatacatgagaatcagccagtaaaacaggaagtcactctcatctaaaatggcctttgcttgtcatcaaactcatatagaattcctaaaatctgtcagtgtagtagcttctaagtgatatgtcaacaaatatattcactgagaatacttattctgcctagagccaatgtttttagaaaaacatcctaaagagtcaactgttaaatcactaaaatgaatgttttgagcaggtgtttggaattgtgctgatttatccatattttccagtttaatttccacgtttaccaacaaacttcagcaagaaaacataaaatgtacctggaaggattatgttcatcataaatacaaggacagttgcgctaaacatatctgtactggtaacagtgattcataaaccatattcattaacctaaatccttaaagttttctgtttaaactgtagtgattggaacgccaagtgtcagagtttaaaatggtatttttaagctattagcagttgacattttaattaggcatatttatgacagacatggggggataaaaaagaaggtaagcaaggaataaaaggtgcatcaaggacacaagaaaagagaaaagaattaccatccattcctgttatccttttcttttagcatatcaataggaaagcagtataactaactggtcaagaatgtaagatctaaagccagcctttatcagctcaaatcatgactctgatatttaccagctgtgagaccctgaacaagttacataaactgcatctgtttccacagggataatgccagcacgtagctcataaggttgctgtgggaactgaattgggtactgctcaaaaaatatgttgcacagggcccaagaggaaagaagtattcaataaatgctaactactactatattatttgtaaccttacttaccgggtcaagggctaatagtggtagtaaattgttgcttaaaattttatttatatatttcttcttgaaccagaaaagatgccaggctatttattttttaattttttgttgttgttattgttttacaaagggtttctcagtctgttgtccaggctgcagtgcagcagcacgatcatggctcactatagcctcaaactcctgggttcacagagtgatcctcctgcctcagccacccaagtagctgggactataggtgcacaccactatgcccggctaacatttttgcgtttctttttttttttctttttttttttaagagatgggatttcactatgttgcccaggctggtctcaaactcctggcctcaaatgatcctcctagatcagccactcaagtcactaggatcacaggctcagccactgtgcccagcatgcaagacaatttaagaggcatacaaaagacaaaaatataactcaacttaagaacagattaagaattaacaagataagaatatttaagaataggttaagtaaacaaatgtcatagacaaaactagagtcaggaacaagacaaaggataagaatcacttagatatggctgctctaagcagctactagtttgtcttcagctttctggcatccaacacaagaaagaaaactgggtctgcggcacaattttcaatattcgtgagattaaaatatactaaatgcccagaaagagagagtacagtgattttgttagaggccgagaacataaggaactaaggccatgcagcaaatcttcagaggggcacatcatagccacggtagatagcattgccaaactcaatttcttagccctccttgtatccacacctgtatatggcctctggggccacacgtatttccccacctcttcagtcaaagcttggtcctaggacttccttaggccctgatatatggggagaagtgacagtgcatcttcactcagttctcaccctctgccttaaaaggtcttaagcatttctgcttgccttgctgcatctccactacagccatagaagtaagtgacatagttggtgtggttgctagtctaagggagatgaaaaacacaaagcagtatggagcagagccatccactgagcccagcctagatctgctaaaccccagatgattcactaagacacaagcaaaaataaatgattattgttttaaacttcagagttttgggataatttgttatgcagcaatggaaaacaaattcagtaacaaaatgatgacactttttaaagcagtatttctattgccaactataagtcaaacagtatgccttctaaatggcttaccataacctatcttcataactttgatttctaaacttattaaccttgttactgtaatttcagagaccctcaacaattaatataaattaaatttgtcactcaccctactaaatgaaagtactctggaatacagtcaccaaaattaaataaaggttgaggtcataggcctccaaatacaggccatacagcataagcaaaattaactgggaggtggggtagggaggcaagcagtaggtcataccttaaagagagaccaacggcttccaaagtaacaacactaggcatgaaagtagcccatgtgtggccctcaggagagctgccatgtgtatgaagacacactggactgagaaatcagtctcttcaaatgtgtgctttattcaaaagatatcagggcagatgtcccacaggatttgtgttgatttgagttgcttctcacatgagcaaagctatccagcatccatacggcagaagttgttatggggacttattcatttacacatggataatgaaactcatgagcaaggctggggagaccaactaacaactctaataacaacagtaatagctgaatcccattgatatggatggtgctagtcactgtgttaagcactaagcatcaattatttcattcaattcattgaacactcataataacccaaggaggtagttatttttattcatttctccaaccaactttgccttttgcttttacaggcaagtattctggagcttggagagactgagggacctggctatagttacaaaggcaccaccttgtttgacaggggctctcaggcaaaattagaacaggtaaacttgattagtatttgctttaggtaagtcttgaacattttctcagttaactgaagattttttttaatgtttatgtattttttaatgaatacattataattgtacataatatttacggggtacaatttgatgtttcaatacatatccgtgttgtgtaatgatccaatcagggtagttagtatatccatcacctcatgcacttatttggtgaaaaccttcaatagcctcttttctagttattttgtaataaacaatattttactgttaatcatagtcaccctaccatgcaataaaataccagaatgtatttctcctatctggctgttgattgtagttttaattcttttcttaaatatgaagcttctgtaacttcaactggtctgtgaaaatattatgccaaatagaaagcactttttgtaaataaagggcgtgtgatgcactatgaacacctcccaaatgatttggaggaaaaaaacatcaattccagtgatattgtttcagattatcccaatggtctaggtttattccaaagactttgacctaaatccctcagtattccccttcaactaactctcaacccatttgaaatcttattcatatgttctcactgttagattgtccacctacaatttttttttgtcctttgaattactttctactgaaaataatacacagacctcggtgttattggaaattgcattgtgaatacacaaggttttttgtctaaattttaggtagttttctctttctgttgctacctcaaagagataacagattctgcagtcacattatatgtaaattatgtacaagcttcaccacttgggcttgtacattattctactgattttctacagtggcgtggggggcacataatagccagcaacaaattattagaaattaaattcaaacccagtgtatgctggatatgagcatttccaatgcattttgcctccaatttagttcagatgactaaaaacagacctgtgggactgtttaaaggcactaaatctccacagaatcatgcagtgctatgacataggcattctgttctcaaatattcatcatttatcagcaacggaaacaaacataggattcacatgtgcaaagtaacaaaatagatggtcctagctgacataccagtttgactcaactgactattacccttacaatgagcagcttcttaaaccacacttatcctggtcccctttatctatgttagagaaacaagaccatctctactattaattctgtctcaaaacttcaggttacctagttttttccctcaaagattattcatcttcgacagtcaccactgcttcacaaaacagattttattgttttctttgccaattaagggctccccaagaacagtgaataatctgtcaggttgttataaaccatcaaaagttctagaaatgtcacattacctccttcaaatattttttaacatgcaacagggacatacagctttgtcatcaaaagctgtattggtttcctcatattttctaatctacaccataaagggaagatgtttatcataatggcaaaataaataatttagccagtccaaatctcttacaattgcatgtggcaaaccaaagtcaaactgaaggagaggagggtggaatagaggttaatttgctcacatgacaagaagccttgtgactttatttaggataggtctaggcagtgaggctggtaaacatttaacaatatactcatttaaaaaaaaaaagggcagggggtaggagggggctgacttgcagccaatttcaagctaccaacacgctgtcaaccagctcacagaattcctgaacatttaacaataggctattgtatgctgggatgagccatccccagcatgatactagatccagctatcaaacaatatcataaacaccccatcctctcttctctttttcctgctttacttcatctgatttcattctcaaacagatttactcaaagatgactgcagaggaatgttctcagagggctctaaataggttggctttggatctgccctcttaaaactaaacattaccacagaggaatgaagtattctgatcacccagtttgggagctagagagaatgggggtagctacgttcaaaccatttggatgaggcaggactcgcctgaaatggggtaagtgtagccctcctaagaaagaagcactgtgcggatgaacatcatgaacaccatccaagtttcaacatgtctgagattaaatctgcagcaaaagtttactccatttctgggtgtgtaaagcagctaaaacttcctaccatgcgtccgctatccatggaaatccggaacaaaagcttaagatccaagaaaataaaatgtgttttgaagaaaaatatgctcttgcaacataaagaagctgtcttcagttacaaatagatataaaatgtgaagatatataattgctgcataaatttattaatagaagtgctaatgccataaatcgtacatctccattttgacacgcaatcctttattttcctttcactgaggaagaaaaataaaggagcggaactggtaatattgcttgcaactaaattggattttccaccagagaaagctgtttagaaaaagctattctaaaaaagcaaaatagtactcacaaaagggtattaatgaatccaaccaggaggaaaaagcctccaacaatacaaagctttccaaaacctctttcaggactgaaagccaaaaggatgctttgaactctctgtctttgcagaaaccatctcacctacaaaccgagtatgagatagagttcaaattttagaataagaactcttaattcaaactacaagtcttaactgacgattcaagaggagagactgcagcagctctgggtttcgaaggaaaccgatacatcctgccctcaaactgtgaggcactataggagcaagatgtaaaggatgcagtgcctttgcgctcccacctccgccaccgtgggtgtcataatacagaggtgaaagttcaacatgcgacaggtagggatgcagcagactctgtggctttatactgcataggtctttcactgcttggtcacagaatttctttgaatcctatttgtttatacactgatatttatgtaataacaaaagagtaagtaaagagcaaggaaacagccaagaaaccctgagcaaatttttttccccctaagaataaaggagttgagttaggctatcttcccggagcttctctttatcgctagatgcagtcagctggaaacatatgcctgctaattgctgaatgtgtgcctcatggagcaacggtgcagttgtcgaacgacctcggggaaacaagtctaggcctatttgtgcatttctttctttcaccatgggactcaagtgcttcgccaggccactattaggacagtggaaaatcaaggtggaaggctctgatgaaatcaattatcactaagttattttcactggtgaaggggtttcctcacaggggtttaatagtaaattattctttccatgggatgtgctagattaatggaggaaacaaagcaaacaaatgttgcctggtaagactaagaggagggtcccaaaatactaatatttactgcccatgaagagatagccacattcacaagaaaataaatgtaaacctacaattccagaggcgaaaaggaaaaagaaatgctaaatggcagttatttcctcagtgttatacattacacatatcaataaaccctagagtcccatactatacatgccatatggatagataaatggcatatgtggtaatagtctttcaaactggatgatagtactttgcacaagtcagggatgcagcaattgtttgaaaatagggaaaataaccattttctagcattacctagtgaaatgtaagtgtgggtacagtttgggagaatctgtatagtatttatttttatcctagcaaactatactttacctttctggtagaattttaactttggatattttacaaatatcatatatagtcttggtaacatcttttatttaaaatcacaaatattagttggatagatgtgttaagggagatttaccagactgcatacacaaaggaggccatcagacatgggcatctgaattgatataggttacaccacaccgtagttaaagaccaaatatctgccagtgttcccaataaggaaagataactaagataaaagaatgtctcttgcagaattaagaccttgggattcttttaaagcctgggtttacatcctttgctcagaagagaaagacacattatttcaatatattttcattcattcttaggcattaactgtcttaataaaggcagtgcttctcacttaaaaaataaatttagctttaacaaagtaagtgtaaacgtgaccctaattttcactctgctgtcctttcttccctgttgtgcttattagctgctgctctttgaccttgaacagtaatcctttgagcatgcctccttccaccatcaagaggaggttccctacggtctggtagtatttctatcatagttgttgacatgccagggaaaataatttcctttggacactataacccttctcgaaaccagctccttcaaacaactcacctaattgaacgtgaaagacatgaaaccactggtgtcagaaattaaatataggtgtttctttgttttctttggcatttcttctatttactttctgtcatctatgccataggatttagaaaggaaagctatggaaataggcaccatcaactagaactcaaagagagaattttgtatgaggaacacagtccaccagcagaaatagaatagtgttggatatactcttcaacatgcttttttttttttcaggatcaatgttgatggactgtattgaaaacaaaagggtaattcttctatggagttgtcttgcaaaattctattctagggttttgtctttgtcctttgtaagcacaaagcaaatgagaaaacaagtatatggtattttgatcaaaatatatctgccattaaacctaaggttccggagctccatggtatctggaagatgctttagagggtaggtagcctgaaggtgctgcggtgccatcaaagggcaatgaacatctgttgccccatagcccctttcctcctcctccagcaacaaccctgacatcatttgggaattcaatcatctcctcctctcagtctataaggtcgcagtagaattccatccttagacatgaagaatgtgcctcaggccaagctaagaggcacatcttactcccctatgcccctacccccctacccccctacccatagagatttgctgtgggatagacacatgacctaatccattctaatcagggtgactctcaggatgtctacaggagctataatgaaagagttgtaatgtctacagcagaaataatgtcttctgctggagcttctgcagccatcctgccaccactggttaggctggataaaaggcaaacctttaagccttttttttttttttttttttttttggtgaccaagttttgctacttgttgcccaggctggagtgcagtggcgcaatctcagctcactgcaacctctgcctctggggttcaagtgattctcctgcctcagccttcctgagtagctaggattacaggcatgcgccccccacgcccggctcattttgtatttttagtagagatggggtttctccatattggtcaggctggtctcgagctcctgacctcaggtggtccacccaccttggcctcccaaagtgctgggattacaggcatgagccactgtgcccggcctgcctttaagcatttaatgggatgttaggaatacggtactgtaatttctccttgggtataaaatatattggagtcaatcactgttgcccctaccctagtggggatatggcaatgatctcaccccataaggcaaacactagaaatttatgcttcagaattccatctggctttggttactttttgatacttatgattattatttttatttgaaacagaggctcactatgttttccaggctggacttgcattctttagtctcaggtgattctcccacctcagtctcgaaagtcgctgagactataggtgtgcaccttaattattttaagaaaagaatgtaatggctgggtgcagtcgctcacacctgcaatcccagaactttaggaggctgaggcgggcagaccgcctgagctcaggagttcgagaccagcctggccaacatggtgaaaccccttctctattaaaaagataaaaacttagccaagcatggtggcgcatgcctgtagtcccagctacttgggaggctgaggtaggagaattgcttgaacccaggaggcagaggttgcagtgagccgagattgtgccactgcactacagcctgggtgacagagctagactccgcctcaaaaaaaaaaaaaggatttaatttttaaaaatcagcatgaactgaaatttacttcacaatggaattaaagacccccaacaagtcataatatgcttatatggcaatatcacattgtttgtgtgagttataaagttggatggatttgcactggcatcttttcacggttttagtgagagaatcatgcatcatccaaggaactctgatgtaaaagactggacatgagaattattacagctttgaaattctgtcaatttcctacccatttagtcagatttaagaacagtatgaacctatcttacccaaaaaaataggttctaaagtcagtacataaattatataatcatgtgatatgactttatcatatcagtttacattcctgaatataatatggtccaatatcttcaaaacatatcaagactctgatcacttcttaccattcacaccattatcatcaagttgaaaccaccatcacctgttttctgagttacttccaaagcctcctaatcagtccaaacttagtcccatgcaatgtattcttcaaagaaccagtaaattcttttaaaaaataaataaacagatgagatcacagcactacttaacacctctaacgtcctcccattgcaaaatctgtaccgtgacttacaaggtcttctcgatttgatttgccccatccctatccatctaatcccaattcctaccactctccctctctctcacaaagcttcagccccactgtctttcttgctgttccttcaacattccaagatctttctctcctcgggggctttaaaccttcctacctctgcctgcaattgttttcctcttaatacttccaaggtctcccttttgaatccattcagtttactgcaccaatctcatatcttcaaaaagtttttcctagacctcctaacaaaaataaggcccctttcctaatactcactatccccttattttcctcctagcacctgcaactatataatttccctgttgacatgctgattatccatcttatccactgaaatataatccctatgggcacaagtacttttgtttatttgctgctgaatcatagcatcaagcatagagcctggcacctataaattgctctataaatttctggtgaataaatgaatcaatcaataaatgaatcttccaacaacatgatgcaacacagaccaacgttcagatcctacaaggtctaataatgtggctaaaggggcacctgttcttggttccctttggtgaaaacctgataatcaatgaatggcaagcatatttacatatttaaaagtttgcctgcaaggtaatcttaccttgaggctgtgtaataggagtaagtatctattagctcgtaggaagcacatgcacacatgtatgtacacacataaactactctgatctctcatgtcttcaacaacttgactacatttttacctgaaaaaattattgtagctattactaatgtgatgcactaaccagagagcagaaacaaattgagttgtttgtttctccaggagggaaagcaggccgcagctacttccagaaggtcaagagatcagggtatgaatacctaagacatgtgtgtgtatatttctgccacagggagttttcacacaatacacaaatggaggatcaactaacaggctgccagtcaaggggagattcaagaagtttcaaagaaatgctctgaaccccaaaataacaaaggaaaacatgttttgaaaagtacacaaagacagttctcttaaaaatctgccaggactccttgccaaaatggcatgttacacatccccttctctataacctataccatctgggctttccgtaccccaccagcagggtgtaagaatgcctattcatttgcacccctgcccatataagttattataactttttaaaaatcattcccaaacctgtaggttaaaacatgatgtctccctgctttaatttggaggtctctaagttgcttacggtacaacctcaggatccattcatgctcattttgtagctacaaaagaaaaagctctaaaggaaggccaagtgaaatcctggacatgcagtgtgatgaagaaataagggctgctgcttaaccaagagtcaactcaagcagtctctgtgaagttctttctcactgcctctgtttattttcctcctcagccaacacacgactaacagcagcatcttgaatttgcgttacaatttaccaagcacctttattttcctcaatgatcttcataaaaattctgtactatggataagatgactctgttttccagatgcagatccagaaaatggactttccctcagtgtctccagttattaagtagtaaaacccagactagaacctgtgttttctcatggcctcttcaaagttctttctacgatggcatagttccttaagataaaccgagtgaaagaaaggtaactttcactcacaattcaccagaaaaaaaaaaaaaaaaaaaaaagaggaggtgggggagaaagaggtgctacactcagctgagcccacctgtttggtttctgttagctttgaccaaagtgccagtcattacactaaaattctattttgaggtttatcatgaatattggtttctacaaaattcttcattaattaatgctagaaaacacagctctcagtcaattgccatggggcacaatacccaggcactgcttttctttgttcttcccagtcttagggacaccaatccagatagaattacgtccaaaagtagcctaaggccacgtttatgaaataaaaacaccaaggacacaggctgattttagggcaaattttaggtctggcattttatcattctgctctagatctaggggttaaactctactgaaataactatggttgcttttggtggaaacccccttccccaggcccttccagccctggccaggattcaatcatccattcaacagctattcactacacattcacattgtgctaggtgctgggcatacaatgaagaacaagatagacactgcttttgttctttagagatgacatactagtaagagagacacactaaaaacaagtaaacaaacaaagttatgattgactataagtgtaatactctaaaggaaacaaacaggggcactaatggagaataacgaaggcaccttctttgtttagggtggccaagcaaggcctccctggaaagtaagttagtaacagaactgccattaacccacttaggcctagtgttccattactggaatgccaagcatgtgggagttatccatatcctactgctcaaagtcatcgccaaggtctgatttttcactcatgcaaaaattcaaaaaattacaacctccggcatatatgagtcaataagcattccttccttgacctacacatgcttcaatccatattattttccttagtaggtggctgatgaacaggtcaaaaaccaaacaggccatggtagggatggcatcaggcataccgaaaaattctgctttagaaatcagtcatgaaaggtcattccagtttaaattacaatcaacatatagaagctagaaactccaatcagggcaaaaatggcctctttatatcccatcaaggaatcatttatctaagatgacaagaggtatattgccaacaaatccacaattctgtttccaattaatgcaaacttataatattccaagctgttattagatttcaattaataacctgtgatgcctcattaatgcaaatatgctcttcgtggtgctaaaccttcattagtgaaatgggtccaatgacatgacggtttcatatgataatggaactatgattaaaaggcacaattaatcattttcttctactacataatctctgtgacagtttacttatgcctatatgaagcatttgtttcttgcaaacagtcaatttatatttaaactattcaatagcagaaagaaaagcagaaatatcatactaaattatctctaatagttgcaaagaatcccagcaccaagttaggttgttcaagaataaggaccaggcacgatggctcacatacacctgtaatccgagcatcttgggaggccaaggtgagaggatcacttgagcctaagagtttgagaccactctgggcaacatagtgagatcccagttttacaaaaaaaaattagccaggcatgcacctgtactctcagctactcgggagactgaggtgggaggaccacctgagcccaggaggtcgaggctgcataagccatgatcatgccactgcactacagcctgggtgacagagtcaaaaaaaaaaaaaaaaaagtcacagagctggtgccattctccattaagagcataaagtgtgaaacagaaaatctcagtcacacggctgtcagtgctttttctttctcttgtctgtgtactttccattctttgaaccctgaattgctccaccagcaggttcaagccagcaacagatcctgaaccaaacacagcaaaaacaggacactattcccacccctcattttctccccaactaccccacgcagcaaagtctgacttgaagcgaagctgcctggaacagtccattactactacctgcccagtgtccttccccaattctgacaataacactgttttgcctttgcagaactgcccatctctcatatccatgtgggcctggttgggtggtcaattgcaactcttccctcaagcagccagagagagggtcagaagcaaggctgggccatcaaataccccaatactcagcacagtgattgatccaggaatgggctcctgaatccagcagtctcctgggttttttttctgacattcatttactgctaataaagaataccacgttgactccatgcgttagctttgtttgctgtttgtgatttgtggagaatcgcagaagtgaaaagtaacaaacacatgtcaagggccatccaccccactccaacctccacctcaaccgtcacccaagtaaagtccagctcctttagactccctctctctcagtccccagtgttacttattgccaagagacataaagcgtgcaaaagccacacacttctccttctaaagtaaatatagttttaaaaatctattgagatttcattttaattgttgcttagtaaccattgcaagattggaactgtttcctagcttaaaaaataacactataaaaaagatcatttagggccgggtgtgggggctcatgcctgtaatcccagcactttgggaggcccaggctggaggatcatgacgtcaggagttggagaccagcccgaccaacatggtgaaaccccttctctactaaaaatacaaaaattagcagggcgtggtgatgctcctgtaatcccagctactcaggaggctgaggcaggagagttgcttgaacccgggaggcagaggttgcagtgagccgagattgtgccactgcactccagcctgggtgacagagtgagactctgtctcaaaaaaaaaaaaaaattagatatttaaaattaagctgtctaattgttttaaaactcagatgttatagtagctttgcatcggagatacaatcctaaaaaatttaaaacaaaacaaaatgactgggtgcagcggttcacacctggaatcccagcactttgggaggccaaggcggaagaatcactagagcccaggagttcaagaacaacctaggcaacatagtgagatcttgtctctataaaaatttttttttaaattagccggccataatggtgagcacctgtagtcccatctactcaggaggctgaggtgagaggattacttgagcctaagaagttgaggctgcagtgagccatgattgcaccactgactttcacctgggcaatggagtgagaccctgtctcaaaaataaataagtataaagcaaaatgtttgaggattttatttcaataatgccaatctattcctcttcaacgttttgatctaatgtatgaattgtgactctgtcctcttggcaacaaaagtaatgctgggtcttaatcaatgtgcattagtatgctagcaaaatgatacttcttccatatgtagttatatattaaatatatataaaatagaagtgttagatacgactcttatgattaagatatatctttatttaaataactatcccttactggaaaataaatatggatttatacatttttgattaataaatcaatactcatttataatctgatttataaatattttttatttataaacatttattgatttattaagtgcacatgatgtaataatggtttcagtgcctctgccaacaatcactggctgctaagagttgctagagtaatggattgaaaaatgcaaaagggcctgaaagcatggtacgaaagaccacagtgaatgatcggttatgtcggccaaggatgtgggactcagaaatggtagcaggcacatcaagagctttttttaaatctaccgcaacgtggaaaagtccagttgttctaccagtaggtgcttcacctttgtgaagtcacaattctctggctggctgtctactcatctttaaaatgagagttttgattagatgacctcttatgtcccttctagtttgaatattctatgatattctgaaaaaaaataataataatagctcttgtattagcatcccaagcagtctggtgtgggactagctaaatacaggcagcagtgagcttcgaggtgaaagctctgaggaaaaggcagagtagaagaagcaaactttcactgagctgtttagcctggagaatgatacctaaaaagcaaattaccctgtaagaggacttgggaggaaagtgcacagtgaataagtccatcatcttctcccatatattttcaaaaattattcctggaattatgttgcaaaggagtctcaggatgtttgcagccacaggaactggaaactatttcacaaaataggaagtgtagagatcgggcagattcagtgacctcacaatgttatgggtgaccccagatcttctgagctttttgctttagtgaccttgtgaagactttgtcttcaggctagttccctgaatggtgatgagatggctgcatgtagcaattggtgctctttgcttccttgttcggttcctgaaagagactagttgttcttccttagaagcatgagcaaagttctccttaccactatgtggtccaaattggttcctaccagctcatctttgaatctttggcaagacagatggaagtattctgataaggaacaaaagaagaaaaaagcaaacccttgacatctggaaactactcaacacatatagctgggcctcactgttagaaactaacctggcactcatagccaggccacattattatcctgctgggcataaacaatgtcacagaacataaacagctcaagaaaacccactctgagaccatgataaagtaagacaaaacaagactatttcataatttctctctcttttttttttttgagacagaatctctgcccagtctggagtgcaatggcgcaatctctgtgcactgcaacctccgcttccagggttcaaacaattctcctgcctcagcctcctgagtaactaggattacaggcacctgccaccaggcctagctaatttttgtatttttagtagagatggggtttcaccatgttggccaggctggtctcaaactcctgacctcagatgatccgcccgcctctgccttgcaaagtgctgggattacaggcgtaagccaccgcgcccggcctcatactttctctaagcgcagacaaagaaaaggtcactgcacaactcctgagataccaaacatccccgtccattagctactaagagtgactgctacttcattatgaaaaacaggtttagcctcactttagactgtcttccctttagagatgtgagatatccaatcataaaattatccccactttgtgacagcaccctatgcagaatgaatctccctcccttccttagactctcccccaaatcacccaaatgaactccaaattcgttctaacaccctcttactgagatatgctatggttctctgtggtatgtgttctccctcactgcaatgagcaaagaacccaacttcacctccaagtgtgttcctggaggtctctagctagagggcattaattctgattttatactaatgtttgctaacctttttcattattaccccccaaggagcctctttagacttttttttctaatcatcccccaccatttaattccacagatatactgtatatgtttgaggggagggggtttgaaagagggtctcactttgttgcccaggcgggagtgcagtaacccgatcatggctctctgcagcctcaacctcctgggctcagatgatcctcctgcctcagccctccaactagctgagactacaggtgcctgccaccacacccagctaatttttgtatttttagcagagacagggttttgccatgttacccaggctggtctcaaactcctaggctcaaaggatccacccaccttggtctcccaaagtgctggaattataggtgtgggccataatgcccagccgatgtgtgttttttatatagaaagggtaagattctctcccccatacatatcctcacaagccaattttcgtatggtttaaattaaattataagggggtagaaaggaagttgaagagtctaccacaatacgttaaaaagcacacaccttcttagcaatctacctttttagtacagtaatagtaacactcaatgctttttagcactttccacacaccaggcattgcttttatacatctattaattttacacagattaaataattttatccatccaaaaaatctacatggtagatgctagaattatccccagttcaaagctgaggaaactgaaggacaaatgagccaagtgtcatgccccaagtcactaggttaataaatggtggagacaccaaataactgccctctaactccagggaacatgctcataaccatgaggacacattgcctcacactcaacagcggctccagaaacactccgctcaatgcgtgcacaaatgagcaaacgagagtcataatttgcatgatactacactgccttgttccaaatacaaacaaggcagtaaaaattacggacataggataagacttaaaactaagatgtctgctatacagagaaacatattgacggaaatctttcggggcaaatttttaaagtctgtgctgcatgactcaaatgtttcagaaaactaatcccattctgtgcttatgtgtgtgtgtgtgtgtgtctgtgtgtctgtgtgtctgtgtgtgtatgtttacaaggtggaaaatgccttggttaagaaagggaggaagagagggaagaggaaaaggtagtatgttttcccctaaaaattagagattccgaagtgatgatgacatcctccaaccgctagatggaacgcagttctcccacaccatggccatgactgctcatttgaacttgctgcttcatggtcataaggccaggacttcctggcttcctcatgagccaccacattttccatatttttagagcattcttcctacagaagaaacctattttgcattgtttttacaactatcttttttgttgttgttctaatgttgccaaggaatcaagaacctcaaaacctatcttcttctgaggtcaagccatccactcacaggacttctcaagctggagcccttagttgagctgattttacacaatcgagtagagaaagaaaatggctttttgtggtgagcatctgctgttttgttaaaaatgtggttaaagacattaacaaaagtgacattaccagctgttgtaatgtcaagcagcttagctaaactgttttttatcaaatgacaacatatgacacccaaatcaattccaaaccaataacacattgttacttgtaaaacagagctgaatgagagtgagaatgagagcatgtgtgtgagtgtgacagagagagagagagagagagaggttaattaaaatacaaattcaaatttctcctgaagtaggaacaacagacaatatgatcctgataattttcattaagaaatttttaactttatcccagacaaagcaaaaaaaaaagacgattatgcaatccatattcttacacaagaaacagtgtatttcttttgtaaaattcttgtaatagcaaaaagatatgacggagtttctggccacttaaaatctgacttggcttctgtccttcagccatatacctcctaacgagtatgacaataacagaagaactgacttgtgtggctatgtttggtctctctatttttatctgcccatcatgtttaattatcaggctattaaaaggtggcaaatcggtagcattgccaactgcgttgtccctatggctgaaaagcctgtggcagttgaaacaaccaaacccttcccatgggcatcacgaagcttgtaaaagcaaaacggcacaacgtctgcctgcctgccatagtcatggccaatcctgaataaatgtttaatttccacaactgtgatgagggtagggcctgatttgtgccagtgcttaggaatctccgggtatttcatgtgcacaattattaatagtgtaattcacaaatgccaagtctacccttaaggcctgagctcagtcctgctctgctagagttggtgtgacttagtcatcaagaaagaagacactttcaagggcatgattcctcctggaagaaaaacaaaggagtgtgcttaggggataggacgcttgccaggaacagaaggtatgctgcacatggagagtgtttcgaggtaggtaactcaggagggacctgcatttgggggaaaaaaaaacccagaaccaacagaagcagcagaaataaacaagcaggtgtgtgcctctatgtctactacatgaaaggaaaacagggctgaaagtcacaatcagcatatggagacacacaaagaggggcacctgggaaaatcaatgtgcatcaggctcgatggtgcctgcttcctccaggagctcactgcattatcacaggtggataaagtcaccccttcaatgggcacaagtagatcactcttctctgctgagattggattaaaggcgacactgatgctaacagcaagaagaaggtaaaccggacgttggaaagaattttcaacagcaaagccacagtacaggacagatcaccaggagaaatgtatggggaaatgttagaaaagtatggaaagccctagaaatttcaaaagtccagctctgtgaggagacagaggaaggggcagaatgacctgaaaggccattctagtgctattactatacataggaaagcttccttgagggcattacgttttaggtttccaataaaggagagaccattttcaatattttttaaaattttgttgtgtcattttataataacttccaatgtagatcttttaattttactcttgcaataaacctgtacattttctatagtcacctgcctatttaagtcctttattacagaagaggtagaatataggccaaatgccagaagtaagggtcggttacaaattctcaagtgcttgtttatttctggattactttattgactcatttatgtaaccaatgagatcgtgcagtccagcctcagtttccctaaatatttagaaaacaggttgaccatgggatcatagtagtggggcatctggttttcttctgatagtgctatttgttaaatattctgtattatcagatgccctactgtgtgcctgtatatagacttcatcttattctaatgctaactttatgaaatgcatttcatttttaccttctttatagatgagaaactcgctagcaatcacaattaatatgaggagaagttaaaattggaacccatgactgatttcagagccaacattttttagtcactacgctatactcctacctataaacttctaaaaacactgttcacaagtacatcattcccctatggcttccctggatattgagagacctggattataattggaatttttgactaaggtaaacatttcaaccacaagacctgatagaatctttcctatgagaattggtctcaggcttacaacaaaactagcaagttcttccagagtacagagcacccctgtttgaggcaagacccagaactttaaaaaattctaacaaaggtcctagtttctcacacagagctcttggttttggataagacgactttagcctaggctggactgaagacatgaggggaagttctgcaaaagacattgtgcacacattatctctttcactgccctatggcccgtaagatgttcctaacctggaaactgagaactgcacaggtcaagtaaggtgtccaaactcacccaggtcctaagaaacagagcacagattcaagcccagttgtatctgcctccaaaatgagtgctcttttctgttacaatacatgctactatgtcacctccaaaggtaggtaggtactacctttacccacacgcgtgttcttgaactccccttacatctcacctaatgtgaaaagcctgcatgaccccctgggacatataaggccctgggtagtccacaaccaccacccctccacgtacacatcagccccctttcttcctgttaactgccacagaagcctccttctgttcctccaaggccccctgtgctttcctttgtacatgtggttcccctgtcaagaaaactgttccctacccatctctgccaccttgctgactcctgctcacccttcagacctccctggaggaagcctctccagcatccctggccaggccagatttctatggtttacagcagagtttctcaccctcaacactgttcacatttggggccgggtgattctttgttgtggggtctgcaccgagcatcatggaaagtttagcagcattcactagatgctggtagcacctacccctcagttctgacaaccagaaatgcctccagacgttgccagaagtccctagaggacaaaatcactcctagttgggaaacactgatctattgctctttagaatcactttccttatcttcagagcactggctccagagcacaggatgtgcttctgtcattctttgaccatctcctccacgtgaaaatgagtttcttaaaggcagagacagtgctggcttctgctcaccctcaaatgtccagtgttcaggggcatgcctggctcaaagcaggattccaacaaaaacattttttttggaatttctccctaaaaaaggtttggtgggagatcataaacttaagtaggtagctagtggaagactgctgaagcttttttgaataaaaaataatgccagcagagttcaggtcaggggaaatgaatccctggcaggatggacattaaccaaacacctaacacatcagcagaactttctgccaaaggtgttgagaggttatcagcagcccccacagcacaaacaggtgtcagaatgacatcccaccaaaatggcagcagggccctaattaaaagaagaggctgttctttcaagtattgccatgcagccatggcactgctgggatgtgtcaaatcacacccatctaaaaacacacaccacgacctgacatctttgcccagctgcaccatcccacgtttccgtgatggatattagaaaataatgtaacctcaactgacaagtttattaagacacagaagacattacagaggcccttttgacattccaatctctaacgcagtcagggggagatgctgacttgccatcattattgaaagtaattggtcaaaaaaaaaaaataaaagaggtgagagagaaggagagcaatcctataaagctgtcaggttaattatttggcctacaggtgtgctcagtgctcttgatctgcctaccactgggcttgccagtgctttgccagtgttttctccaccctcactcctagtttgggatagttcaatctaaagctaagagagtacatttaaagcagaattttaccttggccaagttatttccttgcctaattatacctacgtaccagtccaaatctccattcttccctatggctctgtcctgttggcataccaaactccaattttccaggacagataacccagttagaaacaaccgacttgtgtgaaatgccacagagagtcacaacgcaaaaacaagttttattcagattgaatttaatttcctaggcagtttagatcacagatccgaaacccagacattttcacaagccaggcaaataacctgaatgagtccagtgagtcagatgggagccaaaaggaagtgatgaggatgatgacaaacaggaacagcaggctgtgagctcagtgttagcagagaaaacccaccgtgccagggaagctgctgatgctactccctggctctaggtccaccacacgcagagtagatgctcaattaatattcagtgaatgaatgaatgcctgcccaagcattcaccctgttgtttccatgtctgttatttccaccagaagaatgttttgtaggcttaaatctccagtgccttcagcgcaactgtcatttggaaagtggtgaactttaggaattaaagaatggaaacaaagagtacatgggagtcactaatgcatgtgggagatactattcatgccacttccaagaatggggaatccgtacagctcattgtcataagtgatgttatttccaacttgttatgggtgagcattatttagaatagcttggaagaccacaatattttgcaatagacatggtagcctgtcagggatacaaaatgaagactaagactaagaatgtcaaatgagattataaagatacctatctttgctcaaataagcaaagggaaaaagtacaccctctgcctcttctcctctccttaaattccttttccccttactctctcaaggagtaaatatatatgctcatatataccaacataaaaaggacattggtagaagcaaacaatacagaagagtataacgggaaaaatacaggtcccactactgagaggtgtcctcggtgaacaatttcagggctgtgtgtgtatatttacgtgtgaaacataaataggatcgtgataccttacagcaacttctgtttttttcaccggacatctatggcatttttttatacttacaaaaatgcctcctttgctctttttatctactgttccataaaaactcactttataaacacaaaaggccaatttttctcacattcatcaaggaaaggctcctgtaatattgtgctcttttttctacctccaatattatgtttaagcaaatcatgagaatcaattaaaaagtggctaacattggcttgtttctactgtaaggactgtttttccataatttgggcttgaaaaaaaatagggttgtcaaagcatgaggtaagtagaagagaagcattaaccaggggtgttaggaacaggaaatgtatttttgaggaaggttttggaagaggagttatgcatccaaagggttcagaattatgggccaactattcctatgtacaaattgaagacattatataaacactacaagaactgaatgcatactcatctttggctgctatttcaaacttccagggacaaatatttgtccttattataaacatacatccaatatgtgttaagtgctcagaacatgtcaagcagtgtgctaagcagtacccatgtactatctcacttaattctcagattcaccctgaaagtaaggtactattattatctccagtggaaagatgaaggaattcaggcttaaggctacacaaagattagtgagacagcaaagatgaatcccagcaatctatctccagaacttggaccctatgaccttcacattatacgtttaaaaatgtcacagacagatggacacataaaactgtgttgctttcatgtcctgggtttctcttctaaaagcaaagcatatttttgttttctctttccctaactagatttccattttctttggtgagcttaagggagtgccctgccaccttaataccaaatattatatctagggtgagaaggagagaataggaagagcaagcagcaagggccttcagaaactatttgtacttgcctcccaagatagggcagcttgaccttatccatgtggctgacagtccagttgctctagtcatgcacctgtgagactactttctgctccctaaatatgccaaacacacaccatgctttgcatgggaactctcccacccctcgacactacccagttattcacatgaaggagtcttcactttcatcagatttctgctcaaagactgtctttcccccctttctaagagttctgcctcattaacctcttatcctataatctgttttgtgttatttttggtacttgtggaaataaagtgccatacacagtcaagtgttttgtgaatgtcaccatcactttaagcctcatagatatcccacttctggaacaatagaagtatgatgcttgataactatttgttgactaaaataatacattgcatactacttgaaacacacctcttattctagtaggaattatctaatcaaagtttgtgcatgtatgtaaatatatccatatatacacatgcatatgtgtacacacacacacatatttgcattttgcagtttagactcttaattaccaatagaggaaactcagtaagtagcatgatagaaatgcaactagtataaaccaactgaattacaaacacaggacttagaggataactgggcattgcaataattgtgaaggaagatgcttagtgaatgattagagggcaactatgttctgatatctgtgaatgaactgcacagtcttcattaatttcacagaaaattcatttttgtcctgttgcctatcctgccatgaaagtggagaattgctcagaatctagctttagataataacatttgtaaaaaattaaaatttgtggcagggcgtagtggctcatgcctgtaatcccagcactttgggaggctaaggcagatcagttgagctcaggaatttgaaaccagcctgggcatcacagtgagacctcacctctacagacaaaaagcaaaattagccaggtgtagtggtatgcgcctgtagtcccagctttttggagggggaagatgggctgagcctgagaggttgagaactcagtgagccgtgatcacaccagtgcactccagcctgggtaagagagtgagaccctgtctcaataagtaagtaaataataaacaaatttgttatcaacttgtcctgagttgatcaagttgctatagttaactatgaatttatttctgattttgatgttcatagttgcagaaactccaaaaactcctagtcagtacacagacggaggcctggcaataaacacttgaaagaattgcctgttggatgaatgaatgaaacaagagaccgacagacttcatccctccagagagatatcttctactgcttctctatgattgttaggccgatgtaattaatctaacacatggagcagattttacccttcattttcaagtacattgtctattaacagcgtccatgagccctctgattatgcaaggttcctgttaatggatctctgccaataccaaccatcaagctaatgatctgagcttgccagctccaaggtgaaggaccactcttgggcatatctctccaggactcaaagaagaatcccctctccaaatgatcttggagaagcaggtgtccactctgcctgccagaggctctgccagcacagggtgggggcatcaagggaggagaaaataaaacccagtaattcatatgggttgagattattgacttcactttcaaagaagataaagtgaaaaaggaagaaccgtgtttttgaaaggtaagacaggggacattatcctgcgtttcatcaagtcagctttttcatgtcaggcgatggtatatctcctgtaacttgtcaatggcaccacacagtgaagctaaaaggttgaagattatttttgtaacgattgatactctttctgccacagcagtcaagcatctgaagattcttcctttctctcctctgctctggtgaatccttttaaagttcttgggtgaaagagctgcaaaccccagcagatatcaaacctgaaacactaacttgacatatcgggatgtgtgctgctatattcactgcttggcttcaggccccttccagagcacttgaaatacagttggaggattctttgaatatggggtaaaagtacgtggatgacctagattgtcaaaggattctcttcaaccaaataagaaagtaagtttgggtcagcacatgctatcagctagaaagactgctcaaaattgtgtgtgccaaaataatgaaagaacgtgccaatacgtcaatccacgtttgtttcctgcccccgttcctgccacttcacagctctaaatagaaacacacgaagagaaattccaatgaaacaaaaggaatatctgaaggatctcacagctttcaggggtactgtaataccctgaaaacagtgtggttattccgggctccacaaactaggtagaaataaacatccatcattgcatagggcaggaagaacagcaaaagcatgttggctaatttataaatgtcacatacagtgttctttgtttcattgcatagggaggcaacgtaatgaaaacattaaaaaccatcttttggtgataattgttgttttaaactgacaaattatataagtcaaagtgaaataatctttgcaactccatagagaaacagaaaactattaaggcccttagaaacatcacaacccatgttcccctttcaaaggttagaataatcctgagtatattttgggaaagtaatatcctaagtcagtaaaaggtcagtgacagggaagattcttccacatcttcaggagacaaaaagtcccctggagaagagaaaccaggttccctggtgacattccgcagaaatctccagctgttagaagaacttggatctccgaggccacccaaacttcaacttaagaatgcaacaaagtggggatgaaacagttcccgggagggaggaggtagaataaaaatggaagcaaagctaccctacagcactaatctgtaaacctgcttcaattggcaagaaaaagaggaagtactacacatgcctgaaatgacaatgtagcacatggaatggacctctgctgttttcgatgatccagcattcctcctgattttcctttgggagaatcatttttcacctactcacagttcacatgattggagaaggcgccttctgggtacaggcatataactaaactgaataatccattccctgacttcatctttcctgtgcgagttggtccaaggacttttgttgaaaccactggaagagagtggctttcttgacagcaggttaataagatggatggaggtaatcaggttggcaagtggctgggcaactgtccttatcaccatacaaaggaaatcttccagagaacaaaggaatcacagaaggaagtggatgtgaaagacagccagagattcccaacaatatatgattctgtaaatccaaccatgaatgaagcttggtatccccactatttgagccaataactcctcctgttggctgaagttactttgacatgcattcttatcacttgcaactgataatccatcccacgtgagtataaatgtgaagaaatcattctaagtacatccaccttaccaaatggaccatgttttgctcaccagtgtgaccccagcacttaggacaagagatgatgtgagaagacttcaaattattgttcaataatttttttaatgattatttgttaactcatgaattatcttccatattcatatcttttaaaaatgaaagaaaatcaaagcaggtttctcctttctgtctaaatcctagcaagatcaaacactggggaaaaaaataacattctcccatatctatctgaccccagaaaaattattacttccaaatagtatttagtttttggcagttatttatgaacaggtaatctatataatttaatagataaacctatttaattatctattttttctcccacaaacaggaagaccagtgtcaaaatattgagcaactctcctaagaacaaggcatgcaatctcaaattcctggttttcagaaaaggttaattggacaagcaaaaacaaggagccaacttattggggagaactggaggcctaggaaaaagaaaaggcccaactttctatccccaacagacactttgggaactgataaaattaaacatttttcaaagaccctccatttcctattaccacaagaaagtcaaaatatttctatcttttaatttaactttatcttgcttttctttttgaaattttaatttagggcaatatttctgagggatgctatttttttttaaataccttctttccttcagctaatgtaaaacaaatagttactcctggaaattactttttactattggttccaaagctacaatttgcagcaaataaaaggactcttcccttctacagaaacattcagacaactacatattgagaggaaggtttatgtgtacttggagcctttgggtgatgttctctttggccatatgatgtggtactcccatcagcctgccatttagtgactcctatcaaagcaaacctctctaaaaacagacacttcaaagaagatgactaattgtgggtgccaactggatgctgaattgctgaatttctgaatggtttccatctcattttccaaagaaaatgtaaaatttcagagtaaaattgccacttttcttttttcacgatgtagtatttggtggcttttaaattcacagccttctattcttggaattttttaaattttaaattaactttccttccttcattccacattcatgcattcatttagtcattcattcattcgtttttttggagacaggatcctgtcctgtatacagcccaggctggaatgcagaggcatcattacagttcactgtagcctcgaacttctgggctcaagcaatcctcttgcctcagcctcccaaatagttaggattataaccatgtgccaccctgcccagctattttttttttataaatgggatctcactatgttgcccagatttgtatcatactactggcctcagtgatccctcttgacccctcagatcattaaacatttattaaatgcctttcacgtatcaggtagtgaaccaatgctgagaacataatcatgaacaaaaatccaaacagccccagtttttacagaatatccagattagtaggggagacaggtattattcaaacaagcacataagtttcttaatacaacaaaaggcgcatggctcttcaaatacaagtaacagaggaatgaaactgagctcaggaagtcaggagagctagttaagggagtgaaaatacgagttgagagccaggtagtaaataggcctagaagaagtatgggttttttgtttgtttgtttgtttgtttgctttgagatggactttcattcttgttgcccaggctgcagtgcaatggcacaatctcagctcactgcaacctccatctcccaggtttgagtgattctcctgcctcagcaccccgagtagctgggattacaggcatgcaccaccacgcctggctaattttgtattttttttttttttttagtagacatggagtttctccatgttagtcaggctggtctcgaactcccaacctcaggtgatccgcctgccttggcctcccaaagtgctgggattaaaggcgtgagccactgcaccaggactgaagtgtgttttgttagaataagagaaagaaagacgtgggataggggcagaaaaaatgttgggaaaacggaaagaacagcaggaacagagaccctgtagtggaaaaaacttagtatatgtgaggaactaaaaggcagccagggtggctggatactgagacaaggttggtgtgagatgggcagaggctcctccaagcaggactgtccaggctgttgcaggaaagaggtcttctgtctactagtaatagaaatgatccaatttactccattaaagaaacaaaactggatatattcaacacattttctctgtatctaacatttcagtagaagtgatataaagattgctaccacatattctgcttgcttcacctacatcttactgtatgatatgggtaacgaataaaacacattccccctatctccattctgtatgtatataccattattttatttcatcatggtatctgaaaagcaattataaatcatgattacagcagctgaaatttgctgaagacttactatgagcacggcattggaccaactactttctgtccatttccacactaaaatcagctacaaccttaaacagactgtcccatccaaagctagcctctcaggttgaaagatcatgatggattatgcagcagggacccaccattcccagactggtatcttagggtccagattccatccatcaggcacacctgggaagaaggcaacctcacttggccttctattcaccagtgaatctcaagtatctctaatgatacttgtggtagtgcagttttctgagtcagccaccctggtatgaattagactgggtaaagtgaatgttcatccatggatgcagctttccattttttagtggcttataaccaaggcatactgctcttaggagtttatttcagagaaaaaaagtatgaacagccaccatccttaaatgtacaaccttttctctgcaacagcttgtccttaaatccaggacacaggatgacaaatgggtttccctgccaggtcctgagaggtctgtgggaaggtgaggcctaggcaggagtggagatcaacgaagcatgaaatggtggatgtttccggggctgcagaattttggagaattcctcacgctgtctgctcaactggtctcagttctcagtggactctgtggggtcaggaggagccctttctctgggttttccctctttctccctcagcagagaaaatcgagaaaaggacattaaattcagtgcagtcactgtgggtgctaaaatattttcaggatcaatggtggtgctaaactatctccatgtttctaatatatatatatatatatatatatatatatatgtttttttttttttttgagatcgagtctcactctgtcgctaggctggagtgcagtggcgcgatcttggttcactgcaacctccgcctcctgggttcaagtgattctcctgcttcagcctcccgagtagctgggattgcaggcatctgccaccacgcccagctaatttttgtatttttagtagagacagtttcaccatgttggccaggatggtctccatctcttgacctcctgatccgcccgcctcagcctcccgaagtgctgggattacaggcgtgagccaccgtgcctggcctgtttctaatatttttaagactgaagtgctttttaaaaagaaaaaaaaatcttatggctacaccacaaaaatgcagtgtccttgggtaagggacccacccaagccccttggccttttactttccaggtatcatttttccctttgatagtactcttgtgtctgcaaaaaatgctctgtcttgatatgctcctggactgtaagattttgattgttttgttttatattttgtttatgtttatatgcatcttatatttccctgaaaactaattaacactgttggcctttctaactggaaaaaaagtctattatttttatactagtgttacaaaacagaagttcagagagaaaatataatttggccaaaatcacatggctaatgagaagtcaagttggaacctgattataaatctatttgctttcaaggtccatgcttttttttttcaagctcagataaatttcacataatataaaattaaccatttaaaataaaccactcagtggcatttattaatatcaattcataatattgcacaattatgtctatctagttccaaagcattttcatcatcctaaaataaaacgccatgcccactcagcagttatttcttattttctttttccccagcccctagaaatgaccaacgtgctttctgtctctatggatttacttattctggatatctcatataaatgcaatcatacatttgagtcactacagcagttaacacagtgcctggcacgtagtgaattttaaaaaatataggttgactgtgtgaacgaaaggataggggtggataatgattaaaccaccataaaatcctgagatattgttctaatatccactgcatgctctccacaaatgctccttcgaattttatcttctgtgacgatgacactatgtcaacctatccacagagcccagcagtgttaatgccgcatgttaataaaacacccctctttccccacagagctggatttttataaaatgaagctttagaatctagataaccaggacacagtacactgaatgtctactcctaatatgtttgcacaaagctaaactacacatattgctacctaaaatataaaactaatgtgagtgcctacagaggaaaatgtggaatgctgaatagggtgaaccccctgctattagcctggaaatgatgactctgttgtgaatctgtcctacagggtatctcagggtctgagataatagcataattatatatgctaactcttcctagttataatatcttggaagacaaaagatatagggtaggagggaagaaaagttaagccaaacaaaaagaaaagactaaattatttttactcaacataatgactctttgggaagtctaaatggcaatacgagcaaagttacaatgcatacttcagaaaggagaggtaagatagaagataaaagctgtgcacatttatacacatattctacaatggacaataaaatgagaaatgcacagtttttcagaagggcaacaagaacacctctacctcctctaaaaattaggatatcaccaacaaatcgttcaccaagttagaagctgaagcattttaaaactcaatgctattaacagcatacttgatataagcagaagacagtgggtttcattactgttaactaccctagtacaacccatagaaaccatgactcagtctgaagtagcacactctaatagaacttcctgtgataatagaactgttccagatctgttctgtccaatatggtggccactaaccacatatatttactgagcatttgaaacggggctaatgtagctgaaagacgagttttaaatatcattgagttaattaaactcaaagttaaatttaaatagccacatgtggccaggtgtggtggctcacgcctgtaatgtcagcactttgggaggccaaggaaggtggatcacctgagtcaggagttagagaccagcctggccaacatggcgaaaccccgtctctactaaaaatacaaaaattagccgggcatgttggtatgtgcctgtaatcccagctactcaggaggctgaggcaggagaattgcttgaacccaggaggcaaaggttgcagagagctgagctcgtaccactgcactccagcctgggtgacagagtgagactccatctcaaaacaacaacaacaacaacaaaagccacatactagtagctactatattagagcaactctatcagatattaattagtaaagaatatagaaatactctctagcatagtttacctgcatttcataagggcaatcaaaatagctttaagcatgtgtagtacaggcatacttctcaaactttaaggctgtgtgatatataaacaaacacctggcaactgccatatggaaacggacaaacacctaggtaggtggggtagagatggaacaaagtggaaaaacacaagtcaggtaagtaaaaaagctcatcgagggctgaaatgtcccaaagacttggagagtcaggccttcctaggagctttccatcttacaaagctgagtattggcaaatgttaccagagagatttagcacgaggaggaagctggtttaatgaaaagagctgcgtcaatcatgagccgatggaagtcctgctctagcctttggctatcgagccataaaatccgttgcttggaaatatgaaacccttttggctacttaatgttttctccaattcctctaactcagggaaaaggatcatggaaagaaaccaaggagggcaaagcaaggagaaaggccagaaatccaaagaggaagaccagaaacaggaagaaaaaatacaacataaaattgtgggagaaaaaaaaatgctcatagggagactggatgctcccagggtgaaaatgatgaaaaatctgtgcgaaagagcatgcccaagcagttagcaaagacctttgtgaatttatgtacaaaaccacaaattacacacatgcttcccaggaacaacaaatgctgcccataaaaataaatacctgccattaaaataaataataaggaggggaaggagagagagggtcagggaaataatacaataagccaaggttaaaaaaaaaaaaaagctagaagaagttgaacttgacctagaatttgatagtcagttacttaatccagaaaaaatgaaactgccaggcaaaagtactagcacaactggctatgaaaaaaactaaaggcattcacaaaggtattggtaactcgtcttatgatcagtttctccctaacactaaagtttccaattaaaaataaaaaacaagtgaggtaaaaggaatgattctaactatagtcccttcgcatagaagtaggtcaaaacagaagaggcttactgggatggggaaacagacaaattccattttgtaatacaccatggagaaaggtgtttattgaaagtggcagctttagcaccattgttttgcactctgagattagtgatttttgaatcacctcctatggtattacttttactgtgcatttagcaatgtcagctgagatataattatgccaaacctagtgatatgatcatctacctttcaggttcagctaaagagttctcactccatcaagacttctttttctctgaaaaggattcccactaaaatactgtcatttcctttgctttgtcacaatcacattttggtataggctggactgggtcagtgctgtgaatctgagaggagataatgtacttcaagtcccaaagtattttgagttgctggtatgccacataggattacaatcacaaaagaaagttaatagtgtgactcaatgctgagagtcctagctacgggaaagtgagacaagattggtttcatacctggcagcactagaatttaacgttaatatgaagtgtcctgattagctattatataaaacactgaaagaagaaatttctgttcaggaggtattcagaagaactgaggaggatagctggctatttagtgccagagagccaagtcaacttccaatccccatgggcttcttcagtgcacatgacctatggccaagccccatctttttatttcacaaatgttaacttcccaaatgggttagcaagggaaaactatcattattataaagaagcgcagataaggcagacacaatggctcacacctgtaatcccagcactttgggaggctgaggcgggcggatcacctcaggtcgggagttcgagaccagcctggccaacatggtgaaccctttctgtaataaaaatacaaaaattacctgggtgttgtggcgcacacctgtagtcccagctactcaggagactgaggcagcagaatcacttgaaccctggaggcagaggttgcagtgagccaagatcataccactgcactccagcctggacgacacagcaagactctgttggtggcggtggggggagggagaaagaaaaagcacagatatgtcaagtcagattcacttcatcaactctaagatttaaataatactaacactttactcactatttaaactacgttgtttttcgtccattagctcttcctcagcaatctgatcccatgtgatatatattgaagaaagactttcacagatcaaataaggtagggaaattctgaaaactaaactgtattcctagaaatataccatggtatgagcatattaaagaccctgagaagttctgcagtaaagaaatctgatattgccctctgtattctcctaaagcgttttagcttggggacgattttccctttgttctttatataaaatacgtattaccatctcatattcagagccctataaaatatacttcaagaaatactgaggggccccttaattacactataagactcttaacatacagtaggtttgtaaaaagatagtaaaaaggattaaagattcctcagaattagcttttcatgggcagcaaaagaagtgagaaaagaatggtatttattgctacctaccacgtggccgcattccattaggcgcatttcagtctcagtaaatcaccgcaacaattctctagtaggtatcattattctcttttatgcagaagagaaaaccaaagttcatagatgccacacagcccactcacggtcccagagttaagagacggcagggcagggatttgaaaggcctgtgccctttcccctatatcacagtggtgtaatcttttcacactatgcatacttctataaagcaaaaccattttgaaatatctgtcctgtgtgacatcacaatattgttaatggtttccttctgtttccagttgtctgcttagtataatgaaattaaaccattaaaatggaaatggaacttgttccgtgaccttccctttgtgagaatatgccaaattaaatcaacatgggatttttggaggatgtgccatttttttttaagaacagggtctttctgccaagacaggaaaacttataagaaattcaactacctagctacaggacctcaaatattaggttataatacatgtttctgtaggttgtaagtgtgtaaaaaaaaaaataggttccttcaggtttaagaaatccaaggtcatgaaaacaggcatctggccccagctagaaccctggtctagaacactaaggaaaagctaggccatctttcatttcttcctgacatcttggtctctctaaacgggttctcttcgttctgcatgctacatgaaaggaaacagctaccattaattccccagtattgctctctcctcatatgtgaggtcaaatagattcaagatggaatctgaatgacaattctaaattctctgaggaattagagcccaaccttggaggcaatcctccacggggactatatgtaatatatttatgtaatgtaaatatggccaatggaaattacacagctgtaaccacacaaactgggacaagcagcctctggagagcatggagagcagtggtgtttaggccaccaaaacagcttatacaaagacttgacaaaaagcacacaagctcgtcaatggaaaatttatgagataatgctgaagtgatttttaactaggaagatcacgggcagcaaagtgagtcaagttttaaatgaaaagtagaaaaaatataccgtgctgttgcaacaaaaataacccaacttgtgcttatgctgaagttataaaaaggagaaagagaaaaacttcacacctgcaacagcatcattaaaacataacaggatggtttgggtttgtcagaattaagggccacctgctgttccacacttcaccctcatcccaatcccagtccctgaaagaaatgaaaagaaagctgaaggaattttcatggagacaaaatcgagcagagactggatctgccaaagactatttttctagtcttcaagaaatatcctgaagtactgtttctaacagcttcattttaaaaaatattttagctctttgtttgtcttaggcattcagaatataaaatgtacattttatattttaattctctgttagaaaaacagggcatatgttgtaaaaacgtatggaggtcttcctttataatttgacgttgatgctttttcacagataagcatttatctttcagaatctaaataaaatgccatatttaaattttggaattttaatctgtatctggaagaaccaaacagaattttcaccatctctaaattactggattgcaagattaaagaatcaagtactttgatcttatttaacttgtacagtactcacaaaatttaaaacactgcacatattttaaacaaactaagtaagcatttacttatatttgataatctggatatttttaaattttctattttaaaatgaaggtgagtaggaaaaattacagtctctttaaagtaccatgagttaaactgccacattgatggtaccatttaccaaccagctatgagaagtaacaaaataaagttgcaccaggaatattactattactctctacaatcattacacagattacaaatttttttaatttttttttttttttttttgagactgagtctcactctgtcaccaggctggagtgcagtggtacaatcttggctcactacaacctctgcctcctgggttcaagcgattctcccacctcagcctcccaagtagctgggattacaggtgcccaccaccacatctggctagtttttatgtttttagtagatacggtgttccaccatgttggccaggctggtctcgaactcctgacctcaagtgatctgcccacctcggcctcccaaagtgctgggattacaggtgtgagccacagtgcctgaccccagattacagattatcctcattttacagatgggaacatctaggttcaaaaaggtaaaggaatttcccaaggatatatagctataggctaggattcatggcctggtctaatgtcagaagcaccccctattaccactggcatcaacagaagaccagagtagagtttaggttgttagtaaagacatgtttaataagcacaaagcctcttggtaataattaaaattgaaaatcttcatacagatttgtgatctggtctcacaaagtgaaaagctcaatgcatttcttttgcatttattgactttaattttcatttccatagctctttatagccttcaagatattgtcacattatctcattctgacagttatatccttcatattttagcatttattaagttgttacatgtctgactccaaaagaaatggaggtacaccctcctatatatatctctacctgtgatacatcatagcaatcaccttatgcatgatgctctgaaaaacaaatccgaaatatgcaacagcctagataaatgggatcacaaaatccctggtggggacttttaattatatgctaagtaagaggcaggttatgcagaactttctgaaaaaggggcagagggttttcagaacgatatgagataacttctaggctgttgccatggcacttgtaaactgtcctggcgccaatgggagtgtctttatgctaatgagcaatgaaggcaactagaggttgctttcctccccacctggtagttttggctggcttcttcactgcatctgaaaacgggattgactaaatcctgcttctattagtgggaccatgacctgaaaacaaatcctacaggcctcctacctcaacaaggcagcatcaactgttctcacaataaaccaaatatcaatgattccatgatttggtgagagcactgcctattagcatctttaagtagcacaaaacatggcagcagacgctctccttcatattaggttgcatctagtcactaggcaaaatcttggttagtttcctttcattttaaattttgctcagaggcccagtgggcacagtggctgacacctgtaatcctagcactttgggaggctgaggcaggcagacagcttgagccccagagttttgagaccagcctgggcaacatggcaagttcctgtctctacaaaaaaatataacaacaaaaaagtcaggcacagcagcacaaacctgtagtcccagctacttgggaggctgaggtaggaggatcacttgagcctgggagcttgacactgcagtgagctatgatggcaccactgcactgcagcctgggtgacagagtgagaccctgtcttgatcaatcaatcaatcaatcaatacttgtccaaatgagttgttagttcctccttttattctctataaatgctgccagtcgggggcagtgtgtaaaaagcagaaaaacaaagtcaaaaaataatggagggttaaaaaaaaaaaaagaaaaaaaagaaaaaacaatggagggttccactcctttaaaagatattctgtccatgacaactccccctctgcccatttcctgaaagaataaaaaggatatgtagttctttctctctgacatcttctgaataaagtatcaccttcaattcaaacaggtaaaatatcttgaaaaagtggtcagaggagctggccaggcacggtggctcacacctgcaatcccagcactttgggaggccgaggcgtgcacatcacttgaggtcaggagtttgagaacatcctagccgacatggtgaaaatccatctctactaaaaatacaaaaattagctaggtgtggtggtgcatgcctgtaatcccagctacttgggaggcttaggcaggagaatcacttgaacccaggaggcagaggttgcagtgagctgaaatcacaccagtgcactcaaatctgggcaacagagtgagactctgtctcaaacaaagaaacaaataaacaaacaaacaaaaaaataaaagtggtatgatggaggattgttttgaaagtgttttgttcaatttgaagtcaacaccgtgactaacaagtttgactgacagtgtccctcaatcagacacacttagaagctccacagacttgaccagaggttccacagacattctgggtacttcaaaaaatcacaccacaggctcaagtgtgccatgtcacactcttttcaaaacttgacaatgccaagtcaatcaaggaaactgattaagtgatgccgacaccctcttgcctccccagaatccctttaaaaccaagaccaactgtgtccaatctctattagggccagtaacttttactaagaaaaaatatttcctactgtggcccagatcctgatgacagtcaacagcgttaacgtttttactttttaattttagactagttttaaatctacagaaaaattataaagagttcagagttcccatatatgccacacctagtttccactattattagcaacttccatatatgatagagttgttacaatcactgaactagcattcataaattattatttatattaatttatttttcgtttttttttttgagtcagggtctttgccactcaagctggagtacagtgacgtgatcagagctcactgcagcctcaaactcctgggctcaagtgattctcctgcctcagcctcctgagtaactcggattaccgggcattatcacacctaatttgttttttattttttggtagagaccaactcttactatgcttcccagactggtctcagactcttggtgtgagctaccatgcctggcctctgagacattactattaacaaaagcctctattttattgggatttccttagttttcaatctaatatgctttttctactccaggaccccatccaagataccatattaacataacttatgttgcttaagacttttcttagttgtgacagtttatgagacctttactgtttcttatgaccttaatagtactgaggcaagtatgttgctgaagtccctcagttaaggtttgtctgatgtctttctcatgattgcactatgtctatggttttttgggaggaacaccacaaagataaagtgccatactcatcacatcatagcaacgtccatattatcaacatgacttatcaccgatgatgttaaccttgatcactggttgaagtattgtttattcaatttttgcattctgaagttactcttttttcctcctttttaagctgtacactttggacaagaaaccacgtgtggccgacatttaagatgtgagagctaggctccagctccttgcagtatttatgagaactatccggaattctgctaaacagatttttcaattctacctcatttatttgtttattcaatcatttatttccatccctatttattcaaatctttttttatattttgggttataattcaatagtgtttattctgctgttcgaagcgacccatctttggcgcttgggaactccttgagttggctcctatgtccctttaacacactcccattattgtgatttattttgttgtgttttctgagcactgtcttacttcttggcactataacgtgctccaggctcatcatgtatatttcttgctgaagtcccagaatttgccatttctccaaagaaccttggtttcttttattgggaaatggaattagaaacaaagatctgggtgttaggtgtatttgttgctcccacggtttattcgtgaagcagaaatgtaccctggttttagtaaatgcagaatgtcaggtatccaccatttacagcgtcaaattgaatagtttcatggtgtggggaaaaaaaaaaatcgcatgtttcacctattaaacctcaccccagaaccttcagtaacaatgatttgtttaccatctccatggttttgtctttaccagaaagttaataaagttgcatcatgcagtagatagccttttcagactagcttctttccttagcaatatacatttactattcatccatgtttctatgtatagttcattcctttttattgctgagtaatgttccattctacagatgtaacagagcttgtttattcattcacttattgaaggacattttggttgtttccagtttggggaattatgaataaagctgagacaaacattccagtgcagggttttctaatttcataagttttcatatcagttgggtaaatacctaggtatatgactgctggattgtatggtaaaactatgtttaactttgtaggaaactgcaaaactgtctttcaaagcgcctgtgctattttacattctcataagcaatgtatgagagtccttgttgctctacatcctccctattaatggtattgtcagtttttggtatttggtatttgctctacatcctccctattaatggtattgtcacacaccagtggctgtgtgatagtatcatcttgtactaatttgcaactctctaccaacatgtgacgttgaacatcttttcatatgtacgttttccatctgcacatctttagtgagctatgtattcagatcttttgatcatttttaaaattagcttgttttgttttcttactgttgagttgtaagggttctttctatattatggatacaagtcctttatcagatttgtattttgtgttctcccagactctggcttggcttttttcttcatagtgtcttttgcatagcttaagttttcattttaattaagtgtaacttacgatttttttcatgcattatgtttttggtggtgtatatacctactaacacattaccaaatacaagatcccagatttttttctagattttatacttttgcatttcacatttaggtctattattcatttgagtttttttgtgacatatgcaaggtctttgcttaagttcatatttttacagtggatgttcaactgttctaccaccatttgttgaaaagttatcctttctccatgtagtcacttttgtgcccttgtcaaaggttgactgaatttgtgtgagttagtcaactgtttttcaaaaaggctcagcattttcgaaaatccaagaaaacaggaaggtttaacttgaagccaagagcaacttgacagtggcagggcaatgtcatcactactgtgtatgtaggtcaaaccaagaatgttacacagtcataacggaggtgggctgcgtacagaacaccctgcatctcctaaatggtttataatcactgattaatcctctgtgagtatagacgggcctcattagctctagtaacaaggaaagacagtgttagattgataaagctaaggttgggaaagagaaattagagcagaagagctgtaaaaaggatggaaagtgccatgcccgcaaactttgtagatggatgtttttattgtatttgtttttttttttaacaaataccaccatcttttcattttcttcctatgttctacactccctcaaattaggaggcataagatatttaaattcaaatgggagctttctactctagctcccactgatgtgtatttcttattaaagctttgtgattattttgtattttaccagttcatgcccgtagagtgttgaggcctattttatcaaaactgaaatagctcgtgattagagcttacttaaaatatgcaaaccaagacaaggtcaaagcaacctttctttcagagggtcctgtgggggatcaaatggtatacattgtgattcattttcattcttcttctgtgtgtttacccatgatggccagggaacacaaaatacaagcctctcactggagtcagcgtgcaaaatgtgaaaccccctaatgtcaaactgcaatcaacacatcacaagcctgtcattaaattggcttcacaaaataaaagtgagaaaaaagacaaatgaagttaccacacgtaatacagaattgaagtggatgaggctgaagtttagaagagaagttgtcctctgaggaccgaagtataaatgcagtttttaaattaggccatggagggaaactcttggattgttccattgctggtgccctcggaagccttcacgggtttcctgtgaaacacgcaatgtaaagcagtgaatgcagaatatttgatcctatctttgtgttaatgagtcttcaatctagagagtgggtgatcacttacaaaaatggccttctgctgactcaccagccctgcctattacattcaccctgctcctgcacaaagccagaaaaactgaacaacaagcagcaaataaatttcaataaacagatttattgtcctatttcaatacaaatcacagtctattaagaataatgcactctagtccaggttctgacagtcaaagatgctgatttaagaagagaattgtgctcctaatttaattcattcatttgcatctctctcttctaagtatgatataattcagccttactgatcatagctggtaatcactcctctgttttatggttaaaattgtgcttttaaaaaattacaattctacctatttatgtggggatttttatatattatggttctaggatgaatggttattagatgacaataatgaaaaaggcaaggtttatcaaagtgacctctgaaattaccccatacattttcaaaatgatgcacctgtattacacagagcatcatagattccaagcacattttccataactaatgatatgacttggaccatctacaccttttgtcagcactgttttctgatttcaacatagtacaatccattgaatgtcagactctaacaggtgtctatgaactcagggatcttgacagtttctttcttttttttttttttttttttaccattattacattaaaggcaaacagaattcagttccttcaaaattagacattttcaacttatgtcccagctttctgttattccacctcacttttgtacttggtaaaataaatagatcacaccgtagatgctgacatgcttctatcacatattatgatattttggctttattttttagttgaaaaagtgactgtattttgtaaaattatacacaaccaagagtttaaattggattcaatgtgtgtatgctttccgctgaatgattcctttttctctgggtcttgcctcaaacaagaaaccattaatgagtagtgaaagctttggacacagattttgtgaagtttcatatgagttaaggagtgccttcatttcatccttcaaattttgacagtaactatttttataaagaaattaattcagcttttccaaacttctttacattgcatcataatatatatcacaccatgatgacaaacattgaatctatttctattaaagacaaacatgcacaatttccatctcaagtgaaatcttgagcaaggatggaaacttctcaaagaaagaaaaaatagtaagccaccttgtattcttaagaatgcagaatttcaaaatgagacatttctgagctgcctctcacaaagcaattttttttttagccgcagggcaccccagtagaagttaaaaatagattacacttctattcatctaaaagaaggacactaatatgagcactgtagctttctgcacttcagtaaaaatcagaaatgatctgcagcccggtgaataaagttgattcacttagagaacaccagcatttctctcctcacctagcttttgaaagcaagcatgagacagcccctgcctacaaaattgcagaggaattactctcaattacaggcttctgtctgttaaaaagtagagctggtgatcagtctgaccttttttctctgacaagtcaaataaatgaaagggaaaaaaaaatctgacaggtgttcaatttagaagctgggggtgggggggaaagaggagaaagaaaagaaaagcttgtattctctaactagatctccggatttttttgtattattcatcctattttaaaagttccttttcagtgaataaattgcatgtggcaatgtaattttcttaaagtcactcacctaatgttttaatttgagtatcatttactgaaatcttcccacaatcaatcattcaggcttttagtttcatactttagatactttagggcaattctgctgaatgctacaactccgccctacccccattcttccttccttcttataagtagattacaaatgaccacagaagaatgacttttctggttccctgcatttgctatatttattgcaagacatggcttgtaaacaccagcctccacattttacctgataatgcgatcattacagaattcactagaatttggtcggcattggtattatttgaatgtgaatgttttagtaatgacatgaatcgtttttcagctctctgacatttacccacgttttttcatttcaaaagagttaactactttgctaaggactgaaaaagttgttctgatgaaagttaaattctaaaacattctgtattcttcggagttggttggttaggttcttgataatccagcacttgttcagcaaaactactaattagaggtggaagccatgtatgcattgaacagttacctcttcaagtttcaaagagagaagaaggaccaaaggatgctctttcccttaggaacccatctgacctgcatttaggccagttaatgatgacttccattcagctttgaaacatgtttcttttaagtcagctacttttcagtagggaaaaactattttgagaattaatcattctcaaacatcatacagaagccaaccagttaaaataccacaatcttaaacagacctgcaaacaacatttggaaagttgaattgtgattgactgatgacatcacagaaccaaaataacgtcccacattcacttcttgctctgttatttttgtttgcttcataacagtcagaactgcttttctgagatggctgagacagttttctcagaaatgacgcagtgaaatggctaatggccagagagtgggagtgagatgagaccagaaaaaaaaaaaagaaaaactaaaagaaaaaaggtggaaaagaacaaaggtgatgtacacatacccctaaaagctggccaaaagatagttatagtaaaaattctaagggagggctgggcacggtggctcacacctgtaatcccagcactttaggagtccaaagcaggcagatcacctgaggtcaggagtttgagaccagcctggccaacatggtgaaaccgtgtctctactaaaaatacaacatcactggggactgttgtggggtgggggagcagggagggatagcattaggagatatacctaatgctaaatgacgagttaatgggtgcagcacaccagcatggcacatgtatacatatgtaactaacctgcacattgtgcacatgtaccctaaaacttaaagtataataataataaaatttaaaaaaaatacaaaaattagctgggcatggtagtgcacacgtgtagtcccagctacttggggaactgaggcatgagaatcccttgaatccgggaggtggaggttgcagtgagccgagattgcacccttgcactccagcctgagcaacagagtgagactccatctcaaaaaaaaactaagggagattttgaagttgtgtctttttcctgtgactgggaggccctgggaagctaagaaaattttattgaacatctgctttgcttccaggagataaagtcttcctgatacttccttctaatttaagtgaggcagtatcccacaattaaaaaaataaaataaaataaaaaaacaatggttcctttctccaaagagtcagccagcaatgatcaagaaaacagcacagtggtgtatactatacagctttggtaccaatgccaacaacccaaagtgataaaaaattaagaacagaatttatacaaaaataatgcttaaacacatgttttattaaaagctatagaaaaagggatacatttgaaataaaaatagcagtattttctgctttaataaccaactgttgactagtctcgtacttagaaaacggcaggttgtcacctagtgaactactcaaaaatctctctaactagcaagataaaaagcagtatttcaagtccactgaactgaaatgaacataccatacgaacataatggcagtgtacattgctcacatacaaaaccacatcataaagccgtagtgattagaagggcatagtgaccaaagcatgatcctctcctccagaaacagactcaaacacacagaaaagtagtatttttttatatgacattgcaaattcatgaggccagatgaattaatcaacaaatgttattttgggaaagtgaggacattgaaaagaatgtgaaccctacctcacaccttatcccaaataaattggagacagattaaagattaaaaattttaaaaataaaaatgtttcatttaaaacataaagcattgaaaacagcaaaatgatttaaaatacttttaaaaagtcatttttaaacatttttacagtgggagaaacccaaaagaaaagactaacaaagccaattacagaaaatgaaaagttcagataatacaaaccaaacagaaaacaaaccaaaacacctacaatcaaaaaaataaaggtaaaaggctgggtgtggtggctcacacctgtaatcccagcactgaggattggagactgaggcgggtggattacttgagaccaggagttcgagaccagcctagcaaacatggcgaaaccctgtctctaccaaaaatataaaaattaccaaagcatggtggtgggtgcctgtaatcccagctactcaggaggcggaggcaagagaatcgctcgagcccgggaggcggaggttgcagtgagctgagttcacgtcactgcactccagcctgggcaacagagcaacactatgtctcaaaaaaaaaaaaaaaaaagttaaaggatagacaggcaaaagttcaatggcctttgaaaaaggtaaactgagggctgctgaaagccctaaagcaaggagacaaatgcagatgtaggtttaggactcagcatgaatgctgtggctggagacatggggtatggcagatgcctttcatgaaagccaacagagactcatctccctacctcccaaatggctgtggaggagtttccgttctgtgactctacctctcctgtatgggtggacacgtaaccagaggtaagcatctgatctatgaacaatcaacacagagattgagttgagccatgctctctacagggcattcagaagtaaatgggatttccaagttcaattagcagagttgcctgcatctcatatttgacacctttaccctacatgctgcttacctgcccaggatctgaacttctggatatgtatctttatttcaccccacactctgagtcctaactttctaccctctaaaatgattccaccaccatccgtgaaagcagaactgataactacaggctgcgtgactcatgtttggttttgacttttcgtaaccacgatccacattaagagctttttcaaataattgtttataggttatatgaacttcataattttgaatgacacaagtttctactgaagtgattggtctgccacttccactgccagtgaaagaatattctctctgtgttcttaaaatcattcattctaaatgacactggggtaagatgaccgaaaactaaagggatgacattttgcttaaaaggtagaattgtaaacaccagactgcactcagaaaaatggagatttctcaaaatttaaaatcctcaaccatgagaaggataattaacaaaatacacttcagaaatatgaacacttagaatgcacttagtcactttacgagaactactgtaatcgtgcccaagcctaaatgcggatgtgagtataatcactgaccagttgcagcaacactgctgctgagaatggacctgcatcagaagacatgccgagggacagagctggtctcagcacccttaggtttcaatgcatgtaagagccagtgttcaggctgcaaaggtctgggcatttgtctttccaggctaacagaggaggagacaatgagactctacatcaatttcccagtatattctgcaaagtgataatgaatttctaaaagaaaactaaataaaaatatcatttagttggctaaagagcttccagaagaaaggcctcagaccatttcaaaaagaaaatggacaactctcaaacacagggacatagatgaggcagaaaagaagaaatatgcatacctataaccatggccttgacaagtcattttatagaaaggtaagatccaagtcttgaggcacttgctcaagcattcaaatatttctggggccaatcaagtgctggctgtggagatgccacatcctgaccctgcaaacagtttagtgggggacacaggctttcacatatatgactgtagcacagtgtgatatgtccaatgtcaggggccagtaatgagaacatgggggcaggaaaggaaggagagagtcctcacacctcagccaaagtggttcaggaaaacatcccaggaaaagaggtgtttgatatgggtgttaaaaaatgggctcgctttccaatctaaagaacttgaaagtatcatagacgacacaaatgtgaagacatccaatgatcatggattggaagaatatcatgaaaatgatcataatctgattatccaaagcaatctacagagtcaatgcaattcctatcaaaaaaccatttttttcacagaaatagaaaactcaatcctaaagttcgcatatggaaccaaaaagagcccaaatagccaaagaaatcctaaacggaacaaatctagaggcaacacattgcctgacttcaaattatactacaaagcaatagtaaccaagacagcatggtactagtataaaagtagatttataggccaatggaacagaatagggaacctagaaataaagctaaatacttaggaccaagtgatctgaaacaaagcattaaaaaacataaactggggaaaggacactctatttaataaatggtactgggaaacctggatagccccatgtagaagaattaaacgggatccttatctctcatcatatacaaaaatcaactcaagagggattaaagacctaaatctaagacatgaaaccataaaaatcttagaagaaaacctaggaaaaactcttctggatattggcctaggcaaacaatctatgactaagactccaaagcaaatgaaacaaaaacaaaaatgaataaatgatacctaattaaactaaaaagcttctgcacagcaaaagaaacaatcatcacagtaaaaagcccacagaatgggtgaaaatatttgcaaactatgcatctgacaaaggactaatatccagaatctgctaggaactcaaacaaatcagcaaggataaaaaacaaataatcccattaaaaaatgggcaaaggacatgaacagacatttctcaaaagaagatatacaagtggccaccaaacatgaaaaaaatgctcaacatcactcatcatcagggaaatgcaaattaaaaccacagtgagggctgggtgcggtggctcacacctgtaatcccagcaccttaggaggccgaggagggtggatcacctgaagtcaggagttctagaccagcctggccaacatggagaaacgctgtaacaactaaaaatacaaacattagccaggcatagcggcagggagctgtaatcccagctactcagggggctgaggcaggagaatcacttgaacccagaaggcggacgttgcagttagccaagatcgcgccattccactccagcctgggggacaagaatgagactttgtctcaaaaaaacaaaaacaaacaaccaaaaaaaaccacagtaagacaccattttaccccctccagaatggtcattattaaaaagtccagaaacaatagatgttgacatggatgtggtaaaaaagggaacatttatacacttctggtggaaatgaaattagtacaacctttatggaaaataatatcgtgatttctcaaagatctaaaagttgacctaccattctatcttgcgatcccaatactgggtttctaccgaaaggaaagtaagtcatgagatcaaaaaagacacctgcacacatatatttattgcaacacagttcacaattgaaaagacgtggaaccaacctaagtgaccataaaccaataagcggataaggaaaatgtgatatatatatatatttatatttatataattatatttatatttatatataattatatatatgtatatataattatatatattaatatacatataaacatgatatatatacacacatatatatatgtataccatggaatactactcaaccataaacaagaaaaaaataatgtcttttgcagcaactttcatggaactggaggccattattctaagtgacgtaactcaggaaagaaaaaccaaataccacgtgttctcacatacacagaggagctaagctatggatatgcaaaggcatacagaatgttataatggacactggagactcagaagggagggtgggaggggcgtgggggattttaaaaaactacatattgggtaccatgtgcacaactcaggtgatgcatgccctaaaatttcaggcttgactgctatacaattcatcacataaccaaaacctacttgtacccctaaagctattgaaatttgtttaaacgaaaaaaacttgaaagtgatacagttttaatcaaccagttactgaggatggacatattagtttattattgccgctgtcacaaattaccacatacttagggcttgaaacaacacatatttatcctatcgttttggaagtcagaagtctgaaatggctgtcactggggtaaaaccaaaaagtaagcagggctgtgttccttctgggggctctagttcagaatccattcccttactttgtccagcttctagaggaagcccacattcctcacctcatggtgccttcccacatcttcaaagccagcaacatcaggtcaagtcctgctcacaccacaacactcagacctctgcatccctcatcacaccttctctcactctgactcgcttgcctccctctttcatttataaggacccttgtgaatacattggacctacctgaataataccagataatccccctatcccaaaatttttaacctaatcacatctgcaaagcccatttggtcatgtaaggtaacattcacaggtgttggggattagaattaatacctctttgggggatcattattccacctaccaaagtgggttagggaccacacacccgccctaagtgcagacggaagcagcaatggcctaggatgtgtaacatacatacatacatataaacatatatacagacatacatatataacatatattacacatatatacatgcacacacatatccattacatagatgatatcatacatatatacaatatatacatactatgatagtaaatgttttatttgtaaaaaaaaaaatcaagcaggattatattagtctcatttcttatactttgctatgcttttgtgtgggcaaaaagccgtatggatcatgtactggggaccacaggtaagtacatacagccatgcagacaccccatgcatataaactccatccaacatgtagattactgcaccccaaatagatagatacatatatacgtagacagataaaagaactgcttttcaagtcggtgttccccatagtgtggtacatattccatttactaattcaaactttaaaattcgaaaagcagcatacttaacatgcatttaaaaatatataaccatcatgtcagtcatgatttcataaatgccacagcttggaactattctgcccatagtagtccctagccacatgtggctcttgtcaatgtaaactgtgactagtccaaactgagatgtgctataagtgtaaaatacacacaagatttcatagcattaaaaaaaaagaaatctcatttaaaatttcttattgatttgcatgttgaaataataggatacagtgggttaaataaaatgtaaaattaatttctcctgcttctgtaatatggcaactcaaaaatctcatgtgccttgcattatatttattttaacagtactggattaaaacaatgccaaagcagttgtgaagtgaaaacaaaatgagttgagctaaagtaaatattagtaaagttagcataaaggtattacaaatatcttgaaatttcaaagctaataacctatgtttggtaacactatacaacatccctggaaaatggaatccagcttttgaatattttctggaaagggtatcttagtacttccgaggttgttcaatgtagtggtagagggggtcaaatgaaaaacatttcttctttgtattgactggaaatctgaaaaacctttgtacatttctctccaatgcccttagttctggcttataaagcacagcacaaacctacccactactatccataactagctggttctggccttttgaacctttagtttcaaggctcccatgaaaccaacacagcagctttgtaacttcacaaacttgaaagaccacattgttggaggaagattcttactgcaggccctggcattccccattgatgagctgaaatcagttattatgaggttctgtatacaccttctgatgatggataaaacaaatgcatatgcctcacaggcacagcaggaattaaaaatacattagttcatcgcaacttcagatctgggattgaggaacgtttggatgacttttttttcttttcaaataaagtttagatgaggcaggaatttcactacagagtagagttctgagactctccaggtccagttcagcacttggagagaaatcaaatacatcttatcttaggtatggcactaactttcatcaaaaaattatcatatgctcagtcacaaatggttattgtaaaatctttactaacctaagtgcatataaaaattgtgaattcctaatacaaagcagtatttgacttttaaatttcattttaagcttggcccgttcacttggaatgtgattacagagtaaattaaaaagtaatcacatgtgaattacatttcctcatgaatgtaatgacttcaggaggctgattaatgttaagcagtgcctgtcctactgcatgcataccttcccaggtgagatatgcaagatagctgtcgtgagttgtttaattttcttttactggtattccagggagactgcctgaacacataataggctcagcacattcattaggactgaggatgttcttccctttggtatgctcaagtcccacgtgcaaaataccatcaccgtcaacttatggttatgagaaaagcccaagggaggcggtgcagctctggtaccattttctacctagccaagtttcaatttctcaatctctctttctatctttttggcaaattcttcatatttgaatggaataattccagagaatcactgaaaaatgcatttgcaccagtgtaaaggtaacgaattgtctcacaaggaatgaaggcttattaataatctacaacagtattactgcagagaacaaaatttaaactaagtggagcacaggatcattaacatatttcctctcaggtaatggggaatgtagcagtctaaaatatttactcctttctgtagtcaggttaaggcattgttttctaaaggagttgtcagaggaatcacgctattgttagaagtggaaaaggcttggtgcttcattatttctgtgcaaaagaagagcaaatacagtggatttagtagccagccaaggaaagccaggtactaaaaattaccttgggacaaaagttggtcttttattcctgtgattccccattccactgggaggaacaatgaactagtagagcagcctgagaacatgttacatcataatctagaacatatagacagctgatgtcatgaaactgtcatactatatgtgatgctctctgacatcatctattatataaaattttgtttttcttttttaagtttggtgagacaggctaaattgaattcaaaatccatcagtgactcatgaccatcagttagaaacattctggattgggagcctttggaatcacaggagttgagagactgccagctcacttcattgtcatttaactgtgggtcctcaaaggggaatgttccaaatgtcatgtcttcccagctttgtgtgggtggtgggaaaatgaagaggggtaatagcgagagaattaatgtcaggagaataagacagaaaaggcctacaattctgtagtttctcctaagactggcttcaggattcctttgagtttaatatttctgttatgtttttatcctgagatatttaaatttccagaacattcaaggtcaatgataagactattagaaagatttttatttaaacataaactcaaaagcactcaaggataaagaagaaacctatgagaactctgagtaggtaacctacaattcttctgtgttaaggagagagtagagagaattactcttgtgtttcaaactgggggtgtcaaacataggggactaaaaatgtgaaatataccagtatacaatataactccattgccttaactgagatgacagacactaatattcttttgttgtactagggtttttattctgcatttgttgtaccttataacatttttaaggcctttactaacccactgtgtgattcagaagagggtgatcaagaaagtgagtgacctagagaacacaccacgggataaccaatcaacatagacaaggtaagacttggacactagggatgggattaggaacagggtgtctccatccagaggacagtactgggtccaggctataaaggcagagacactggattgtgggtgctccctgacgtgctaatgagagttctgttaccaacaggactgggataatcaatttcccttctctgcatcccctttccacattttagggcctgatgtttgacagccatctaatgagctaaatgaattctacgaattctgctctaccatgttggatttgctcttgtggataatactcagcagaccactacaatttctagtgggtcacaatctacttttgacctcccccttctctaggacatatccctggcattttcctatacatgaccaaaattacttttagagaatgtaattttgtataaaatgggaaaaattaattaaatcattaaaatatgaaaaggatcctcttctaacaaggtctttcctctacagggcatccatgctttgaactctagggacagcattaaactgaagcaccagtgtctttcttctggaatcagaatccctttgttgcttttgggggaaaaaaaaaaaaggctgtcattgaacttttaattaggttccaaaaatgtgacctgaggcaataatagaatgatttattttaatgctacactgctcttgatgatattcggttaaaaatgggccagcctttgaaacaccctgacaccacacactggcatctacaatgttgaggctactgattcagttttatttcccaagatgtctttctttactcctttgttcaaccacccatccttctgtccattcatccattcaacaaacatcaacatttattgccaggcattaaggacagacaagcaacaaaaataaaatggtccctgtctccaacagaacttactaaagttcagctgggaagacaaccacttacccaacttaaaatagaacaacgtgggtggaaagtactcagtccaatttaaagagaccataatatctaagttttggtctttactgctccctctagcctgggttttatgtttggtttagccatttaaccaccactatgtataacaacacgtatgttccactgctgattttaccaacagaggccagtctcacggtgggaaacgtggctcccaatggtatcttatataccaaatgatcgtctatggtagatttcaatcatcattctaaattctacattgtgggtttgtatttctgagtgccaatacaaaccacaatactatctattttttaagagatggggtctcactatactgcccaggctggccttgaactcctaggctcaagtgatcctcccacttcagcctcccaagtagaatatcttaaagtccagggccattcagaggaagagagatgctacactgggtagataatcagaagaaaagaatcatttaacaaccaccctaccccccaaaaaaccctttctctctgcaaaatggaagggccatctagaaagaaacagaatcattcatacatatttattttaaaaccaataattaaccacctattgcagtactgaagttcatggcctacatgggatttattatactgattagtccacttctgtgtatatttaacctatctcataactttttttaaacagtcaatactaataaatagctgagttcatctaaaatatattggatctaagactacccaaattttcctcaaacatcctaactagaccccagttaaacttcttttggagtctcagggagaaaaaaaaaaaaatagaatgctttagaaattcttgattgaattttgttacattagctcagcataagcattacagccaccaaaaccactcttaccagtaagttctccatagcaagagatggctgcctgtcccaggattgcccacatatgtcttcttaggatactccaggaacaaagaggagaaaaataatcttggaaattctgtagactgttttgactttttaacccattcattcaatccataaaaatgaacaaagtgctataatgttacagtggaaagagcatcttttcagaggaagatagctggaattttagtcaagacttcgtcactaattatcattgtgcctttaaagcatatcacttcacttttctggaccacatttacttacaagaaaaatgaggaagttggaccaatgacctagtagcactcgtttctgattctcagtctgaagtcaatggatgctattaacatggaagtattttgaagctgcatttcctgcaggggcaaagcaatgcttcctccacattttcctgactcctttcaagttctcctagagagctcctaagacaattcataaagagaaagggggtactgctgcccaagcacacatcctttgtcacggtgtgtggtcaggcactagttggcattaatttacttgttcacagttgtacatgagacattattggtagagtagttatggttgcctgattgtggatgtgtaactaattctggaaaaggatgctataaagttacaatccaaacaatctcagcaggtgtcactgtagtcaggagaacatatcttcacaaatactcattatttatttatccttaagtaagagaaggtccctaccagccagcctaaaagtactgagctctgtttcccatcataaggccaagaatcatcaactttgtaagatcaaaagggggttttatgtatgctctgtcttcgtgcaggtctaagtggagccatgacaacctgaggcacatttgtagatattttttcaaggttataggcagaatggcactccatagcatcagtcagaaagctactcccatgccctactttgtctatgacctcagctttatctacttttatttatgagtgtggagcttaggatttcagtgacagaataatttgtttgacacattacagttaaaaaaaaaaccccaatagaagtacatagacatacacacacacgtgtctgtaaaattggtaaaatctgactaaactctgtggattgtaccaatgttaattttctagttcttacatgagactatagttactacagttaagcaagatgctaactatagagagtttgcatgaagtgtgtgtgagtctttgcatttttgcaactcctgtgaatgttgaattatttcaaaacacaaagttaaaaaaaaatgacaaccaccaaataattaagaaacctataccttcaaaagcaagatttaaaaagtaattgtaaaagttcaggaatagtgtaatgacacggttcatcatcagtgaacacctctccttcaaaaaatatttgtatgataataaatatccctcaacaaaggcatgtaagtcaccagtattcattcccaggaaataaggactgtctctttcaaaaatatttagaggacctgagatgacccttttcccctaggtcacaccaagagtttttatcactgaaagctcctttttgcaattcatagttttgacaaaaaagattttagtgatgtgtctgtgtctccagatgcactgctctgtgcaactatataataactattacctggtcaacctatgtcagcccattggaactgatctttaagaacacaaaaacatatatgtacacactggtatgaacagcaaatcattcttaaaatatttgatttagaaaaaaatgcaagagagatgatagttaatatccacaaaaggcaacacaatttcacaaatagacaagaaggggacaaagaaaaactaaaagaaaaaaatgggggcaaagacaggaacaggaagacaaacttcgcatgttctcacttattagtgggagctaaaaatcagaacaattgaacttgtgaagacagagtagaaggatggttaacagaggctgggaagggtcatggggaggggggtgaatagttagtgagtataaaaaatagaaagaatgaagaataagagctagtgtttgatagcacaacaaggtgattatagtaaataatttaattgtacattttaaaataaaagagtataattggattgcttctaacacaaaggaaaaatgcttagggagatggatactgcatttacattggtgggattattactcattgcatgcctgtatcaaaatagctcatgtactccattaatatatatacctactatgtacccgtgaaaatgagaaattaaaaaatgggcaaatatatggagaggtattttatttattttattattttatttgagacaaggtctcagtctgtcacccaggctggagtacagtagcgtgatntcagctcacctcagcctccaccccctgggctcaagcgatcctcccacctcagccttctgagtagctgggattacaagcacgcatcaccatgcccagctaatattctggtttttttttttttgttttgtttttttagtagagatggagtttcaccatgttgcccggactggtcttgaactcccgggctcaagcaatcttcctgcctcggcctcccaaagtgctgggattacaggggtgagccacccttcccagcctgaaaaggtatttttaaggtgggacaatataaaaagccaataaaaatgaaaagatgctcaaatttaatagaagtcagaaaatgttagagaaaacaatgagatgtcatttagacctaatgcactaatacaaatgaaaataaggggaaatacctgctctggatttagataaatggatattctgatacatggtagattaaaatatcacttttaaggctttatgaaatgtaatgtaacaatacctatcaatatttaaaaagtacattttcttaaatctagtactttcatggctgacaatctatcccattaaaagtaggttattagtgagaccccatttctaccaaaaaaaacaaaaaaatctggccaggcatggtggcatgcaccagtagtgtcagctactcaggaggctgaggtgggaagatagcttgagcctgggaggcagaggttacagcgagccaatatcgcgccactgctctccagcttgggtgacaatgagaccctgcctcaaaaaaaaaaaaaaaattatatgagctttttgtacagtgataagacaaaacaaaaccacacaaaggctggatcccaccagcagaaaatgttttaaaattatgttaccgccactggacataatgaattagatttatacagtagccttgaagggatttcctcaaagaattattgaaagataaaagaatgagtaatattccatttttgtaaaacaatgactgaaaaatctctccagatatgtatatataaatacacgtatgtattaacatattagcaggttgacaaatacacaagtataatcataggtcagaacgtcccaaattctgcatcttggcacaagtataagataataacttttatctaacactggggtggaaagataaaggttgttcatcaccagaaatgatgagccaaaggatagagccacctaaaaagcagtatttgagcaaaggagttggggagttcaaaaggaagttgttgcctgaggaggattctgggagcactccaggaagagggaggatagagcatggtggatgaggtgggtcatgtgtacgggaatgggatagtaccgagtgaaaacatgggaacaaaatgacgcaaagttcagaaatacacatacatacatttacatatatgaatacgtatgtgtattcttgaatttcatggtcatatttatgcattttcggtgaaattgtgtttttaaaacttactttatgtcttaaaaataacacttaaggctgggcgcggtggctcacgcctgtaatcccagcattttgggaggccgaggggggcagatcatgaggtcaggtgattgagaccatcctggctaacacggtgaaaccccgtctctactaaaaatacaaaaataaaaaaaaataaaaaaataaaaaaattagccgggcgtggttgcaggcacctatagtcccagctactgggaaggctgaggcaggagaatggcgtgaacccgggaggcggagcttgcagtgagccgagattgagccactgcactccagcctgggcgacacagcgagactccgtctcaaaaaaaaaaaaaaataaataataataataataataataattataacacttaaaaatgagcccaggtagatgatcttccagtaatttctcccttgattttcttgttcttgctgctattaaaatcaagagggcaccatatttctccctttgctcttctaagatccagtacttatgataagaaaaccatagtccaacacaccctatgtaagttattctgtgtatctgagcttcagatgtaaaggagctctttcagacttcagggttatgagagtttctgaatagccacctggcaaatctgggtagatgttgactttcccagcaggccacgatttattgccaaaagcacaatttttttcttttgttttgacttaacatgccagaaaaaaaacacaagactataagaattaaacctaatgcatcacagctaagctctctaaggcatgaaagaggcaagggctgcaccaaaacgaatttatcaatcacggaatgcaggaccccttgtatgattagcttaattatttaaagaatgcaaaagaggtggacggttctaccattaaattatcctgtttaaagaaaatgccaactcggtaagcatttctaagtggacaggctatttcaatagagtacattgctgaatgtgtgtgtgtgtaataataaaagaggctgccctttaaaaatccccacaccacgtacttttattaatttaatttggtgtccactgtactttttagttcgctccagttgcaattactattctagtttaatttcacatatatttgcattgtttcatggaaacccttacctcggtaaagagtaaaaatagatacctcccactagacccacctcaaaaggatatatgtgtgtgaaaacatacatacacaactaagtgggatgaaagtgatctttagagatatgggataaaggaaaaaccatttgaaaaaagtctcagaacactcctaggaagaccatatgtacttcctcatccagcaaagtgctatttcaaatgtgttaaataagtagggagtgtgtcagtgtgcgtgtgtgtgtgtgtgtctctgtaccaataaacatccagaaaaaaagaggggaaaaagtcaatataaaaatttagaaattagaatatttacttttagttaagaaaatttctagaaagttttattttgatatacaaaatataagacagccatctcaacaatcgtgtccagtcattcagcaatcagccaccactgacaacctacacctttccttcctttcaataatggccttccaacagacctcgaaaggcttctatatgggtcacttttcttactatatctgtattttttttccaaacctaatcctgtttgttctgaattatactgagtttctgataaactttaaaatgtttttcttagatccagctgcactaagagtataaagcgaatttagaatcaccaccccacagtccccccgccgacaaatcatactatttaatatggcggtgatgagaacaacgtatgtgactaccgtgacactcaataaaaatgctatgatttgctttttaaaaagtcagaaacctatagaattcgtatgtgagttccactcattgtttctataaaaaggtcattctgatatgttttagggcattgtcatgagaatgtgtgaaaaatctataggcttacaaaacatgaaaactcaagatactggttggtaaggacatggtaggggtaatgtattcttagaagagaggctgcatcatttctgcagataaatttgaaattttcttcatgcaatttggaatgtaatctcttactagattaaattttacagctcaggaaggtgaggagctggtaagagcaaactgcatgagacaagagtatagatatccaacaaacaatgaggcaaccaacctgattcacttagtacttgacagcaatgcttttattagaaacactttacttatgacctattaccagtggttcctctactattgggatacatttaaatctgtcattttaaatgtgtttacactttttctgtgtacaagaactgctgacaaaggcaagcgtgatatgtcatactgatgacgtgttaagctgaggaaatttccactgccacaggcaacactttaaccttatgaaacattttaatcacatttttattgaagaagcttattaaaagatgcaggctttcagaactcgacaaattttcttgatcctttgccaaatcagaggtaggcaaagtgtactctgaaatcacctccccccaaattgtaaattcattttctgaaattagatattgacatttaagcatcatataaaagtcaaacttttctaggatggctgagaagttgaaaatcctaaatgcccacattatgagaaaagaagttaaggcaaaggccaatatggtgagtaattttaaatttacacttagcatttagccccttttctgcattagtcccatgttaggaaccaactcattctttcatatccaacatatgtattttcagtatttgctaagaaataatcctcatttcaaagcattggttattattttctacaaaagcttggtttctcaatagtataattctgtgtttgcagactataaaagtatagctctgagaatatgaaagaaaataatcaccaggacaggcaatcgatttctgtgtgggcaaaaattttagaccttttttgtaggtgaatgacatcagagagccatttagctctaagtttccatgactacctgtaaaatggagatatcattcattcactcattcatttgataaatatcaagagaacatccacaatatttcaggtacagaactaggtggcattggggtgacagagaacacactggttttgcctttaaggacatttatagtctacttgctttctgtccacttcgactcagacataaagaatatttatcaaatataccggaagtcccagaataagggtactctaaatacatcattcaaatttcaaaatagaacctaaaaaacaaatgccaaaacatttacccaatgtattcaggccttatgaacctagtgattaacatatttttaatatgttatttcagctatactgtaactatatggtgaaacacaacaaaccaaactacttggtttatttagtttagtataaagccacatttagtagtattccaactcagtgctcttcggcaagtatgtgcacagctatattacgtctaggcactgtaacagtggctagggagatgatgacatgatgacatgatgatctgttagaaccctgtgaccttaagaagcttatggtccagaaagacatacaaatgtgtcattcactatgtgatactcctctcaatctcttcctctcaccatctcaccatctttcttacattcctactcctgatttggtccagacaatccacccatcttccagagccaagaactctgttgagccaatagtaaaaatctcattccctctgcaaaggatttgtttgtttaggaaagttgtgtgacccagtttcagccaacaaggaaagtgagtgaaaaaccattcaatagggcttttgaaaaagacatggaaccaatctaaatgcccatcaatgatgaactggatcaagaaaatgtggtacatatacaccatggaatagtacacagccataaaaaggaatgagatcatgtcatttgcagggacatggatgaagctggaagccatcatcctcagcaaactaacacaggaacagaacaccaaataccgcatgttctcactcataagggggagttgaacaatgagaacacaaggacacagggaggggaacaacacacaacagggcctgttgggggtggagggtgtgtggggagggaacctagaggatgggtcaataggtgcagcaaaccaccatggcacacgtatacctatgtaacaaacctgcacgttctgcgcatgtatcccagaacttaaaataaaaaattaagtatcaatccaaaaaacacaaaaacaaaaaccaaaaaaaagtttcttcactctttccaaaaagaggtaaaagataaacccaagtgaatggagaatttggtatatgataaatatgctatccttaaatcactggggagaagatggagttttgatatgaactgttgggataagtggatagtcacatgaagaaaggtaaaatcagatccattccttagactttaaaccaggataaattccaaatggatcaactatttaactatgaaaactaaaattaaggactagaaaaaaacatggtaatatgtcatctcaataacctaggaatggggaaaacttttctaacaattatttaaaatcccaaagtaataaggaaaaacatggataccagtgattacataaaagattccagaaacaaattgggagaacacattggtaagcttcactagagataaaaatccccaatatacaccagggctgcaaaatcaggaaaaaaacagcccaaaatcacactgaaaaatgagtgagaaatatgaactgattagctcataaataaatgcaaatgggccttaaacataagaaaatacactggactgtgctgttaatatgacaaatgcaatcgaaaacaatactaatataacattcctcacctatctgacaggaaagtcttaaagttcaacaatatagtatgttggccagacttagggaactaggaattcttatatagttgtggtataaatacaaagagacatatgcaaaccctatggataagtgttcatcaatacctagcaaaattacatatgtatttatcctttgacacagaattgcacttctgggagtctatccaaaagacacactagcaaagataaaatatatgtttgcacaaagcaattcactgcagcattatttaaaataacaagagattgaaaataaaaatgtttataaataggggatggagtgagaaaaaaacatggtacatcccccatgatggagtactataaaaccgtaaaaaaaaaaaaaaaaaaagaagaggaggaagaggaaaaagaagaaaagaaatcattctagaaagtgcaactaaatgctctccaggctatttttctaaagaacgaaagaaagttgaagaaaaatgtatagagtatatataacttttcaaagaaaggatggaacacaaatataaatgtatttatatacatacatgtatgtatatccacatacaaacacatatatgcaaccttatgtatatattgtatttgtatttaataaacagagtaagtattaaaaatttgggggaggaagaaacagagtataagggagatatagaagttatactactttgaacatactggttttatagattgattctgaaatcataaatattctacataattataatgcaaaattaaatctaaaaaagcaatctctataaattgaaagtaaaataaacctaatttcatatccagttgctatcataagcactcacagaggtgctatttctagcgattttatttaagatacataacaatttaaaggaaaactctaaactgctcatggtaattaaattatttgtagtaggactggtatcgatattctgagactcttgtgcatgtactgtgaataaatcaaagaattatgatggtatcattaagtgctgaggttttgttggggaaggagagtatggttgaaatgaaataaggatgtgagatcaatggggtaaggcattctgactggggaaaaccactctcccaaagatgagcctacaagttgccttagctggttctccaggcttctgtttctaaagttattgtcatgacatctttttaatgttcgcttttcatatgatgaggccaatatatacatattaaagtacatttacatgcatatacacacgtaaacttatttggatagcatgttctcatgcatcgatcacatttctgatttgagataatagtacactaggttaaattcttcctaattgactgtggccaagtctgctcacgcccagcatcggacctcacattctttcctacctacttgttttaagctgctggctccttgcagtcacttggcagaaaacacttctcctcaaacttgcattgtatttctagctttcactcatcaatatgaattttaaggctcccagtgaaaaccaatttaaggtatggagcctgtttaaaacaaggactggctccagtcacacccttattttcagaaaataagcctctgaggcactcccaacatagggacatgcagccaggacgccaagtggtatgctttggtagaaagaattaaaaacaacttagtataaaaacgttagggtatttgttggatttaaaaagtttagctaatgtacatgacagcagacctcaaagcaccagaagactcccttgtctgtaatagagcttcagatagaacacacctcttgaaataatactaatatctattttgggataatataaggtattttctccaaaacacatatctctttcacataacgggagacatataagtaaacagaaatatctctgaagacaactaagtgttgtttaagcactaaaataacaatctaatgaattagtaagataagaaaaaatctatggggagaggaatattatttagtttgggaaaataaatatggtttgcaaggcatatgaaatatcactgggacagaggacaggaaataatactgggcctgggacaggatatgagaaaaacaagatgaaatggaagatgtgagaattcagaatagacaaagaaaaaggacatggcggagcaatcctgggcgctaatgattttctaagaaaccagcaaatccgggtttgttcctgaggatgttccaagtggagcagctgtctatctcagggattttgctaactccagaagccatcagcctagtgcccagtgaatgtttaatactgagatgctttcatgccacctgaaagaaaagcaagagagggatctgtgtccctctcaaagtacctagtactttatggtagcttcattggtttattgcgttgattattcaagattccttggctgacgatgacaagaacacaaatcaaactagcctcaactagaaagagaattaattggcttatataactaggtattccaatgatagagagaacatgagacaaatctggatcaaggcacataccctttcttgctctctctccccccatctgcttctttccgtctcccaattctgtttgtctctgatcagcttttggcctcatattcttcttccatgagcagactctgaaatcccaaacccacagcttttttgtgtcaagtcgtctctctacatagatcagatttcaccgaagcaatcttactgacagctacatgggagatgcttcagcttcctggaacaatcgctggggcatattcctgtgattcagacattggacagacccaagtcaagctcccacaggccactacactggccatttccaccacaaccatacaggatggggaaggagcagttttccaatgaatcccaacaacagatttttcccactatccttccaataagactatttttcctccaagggcatggcctctcaaatatttttggccttctccacactttaccataacatctcctaaatatatgccccataattaaacagatggaaaccagaatttttattgtagacatcatcagtgaattattttcacagattgcaaatacattccttcaatattccattacctgattgtgatcacctaattagcagatgaaaactattcagagtatcaggagcataagaggaacaaggacatgtcaatttgaaaatgatatccttagaaagcatgcctatctacatctcctatctctaagtcataaatggaaagcatttaacatacttactgaagatttttatatgtgaaaaatgggatggttcaggtagcctacagatcctgcaaccgtggtgtgtggaacataggtgtcatgcagaataatctcatgtaataagaggttcagagggtggtcgtgactagcgcaatgggaagctaagtagatacgattccaggccctaccctcactacaaacagaaggtccaagatttcatcctctttcttatttgagagtttcatatttttcatttttttgaaaaagcaattgtactgccaaactaaaaaacttacaaacaagcaacaaattgtattagtctaatcacctcattatactaaagatgaaatagtttctaaatacagatcctaaacttgctgtcatttaaatttcaacacagctatccttttacttcaccaggctgcctttcttaatttgattttacaaaggaaagctttttaaaaaaaactaaaactaaaaaagcatagtattctatgcttgagttcttagactacacataaatatttaggccgtgcttatcagaattttagaattctgaagagcctccctgaactgtcaaaacctctaaaagccacaccatgctggtgaggcgacagagtaaagggaacacttacatactgctggtaggaatgtaaattagttcactcactgtggaaagcagtgtggaaatttctcaaagatcttaataacagaattaccatttaaaccagcaatcccactactgggtatataaccaaaggaaaataaatctttctgccaaaaagacatgtacactcctatgttcattgcagtactattcacaatagcaaagacacggaatcaaccaagatgcccatcaacagtgaactggataaagaaaatgtggtacatatataccacagaatactatgcagctgtaaaaaaaagaatgaaattatgtcctttgcagcaacgtggatgcagctggaggccattatcctaagcaaactaacacaggaacaggaaaccaaatacaacaccctctcacttataagtgggagctaaacattgaatacatatagacacaaagatgggaacaagagacactgaggactgcttgaggagggagatgaggaggggcacatggattcaaagcctgccaatcatgtacgatactcactacctgggtgacaggatcattcatccaccaagcttcagcgacactcagtttacccgtgtaacaagcctggatgcacacccctggaatctaaaataaaataagataaaagtaattcattcaattaaaaaaaataggctgggcctggtggctcacagctgtaatcccagcacgttgggaggccaaggcaagtggatcatgaggtcaggacttcgagaccagcctggccaatatggtgaaactaaaaatacaaaaactagctaggcatggtggtgcacacctgtaatcccagctactagggaggctgaggcaggagaatcacttgaacctgagaggcagaggtcacagtgagcagagatcacgcctgtaatcccagctactagggaggctaaggcaggagaatcacttgaacctgggaggcggagtttgcagtgagccaagatcgcgccactgcagtccagcctgggtgacagagtggtactccatctcaaaaaataaaataaaataaaataaaatggcacagaagcatcaaatgtggatagaagaaatatctacctatgcctctgttgaaatatcaatgagtctgtctaataaatgcctgcaataggctacttaattaaaatgaatagctttagcaatcaccttggttgacaacattcagaatgaagagcaaataatagttaacacttattctacataattactcttcccttccgtacacaaaacatgtacagagcctgggcttggtaacacgaaatttccaataatctatgagagaacacttaaagactttacacttaagaagaataatttttggattaattttgaatctattttccaaaagtaaatgactttttaaaggcctagtcagttaccatgataaataaagacatacactccaagtatttggcacatgtaattacagtaaaatgaacacaccccatatcaagcacatctttgtaggtcaagatggcaataagaaagtatttttcactctggtccacagtgatcaaagggggatcaacactgaaactgtatttcagaatgccagccaaaagctttgaccatgaaagagaagcagtgctggccagttgcccacaagactgcatactacattaggttttaatacatttcaaaaacagagaatttatatagaaactgtgacaatttgaagaagtttgctgggataatcttagaagactgatctaaagacagtctaggacagctgcatgcaattctaagagtcagatctgtttgtttgtttccgagataagcgtcaaatactaatacagataagagctaaaactaaaataccaattcagtgaaaaagctaaaacccagaagacgttttatttcattacctgtctgaagttatttttaacagtgacaggtcatgttctatttcttcactggggtaagagagaatatttgaatgtcccaaatatattaaagttataggcaaaaatgctcacaaaccatttagaaaatgattcattttactgtctacctaatactgagctgaaatactctactctaagctgactgcttagagtatgtttactatctgctaatcctatagctcgcacttaaacaaggctggttggatagataatccagacaaatgcagggttccataacagagcatttttaaatgtcttaggctatcacctaagccacaaacaaaattgatttttccagacatgttccagtgtctgcttaccctttcctgctaccaactgtcatctcactcccctgataaaactcttgacatgttttgcagtatcctctactcccttcccattccaaacagctgtcttcccttcctggcagaaactccctgacatctggatactcaggatggctactgttatgatggacagattccattttatccaactacccagctccgagaatataaaaatgagcaaaaggaggagaagtgtgatagtttcaccagctacacaaatactagttcaagtaatggctatattaaagcattagcatgttgaataattttcttttaaaagtccaattttgtgacatctgtaaaatgatacagaatgttaaaatgcgatgattctgaaagaatacacaattacaagcttcctaaatttctactcaggtaatgacaacaaatccaagcccatagctcaaacataggatttctgcttcatggcctaatttgatgtttttttactagatttaagaacaaaaacatgtgtgttagatgaagacagatgagtcgaagaaaagacaaaacatgagtcactttccttgagctcatcgcccatatcccatcaatcaccagttccactttgtgctgcttcctaaatatgtatcatctcttgcatattctgctacactggtttcttaaactgttttcctatatccattctcccactacttcagtctattctccataagcagccagtgatattttattgaagtgcaaattgggtcatatcaccctaacaccccctttctaaatccaatcagtggtcccccttccttgtagaataaaacctacgctagtccacatggaccctaaagctttgcataactctggtcccagcttctctctggcttcatcaggagcctgtcttcccctcactcaacatattcaaaccacactggccttccctccattatccaaatgcatcaaatttctcccattcctaaggtctgctttagcacttttctctttgcctggctccctcctgcccatggttcagatctcaatttatatgtcacttcctcaaggaattactctgcaatcaactgcaatatgttatgtatccttttatatctctcatgggatcatggaatttttcttagcagcacttttaacaactgtatttaattaacatattaagtcagacattaaagagatttgcaaaactataaagcaatgccattctcaatttttggttttgaaaaattgttaattcttgtttaaaaatgttatcttaatgtgcaaaatgtttattattgttttaaagtattattttaaaaaaattttaatttctaatatggcaaatatcaatagatttaacaacataaacaaaacttctttcggtcgtcaatcttttttaggagtataaagggattctgagatcgaaaagtttaagaaccactgaataagaaattaaactatggcttgtgaaagaatgagatactacattttaaatcctttaggaatacttaaaattgtagttaaatatattttatgtaggaaacaaagctttcaagtaatgttgctaccttagaaagaaaatgcttaattcttatatactgctaagagaattataacaggattgtacagctaggtcataagcaatgtgtcaattataaaacagttgataagaaagttcaacttgccatgacaaacatagtttacagctttaaatgaacaattttttctttgaaagcattctaacaaatgttatctttaataacaaacacatatggcctttaaactttcaaggcaaagattcttgaaaatcataattaaaacaaacctttcgatcttacagaaaagttcttaacagaagactaacaattttgcaatgacaagatggtgaatatgtgctcaatactaattacagtcatgatgactgtgatatcaacaaacccatatatggtacttttctaagagcttagaaatcagccttagttactattattattagcccaaggatatgtaacttaccctgcatctgacagctaagtaagtgacataaatgaggtttgaatccagggtctgagctcttaactctatactgcctacatacatacatacatacatacatatatacatacatatataaattaacctttcttatcctgcttctaaacaaaggtaagggccacccagtcaatgctttgtattcttccaatattctttcctagaacttcttcaaaggctctcatgaagcactggtgaaactggaaatcactgaattttactaccattttaaccaaggctgaatcaaataatttagaagttaatattgtttatttacccagggtctatctacccacattactctcattttgttcacaaattatctaatttcctactgcatctggctttgcttattttgggttttcattgctcctgaagatttttctggcaaattctgggtttctgcccctcgtaatccttctgtggacattcaacatgaaatactaacgttcctaggccactggactcttggaaagctaatgctgtgaaatctttgctttgtaatagccctatactttgttcaatatctatttcatctgtgtaacaagtattataaataataaaagttgggagtctccagtaactgagaaaattctacccaaagtcaacatatttatgttaaacaaaaggtagtttgtattctcaaaatgaattgagttattgggtctgacatcctcctgattaaaatgtaaacttattattgagtaacgaactttgaacatagtcagaattttagagaaacatcaatttaaaatatataattaaacagacagagggctgtaagttcatctgacagaatatgtttacttttgttgaaatgttaatgatgtcagtgatacttccctgtcccccttcattaatcttgggaaaataaactatctgtttctcctcaaagctttgttctcctcactccatttcttcttgtcctcacccagaagctaatgaagtaaaagctttagggcttcttaggctaacaccccttctaagatcttgtatctaaatgtgtggttataattgtgtaggctttatcctaaagaggataaaaattgcataagattcagacgctactcaacctggatctgccttacgtgagttgtaaatatttcagtcaacttgcaattactgctcatatttttgtttctctgtacttgcagccgaggaaaatcctttggagtggctcatggacatcagtccccctgatacaaaagcttattttggcaagaaagtggcaaagaattacaagtcaggatagaggctaaacatgaattttagatctaaatttctatcaataggtaattagatgaaaaacaataataaggtagatccatatcagagacaaagtggaggcctctagtcctaaatgggcctgaataatttagaaatgtaacttaaaaatgtttggttttgggaacattttatgtaaaaattcaggtgtcaaaaatcagacctgataaaactgggtataaatgctctggcctgaatatatttcctatctacctcccttcactcattttcaaggcctgcctgtccccacctaagttaaatttaggcaagcccaaagggttattattaaagttatattcctcaaattatggaaataatgcccaagagatattaattattaaaaaaaataaatcaactgacataatagcattcataatagcattcatactatgtttcaacttttattttaaatgatttatataatttctaagatgaattcaaattatttattatggtatacagtattttttaatattcagcagaaaaaattaagcacaaattttattttaaataacatttcctaccacctttaaatataacttcagtagcagacactgtgttgatggtttggctaaaggaggacaagaaaataggacctgctcaaattcatgcatggtggcaacaaaaattcagggatcatggcaccaaaaatcttgttttccaggatggatcacagactgaggaagcacagattatacatttagagccgacattcatttcttcacagcagtattagaaaagaaaagccacagtcgatgccatttccatctagctgcatccaagcctttctgcatacagagaaatatctaattacccaatacactagagcaacgtgtggggattgttttaatatatattcacagcatgtgtcattatggctcctggcggctattaaaagggtgggctagcaacatgaattaacaataacacatttggtatatgatggctttataatgcctaaagcatttagctagtctcattattcttaatgtgccctacagctcacaagaatcatgtaactgtgtattcagctggtcccaaatgctaaatggaaagcaaaatatctcctaaaagtagttctgagtaactgctatgtctagttttcttcctttttcatcaactaacatggcatatgttataatcaacagatagttctgttttcagaacgtttttttccttttgttttagacaagcagaacaactcataatagtagacaacttcaccaggagaacagcagttcagtacaacaggaaggccagtgtctccccagtaccacctgcttaagctactacaagggttcccttaacagagatgcctgcctctatccatcctcctacagcccattctccagtcagcaactatagacatctgtgaaaatatcagatcgtatcacattactcttcagctaaaagtactccagtggcttcaatatgtactaagaataaaatgcaaacttctggtcatttcccacaaggctccttcatgcggtggctgcctacttatctctgcaacttctgtttgtaccattctcattactaaacctgaaacacggcgcacacctgtaatcccagctcatagtcattccagtcattccacacttttagcatttcatggaccctcagcctggaatacccttcccatagatcttttaatgactggctccttctccttcttcagaattctgcctaaaattgatctcctcagagactatcctatctgtagcaaccattttttcccaattctctatcgctgtcctatttaattttttttttaattaggcctagtagagtgaaattagttgttttttcagcatgatttcttatcaactatccctatataaatgtgggtatgcacacacacagaaattcgcattccattaggagcacggccttatctatctttcctattatcacctccccagtacgtggaacagatactggtaggcagtaagtgctcaaaaattattgggcatggacaaacgaacctgctagttaagcatttccatccaggagacaatcaagggagctcaacttgggaatgtattcaaatcaactctttgaaattccatctaacaacacaggaaatcattctctcttatttatttattcatgcattcattcattcattcattcattcattctgagccaggattcaagtcctagtccctcttactagggcagaaaaagtataagctctcgagaagaaattatattcttctaccctcccctccctgttcttcaacttcagtcattcacctgctctctggtatggtttctgccacttctgtgtattacaggtaccaactttcactcaatgctcttttcacctttttacaatagcctcacactaagcattaggttggtgcaaaattaattgtggttcttgccattaaaagtaatggcaaaggccaggcagggtggctcacgcctgtaatcccagcactttcggaggttgaggcgggtggatcacgaggtcaggagttcgagaccagcctggccaacatgatgaaaccccgtctctactaaaaatacaaaaattagctgggttaaaatattattttaaataacatttcctaccacctttaaatataacttcagtagcagacactatgctgatggtttgactaaaggaggacaagaaaataggacctgctatggtgtggtggcacacgcctgtaatcccagctactcaggaggctgaggcaggagaactgcttgaactcgggaggcagaggttgcagtgagacaagatcgtaccactgcactccagcctgggtgaaagagcgagactccatctcaaaaacaaaaagtaatggcaaaaacctcaattacttttgcaccagcctaacagtaataactttaggataaagagtttgctaggactagtttttcctgaattacattacaattactccttgactattaaaacacatacccatacgtatgcatttacacgtatttttccatctacaatagtctcctccaacatttgggaaaactggatcagagatgaaggaagactttcttccagggatagaggctcccctcaggcagaatgacattgcagagtccctggagggctcctaacttttactaggcactcagtggtgtcatgctctgtgctttatttattacaatacccctttgaggaggtattcatataatgtattttgcaggggaggacccaggtacagggagcttaagtcaataggacaaggtcacatagctagcaaaaggcagaagtcgtgttcaaattcaggtccatctgggcaccagatccattcttggaaccgctgaatcatacatcatctttgcaacacgtaagcgatccatgctttgttttacaatatacttctttcctaaggtggtaatccgagagcttttatttacttattttatttactaatctaaaaactgcacacacccaccttcccttcaatattcccaagtaacaagcttgttgagaaaccctactgaaaacaagctgagccttcttttcattactcagtgatttttaagtgttgctagtttttataccattagacttttattttcataattataggctgccatgggcttcttccaaagccccctgccaagtcttcattcctacatacaggtgctaattgctttcttagcaccactggttattctctgaacctttggatttcaccacctacaataggaccctgggtttttctccccttcagtaacccttagcacaatggtcacagtcactccatggctgacttggttctggcccacaagtctcatctcctcattctcaaagcggagtcaagttaattctgtgcccgtgctgcgtcctgttctctctcaattcttggtcgtggtgcttgatcctcaggttaaagcaactgaactctagtagctttgaaacaaacttgtatgtttcctcctcccctccatatagtgtgaactatatataacttaaacattaacaataatagcaaacttttattgagttcctatcagtctccacaccaaagcctctcaacaaatttatttcgtaaaaaacaaacaaaaacgagcaaacctccctgtggaggagtaccgattttatcccccttccgctatcttccagaagacagcactgaggttcacagaggagaatccattcttcctggttccagagtccgtactctaaagacccactacccactatccctcttgtgaaaactgtcccaacctgatcctgatgcaaaatgatggcaaataaaaggcagtagatagatttttacagtaaaagagaaacagaagataattaacttgagttgtgaaaagaattcaagaagggagatgcttcctttcaagacatataatctgctcctgtatgtctttcacttgttcttcaaggaatcttcgaaatgttcccctcacaaagtttctccttatgctcatatccctcctaagccatccatgagggtacccatgaaggcccagttcaccggagctgcctgacgtactgattatccctctctaaagcatcctcttttggacaacaaattatatgtccacccaaaccataatctccatgagggcagggatgtgccttattctcctttttatctctcaccaggatttttattttattttattttattttattttattttattttatttgacagggtcttgctctgtcacccaagctggagtgcagtgtgtggtcttggctgaaaactccggctcccaggttcaagcaattctcttgcctcagcctcttgaatagctgggattacaggcatgcaccaccatgcctggctaatttttgtatttttagtagagacggggtttcaccattttggccagactggtctcgaactcctgacctcaagggatctgtttgcctaggcctcccaaagtgctgggattacaggaatgagccaccacgcccagccaggattttccgattttaaatcagtactggagtaatgcttgctaagaagtcttccccccaagctaggtagaatttcgtcattactaagtccttcatagcattttgtgttcgtctctcttacagaaattatcacatgccaactttaatagttcacagaccatatatgccatgcctctgtggcaggcctgagtctccactcatctttgtatccctagatacctgattagatactttatccagtgacgtggttaactacatgctgaccaactgaactcaatattcttttgatatcctcattttgcaggcaaactcttactgtcctgccaatggaacagaaaatttgagagttgtgagatcaatgatacaccaagtgctggaggaaagaagacagagtatctgtacctggagaacaggagaaagtttagaaacagggctaaaggactaggaggtattatctaggtataaatgtctgggtattagggatgggagagagttgagagaacctcccaggaagagggaaaagacagggcagatacaagacagtctgcacgcagaatggtgtgagtaggttgtgtggctcctgatggctgaagtttaaaatcagaagggagatttgagtagacgcttacttctcaacaggctgttctgttaaataccagagcaacagtaaataagcatttaatgcaaaacttgccctcttaaaacagcgactttgggatcatcaaaactgcattgtaactgaagataacagacggacaggggagcaaatagatgacctcaggacagcttatttggggctgagacagaatacagcattctctctccacttttgcacttccctcagcagatctacagaactgcagaggaccaagtcctgaccaggaatgtgaccataccaaagggaaaacagtcatttcaacatttctgtgggtgcctgtgctgaagggacccagtgaggctgggcgctctgtttataaaacataatacgaatcatgggactaagctatttagcagagcagcaatgggacagccccacagggagagaaagggtgaggagatgttaacaaatggtctcaggggaatccatttggggaagaaggtcccagtggtgaagaaggaccagaggacttgtacaacagagctgtcttctgttcaattaaaaagcactgttggctgggcgcagtggctcacacctataatcccagcactttgggaggctgaggcaggcagcccacctgaggtagagagttcaagaccagcctgaccagcagggagaaaccctgtctctactaaaaatacaaaattagccaggcatagtggcgcatgcctgtaatcccagctattcgggaggctgaggcaggagaaccgcttgaacccgggaggcggaggttgcggtgagctgagatcgcaccattgcactccagcctgggcaacaagagtgaaactccgtctcaaaaaaaaaaaaaaaaaaaaaacactgcctgcctgcactatactaacatgttctgtaatccctctcctttaccctaagcctttactgttgctgcacacaatgattgcaggattaaagcactttggaaaaatgaaaaactgggaacgtgtccaggctgaaaggaagcatggagggaaaacaacagttggttgtctctcgagactagatatagaggaaggagggagaatcaggaaggggacttatggggtcacatggatgtgtctagggataagaatgagaagcaaataatcatacagccctatggccttgagaagtgctggttttggagcacgcatctatctgtggacactgatatcccatcttgtctctattgtcacgccacttctctatgtgaatgtgagccattatcttctcctctggctagaacatctatctacctaacgtagtaaatgaatcaaatttaatttaaaggaaaatcaaaagtcatttccatgcactgacataagaaagcacttaatctcaataaactagcagttaggatgatgggaaaatctacaagggctcagaggtatgcagcaaatcaaaattctccccatttgtataatggaacaaagccaaagtaagctttcttcctggcctaaaccacataacctaacacctgttagaaaaatgggctggggcaatgagctgtgaccaccggtgattcaaaggaatcactaaactctccccaccagtttcacagaactgcattggaaaatgacttttaccaagattcttaataaaatcaacatctttgcctgtttcatacattattagattttatggcatgcatttcagaactctaataccttaactctgtctacaagtgaggtgggattcccgaaggaccaccatcccacctctgaaaatattttcattacccaagtcagaggaagtgaagaaatgaaagcttcctgaatctggccagctaaatagcttgattcaagtgtgttatgttttcattatttacatttcccttggaatttgagggctgtcttcaaattttgtgacacctgtatttttttcacctacttctgttcagtgatttcctggaagaaggaagaacacggctgaaatgaacaatcaacgaacactgatttaatctataccacatttacctccaattaggtaaatcatggatcactgtttaaaaatatttttacaaggccattggataaaaacaagtattaggtatcagtcagtgctctgatttgggaagagccatttacggtctctaagcttatgtcatctcatctgtagaatgaaagtgactgattccccacatggcttccaactccaagaacttctggaatgctgtactgacactcatacagagctgatttggggttaattattgtttttcatttctgcttccttttcttgatggattttatcaaaaagtgaaccattttaaaaagcaattactggacattttttaagaactgcaggggagctggagatagttgcaagagggagacctattaggtttcctttttcttttactaccacttaactttttcctccaagcctcttgcctcacaataaacataaaaacagatgaccctatcactccagactgtccttcataatggcaacaacaacaataatacaagcttttaatttttgaactcccactgtacggcagacctttatctcattattggaaggagtataaagtaaggcatgaaaccactggctctgacatactgtatgatcccatttatgtaaaatgtccagaatagacaaatccacagacacagagcaaagaaaattagtggttgccagggacattaagcataggagaatgagggtgacttcttaaccagcacagggctttcttttgggaagacgaaaatgttctggaactattaatagacaggagtagttatgattgtatgaccttgggaatacactaaaaaagccactgaattgcatactgttaaaaggtgaatttttttggtatgtgaattatatctactaaaaagataaaatttaaaaaaataaaacacacatccatggctctggatggagattgtccaggttcaaatcccagccctaccgcttctcagcttttctaagcctaagtttctacatgtataaaatgggagaaatgacaaatacctcacaaggaaattagaggactaaataatgctacgacttttaggtacaaaggccaatttatagcgtgttttaaaaatattcttacgagacccttgaataaaacaatattagataccaaccagttctttgatttgagaagagccactcctggtctctaagcttaagtcattttgtctgcagaatgaaggggactggttccctacatgagcatcccataaattttcctattcttatgtaatccccacaatagttctataaaatacgtagaacattactgattttagagatgaagaaacatcagtaaagggcaaggaagttgctgagccactaagtggcagaggtgagattcgagaaatgtcagaatggaacctcacactcttgagtgacacaccactgcctcctgacccacatattaataacccagcatatgtacgaactgcttactgacttcttactatgttgcagaaactcagggacagtgccctcaagaaagtcattacctggccacttgcagtggctcatgcctgtaatcgcagtactttgggaggctaaggtgggcagattacttgaggcaaggagtttgagaccagcctgggcaacatggtgaaaccctgcctctaccaaaagtacaaaaattagccaggtgtggtggtgagcatctgcaatcccagctacttgggaggctgaggcaggagaatcacttgaaccagggaggcggaggttgcagtgagctgagctcctgccactgtactccagcctgagcaacaaagtgagtgagacatcatcaaaaagaaaaaaaaaaaaagaaaaagaaaagaaaagaaagaaagaaaagaaagcaagccattacccaagatgggagaagaacaacagtgcccagggattaaggaaattaaggaacaggtgtacacagtaaaagtataaaagtagatatttttaccatataattcagaaccttctgtctttagaaggggactttcctatcagggaaaatccagagtaactgggctgagaaaaaacattatgtagatgaacttttgagagtttctaagaaaataattaagagactgagtgctgtggctcacacttacgtataatcccagcactttggtaggccaaggtgagaggatcatggccaggcattgaagactggcctgggaaataaagcaagtccatatctctaaaaggacttttttaaagttagccaggcatggtgatgcacgcctataatcccagcttctcaagaggctgtggcaggaggacagcttgagcccaagactttgaggctgcagtgagctatgattgtgccactgcactccagcctggccaacagcacaagaccctatctctaaaaaagataacaagaattaagtgtaatcggccactcacctctatgccaaataccatattttacttaagatttcaaatctcgttgttcaataccgtggccactagccacatgtagctaaatttaaatatattaaaattgaataacgttaaaattttggttcctcagttcacaccaccacatttctagttcacaagagccacacgcggccactggctgccataatgaacagaccagataaaagagcatgtctttcaatgcagaaagttttaagggacagcactaatctaaatataaaatcacatcattcacagtcaaataataagagaaaatgcaacattttatttcatatcctaaaaagagatttggtatccaagtgaatacctggaactactataaatgctcacctaagttgtaagatgacattataatttcttatctacactttaaaaataacattatctgatcatattgctctggtgtaaagattttccagaaaaaaaatcactttccgagactccttatttttaaaaatcgcagatagcataggcaaacagataatgaacatgtaagctcactgcatctcagttttgaaatggattcaattcactggtcttgaaaagaaaagttcaggacattggggaaaactcagttgctctggtctctgagttaatagccttatgagtagaatgcctttttgtccaaagaattctcaaaatagtattatttttgtttatttgtgtttttgagattgaatctcactctgtctgctcaggatggattgcagtggcatgatcttggctgactatgacctccccatcctgggttcaagcaattctcctgcctgagcctcctaagtagctgggattacagccataaaccaccacgtctggctaatttttgtatttttagtagatacgaagtttcgccatgttggccaggctggtcttgaacttttggcctcaagtgatctgccctccttgacctcccaaagtgattacaggcgtgagccaccactcctggccttaaaatatttcaataaccattctaatgtgagcagacatggtagtggcaacaactcggaaataaaataatcttatgaggtttggtcaaatacgccaataaagctcctctgccatcttgcctctgagccatgctcatatttgtgaaatgggaggaaaaatttttctccttctttgcagatatattattctccttctttgcagatatatatgtgtgtatatatgtgtgtatatgtacacatacacatacacagaagcgcacacatatccaatagaagttggtatctatcatccagtacttcagtttttaagtataactgacacacatatacatataaattcaattaattattttacagtctgaacactttcatgtaaccaacgcccagatccagaaatacagtattaccaacacctcagagtctacctgccgcagccttccaggtaccctcaagggtaaccaacaacctgacttctagcaccactggtgaactttgacagtttccacatcttacatatgtggcactcttttgtgtctagcttttatcactgaacaagacaccatctagttttgacagatcttcgccacaaggcagccatttaatgctttcctgccttatagaataactaatccttattgagcacatattatgtgtcaagtgctttacgtgccttgactcctttaattcccccaaacaagcttatcagtaaagtattattattatccctattaaatagatgagcacattgatgtgtaaaattggctaggctatagttcccacttattcagttacatactaatctaggtattcctgtgaaaggattttacagatgtaattcaagtctctaatcatttgactttaagttagggagattatcctgggtggacctgatttaatcaactgaaggccttaaccatagggctgaggcttccaggagacagggagcataaaataaggagggaagggggcatttttctggagcagataaccatgagcaacaatcatccattaacttatacatgccaataacagatgtcacaccaactcaaagacaaggctcttcagttcattcttgaataggaacttgtagtagaaatggtatgtgccacattatttttcaagccagccctgatgtcatttgttcatgcacactgtccctgtaagaacactctcatttttcaagtcctgcatcatatttcaagttgggaaaaataaggtcactctacacatggtagggtgatggaggtgtttttggacagccagacttttcagatttactcatctttaaaagcaatctcagtgaaaggcttctcttgagtggatctaaatagatctcaagtaaacctaggagattttttaagaacaggagcaatttcttccattatcttatcccccttaacatatatcattgagcaggactgaagggaagtcttggtaagtacagatgcatgttatcatttgtctcctctttttctattgaaggctgattttaaggattttccattttcagaggtgaaattaaatggaatccttagttttcccttccaaccctcaagacttcctcctcaagtcttctccatctcaattattagcgtcccacattcgctgggtttcctgggccagactcagtagtgatcagcaagtcagttctgcctccaggcatatcccaaagctaaaatcttatctccatctccatctccagtataagcacccttgttctgaccattctgtttgctaaacacagacaaggagacctgagtgatctcctggcttccactcctgcccctctaaagccatgtcatatacaacagagagctcattttaaagctgcaaatgtagtaatatcactctcctgcgtacaactccaaatgagactggatatgtgatgacactaaggaaatactgtcaacttttagaagtgataatgatactatggctatagtttttaaaagagttctgatgttctagagatctatggtgacaaatgacagcatgcctccttcaaataacactgtgcagtggtggtgactgggaaggggtgcagctggagagaagggataggtaaaataagatagaccatgagctgataattattgaaactcggcaatgggtacattgggagtcactatacttttctattttcatatcttataacatttttataataaaaaactattaaatccccaatgactcctgactgcacttagagagtaaaatcttaagaacttgtatggctcaaaaggtatttaatgatctgactgatgcctggcaatccatgattttatccagtacccagctttgtccattaactgccaaacagctgtaacagccatcccgtgccttccagccctttgccaccataggaccttcagacaggctcttttcagccttagagggctcctccccaagatgtgccagatgtgcccagtgttgggctccttctccttcaggtgtccactccaacaaactcctcagagagggcctcctccaccatgctacctaaagcaccttccctccccgctctcctcctgcccacccctctgcacccttaccactctacctattttctttcattatttcttcataatccttatcactttttgaaatcatcttttctcttaagtccttttgaaaaataagctgatatagtttggctgtgtccccactcaaaactcatcttgaattgtagctcccataattcccatgtgtcatgggagggacccggtggcaggtaattgaatcatgggggcaggtctttcccatgctgttcttgtgatagtgagtaagtcccacaggatctgatggttttatgaaggggagtccccctgtacatgccccctgtacttacatcttgcctgccgccatgtaagatgtgcctttgctcctttatcttctgccatgagtgtgaggcctccccaaccacgtggaactgtgaatccattaaacctccttcctttacaaattacgtctcaggtacatctttattagcagcatgagaacagattaacagacaagtcacttattatcaatatactccccatactagaatacatgctctgagatcattgggaccttgtctgtccagttcacttgcatgcttccagtgcctatgatagtgcctagcataaaagtaggattccaatgatgacacattacacaaatcctttaaatcagaccagacaattaaagctgtgtacatagcacagggacaacaaaaaataataataattaatgccttggaaagtgaaattatccttacatgtatatatctgtagtattaatgaatagttaacactaacggatttcatttgaattaaacatatgtcaacataatgaataactacttacacatattaacacaattaatgaataattaatacctgtgagttttctctgaattgcattcaatatatccatacacaatacatgcacatacacatatagtctttatttcattattctgataccgaatatataacaccattgttggcttatatgtaaggaatatgacagtttatgattgctatatctcgagcaggagattttgctaaatgtattgttgccagagcttagattttaaaattcatttctaagtcttagctggtgttaaaccatgtcagcataataagcaagttttgatttcctttcagatgttcctggctgctgaaagaattgattttgaagattttcccattgacctatagggctgtgaagaagagatagctcttcttaatctcaaagatccaaactgagtttacattccccagcctttgtttggatgtcaccttcagagcttgcttcattatgtgtctcaggagaaacacagaagtattagtgataggacactgactggtagactttaatccttctttgagatgttgtttaataatgatggtttagtatcacattcgaggataactgtagttagttaatatttttacttttaatatacctactttcccaagtacaaatttatcctggggctacgtaggtgacccaagtgcatcaggagcagtttcgaacaaggtgtaacttctcaacgttacatggaataagagagagattcaaaaatcacatccaaactcaaacatcatttcaaaggtcctttcccatcttcctctccccaaaaacaactaaaacatggcatattgcatctttcaaccatggtcaaaatccttctctgttaagtagattctatgtatttttaaatatctatgcttttgtttgttgttttttttttttttgagacagagtctcactctctcacccaggctcgagtgcaatggcgtggtctcggctcactgcaacctccgcctcctgggttcaaatgattcttctgcctcaacctcctgagtagctgggattacaggcacccataaccaagcccagctaatttctgtattttttagtagaggcagggtttcaccgtgatggccaggctggtctcgaactcctgacctcgtgatctgctggcctcagcccccaaagtgctaggattacaggcgtgagccaccgtgcccggccatatctatgcttttaagtattgttttccttctcagacgtttgagaaactcaagaaggaaacattgtatacagactcagacttaacctcaatgtgaacatacacagcaacatcattgacagtctacagttacatgatctcaatggcaagtgtggtccactgtgatgtcaattttataaagggaagcttgaaaaacatcacaacagaaagaaagctgtcatgcttgctttgattaaagaggatgtagtatgtttcataaacaggttagttctcacaggaaggttcaataaatggaagcaaaaagcaaaaactcacaatggagatcctcccagtgtttgaattttaaaaaataaaggtcagtttatcactagagcgttcaattggctccagggttcatagggtattgttagactagagctccttttgctaaaaaacccagaggacttcttgtattttgcttctagctatctgggtctgcttttaattcctcagacatactcttctgctgcacgtagttctcacacctcaagacccatgagtttgctgtctgcccaaatgcatcttctctatctttcaacatccaagttgaatgcaacttctttcagaaagccttccatttccatgactagtacctcattttcaaatcaattccattgttctaagtggtttgaccttgctgggttcatgctttaattcctctgattgtaacaataaaaagtaatttactttctatgtgtttgccacacatactagatgaggcccttgaggacaaagatagcatctcatttgggtctgtgtccccagagacttcctcctcagaaaatgttgaatgaaagaatcaaataaataaaggaatgatgaatgaagcaagccaacagcacccttcaactctcagtttgcttcaaatccccactactacccttccattctatccccagtagaatttttctattctcttttcagtcttaaacactgttaaaatttcaaggtaagcatcactgaaaactgaagtgctgtggcacaatgggtttttctaatgaattatttatctgtaagcagtagttcatattcacatattttttagagaccagttgcctttctttgtgaatggatatgttcatgtatccatctattagatgctattgtcttgttttgcaaggcaattgagtgttttatttccttttttttacttatacagtaatatttgaaaatattctcactgtaaaaaattcaaaccatatagaaaaatataaaaactcccttatcactccttttaatccactttcctccccaaaagcaatctttattatcagtttcagatctttttctatgcatttagctacatatgcacatatacaagctttgtgtttgggtaggagtctcatgcatatgtagaatcataaggttttataaacttctcccttcaattaaccatgtatctcagagatagatagtcccagataaggaacatacctcatccactttaagtactagcattccacactttggatataccaacatttattcatcattcccatggtgactaaaatatattgatactccattttcactcttacaaatcctagatcatatttctttatgaaaaagcaccaagagttttcaaaaatagaattactaggttgaagggtatgcacagactggcttcccagagtatggaactgtttatttctccatatccttaaaaattgtgaatattaacaggttttgtttttccatttttttttttttttttttggttaatctgatgatagcacctatttcctacatgacctaaaccagttgagaaatgcccatatttacacctaccatggtgtgttgcgactggaacaggttcaagtgaaatataccaagtgactgctaacagcctcctacctaactcctttcagcttacatcccagtaacataaacagggatccacactgaattcacgtttaattatcagaagacagggaccttgatgagtgtcttcacataaactatcttgtttaatcctcttagaatcctgtgaaatagaaacttttattcctgttttatgtttgaccacagtgaggcaggccacccaagatcacaagattgtacttgattccacaaagcgctccactgaccccaaattaagaaactgccccatacttgcattcggtttgcagttttccactgttattgcttcttggtgcctaatgtaactacccacataaaaactgaagatgtctctacctattattttaggaaaagctctggctttgaaaatactgaatttttctgggagaagcagctggttagaggcaggtagaaattaagaatttgtgggccgggcatggtggcttatgcctataatcccagtactttgggaggccgaggcgggtggatcacctgaggtcaggagtatgagagtagcctggccaacatggtgaaactccatctctactaaaaataataataataaaaaaaatcagccaggaatggtggtacatgcctgtaacctcagatacttgggaggctgaggcaggaaaatcgcttgagccttggaggcggaggtggcagtgagccgagattgtaccactgcactccagcctggcaccaagcgagactccgtctcaaaaaaaaaaaaaaaaaagaatttgtgtatcagcaacaaatacaaactttattggacactccctccctttcttaatgagttcctcaggttttttccagaactaaaccaagtcatgaaatgtcagataataaagcccttaagtattaatgtacagtataggtgaatggctactgtacttactctatcttagcgatatttaataatattaaatgttttaaaactatcctatctaagaatgaaataaaagaaagccatggttttattatcttaagaaatttataccactcaactagctgtactaagcaaaaaaaaaaaaaaaaagtcacagcaccatggaaaatgaacacaaaagatgctttctaaaatgctgaaaagcataaaataaaagattaaaacatttcactatgcatatgttatgctggaaccttgaagctatcgcctacatgagaatggtactttaaagattactgaatatgttttctgaaagtatagaatgatcgattcatttttcaaacccttagtgtagttgcactcttcctttccctgacagatgacaaggctcagggaaagcaaagatcagagctgaggaacaacaaaaaaagttggcacctgattcacttccccttcatgccaaccctgtttttctcccttatcatacaacaaagcaaaaagaaaagtattgaatatgaaaaccaaaaagattccccatgactgagctttggcaagtacaaatgcattaggaatggagctgattcctgtgaccttttcaattatgataatcctgcaaagaaaattaaaatcattttctaaaacatggtccaaggagttccatagataattgaagaaaatatttaggaacatccctggcatttttctaagaatgtatatacttagcccaggtctgttgcacactgcagccatttcagccatgagtatttgtgagcaaaaggtcaaattaacttgagagatatttttgcaaagcctacttccagagtttttgcccttcattttttcttttgtatatatttacattttgaaatgggaagactgaaaaagagggaagctatatacttgtttctgctttggtctgaaaatttggtagttgaatgtacttctttttgaaagcatctttttggctgggaggagaggctcatgtctgtagtcccactaacttgatttggaaggctaaggtgggaggattgggtgagcccaggaatttgagagcaccctgggcaacatagggggaccccagtcttttaaaaaataaaaaacttggctgggcatggtggcacatacctgtagtcccagctactcagggggctaaggcaggagtgtggcttatgcccaggagctcaaggctgcagtgaaccatggtcatagcactgcattacagcctaggcaacagaccacaactcaaaaagcaaacaaaaaacagaatctttttgttttgggcatgaaaaataagtgaagaggctttagagttcctaggatctccactggatttctaacaagcaaaagtttccctaaagcatggaaaaacacacagatttaactatatttaaagtaaaatgatccacaaagctcatccttgcccaattctcatttaatgaataagaagactaaatacttcagaaaatcaaagactaccttactaatagacttagataaatggatttcagtttagacccaagaagggaagtcaaatctatagatacagcatctaagaagttgagaccttggttctctattctactctccctattattggccttatgaccacaagttggtcagttcgcctccctaagcctcagtttctcacagggaaaataggaatattagcaaatgacagagcaaattcacaggactgctatcataggattaaataaaacaacacaaaaaactgtaaaaattatataatacaatgtaaacaagcaaatggcataataattatttgtccttgttcaccaagttaggttttcaatatcaatatgcatctccctaccacagcaggacagagacagctacagttactggaaactataaaatgggttccagtcaacaaaagccattggactgctttctgattcttctaatagaaaatcagagcattagtaggagagaatggggaaaaaaaggctttgcttcaaatttatatttctgttcctgatacctattaagagccagttatgtagctattaagctacagcttgcaatttaaaataaataaactgataacaaaacccttaaatttccatcatcagagcagatcaaactacaacatatgctaccgaggatgcaaagcagctaatgaagacttcaatatcaggattatgacccttaatttcaataggaatgtgttctgttgtttgagctcacacataacgagaaaaaacatcacggaagcacaaataaactgtctcattaaaaagcactttgccttggtccaaatataatttcgtttttatacaattcaaatgctatagaacaaagaaagagaaggaagagggatgataaatgcagaggacttgggagggaagcctgttctgcaataattgagatggaaaggagggttcaacctgcactcctttgtttgtggagacaaagtcctcaacagctggcagatagcaggaagtagaatgctgatggctttgcagttagcttcaaaacctattagcaaccctcagatccaagagctgtacctgctttgaaataaaccaggaaatagggaataaatcatttcttctggagggaaaaaaattgtttaaagtgattaaaacatgccacaggtttctcacacaggaggaattaaggaaactatttcagaacttaatgggacctgttaaaaaaaacagatttgtaagaatttaaaagtaaatatttctttatgcaaacttatcatagtgagtatcttttaaatactaaagctagggatgcacttgcaacagtttttaggaaacgggggtggaatggggaatcacttcactgaagaagtttaaagacatatttattcctctgtggattccatttcttaaaagactgccctgaaacttcttcctaaattctgtcataattccctaagacagtaccaagggaattatcattctttattagatgccaaagaaacataacaaggatcacaaatgaaacaccagaaaatttatcaaataagattggatgtacagacccattctaaagagcattccttctcccccatgttttaagtcaaatttatattaaaaatcttgaattttctaggaattttaagtactgtcccctaattttccattaataagcacgctcatgagtatgaaaaaaatatttatttacatgcatttattataatgggccaagaaaatatttctatgtaaaggtactatcttcctattaatctgtagtttttttgctttttttgtaagggttgaaagaaagagaaaagcaacagattgcaggtggggatagaggcaaagagagataaacggtagagaaaccagttctgaaatgtcagggaattgcctggagagagttaaatatactgtttctgcggacccattcccagataggtaccgcctattcctacatatgaagagagaagagatgagttatattcatgactagtaggagttagtttatcttgcttctgttttttaattttactctaagacaaagggactgctataaaagaggaagaagtggagcttactctaattactctttattattctcttgatcatcatcacctctagtaattttgtaattcattacagtaatttatctaagtttccaaggattttaatatgttctttagctcctaggtagagaaaaattgtggtaacaatcaaatgactaatcacaattattggttaggaaaatgaaaatcacaatgcaatcattataaaaacagggtgtgtatgtaattacactaaaacttcattgatttaggccattattaatatttggtaacaactaaaaatatgtattatctttcacgttttatttcttcccagcttctccagtatgaataagaatgtatacaagaggatgttaatgaaaacaatcttacagcatcacatggtattaaatagatttttatctgtagctgtatatttcaaataaaattgatattttgcttattttcagaggaaatttgtttaaaatcctataatatttcatgttggcttcaaactctatatatttcaccccaaaccgtttctcagtacatacttacatccttttttcattaacatgttcacaaaacccatttgggtccttatttttctgcaaagtacatattatttccaggcatgttctatattcgtgtgtatgtatgtttgcttctccccaatccacataatcttcatgagataaattatattgccttcttcactactatctgtagcttcaacacttagaacaatgccttgcagagagcaggtacttgaggcaaagttgactgcttagataactccaatacctcttcacctcttcccatcagtaactatattatttatttttagctgagcacagggatccccgaaataaagaccacatcttctaatttcaagttgactgcttttgccccttcttctctctttcattctttctattggttagaagatggtcataatggctgaaaactctattagacagcactgctttcagtccttcttcctcatacaaacacatatgttcatatatatatatttatataaacacatacacatatgtgaacatctccccaagcttctccatctccttgctttttgtcagcatattaacacaccaggagaagtagatgttagtctaatctccaagccactaggtctttacttgaattgataggcacattttcaagtgaaccacaatggccttgaatcagcgttctcattttatcagtgtgatgtcaatattcagtccaaaactaaaaaaaaaaaaaaaattagatttgggccactcatatttaacactgaatatgaagcaaatggattgttcgcctttgggagggtggtctatgattaaacagaaatacagggttacctctaagcagcttcattttgctcacttggataactatctggttaagtggtattcacagatgggaaaagagttaacactcaatgaatgctatgttgtcattaattcaacaactgaacaaaagggacaagatccccacactcataaagctaacattctagtggggcaaacaaagaaacaaataacatcaacaaaccacactcaattggtttcttcagagaatgtaacactactgacaaattagtattgtcaagaactactggccatggagaggcgatggggagagcttgacctgtgcctgcatacactctagggactgagcttaaaatcttgactttaagctcaacaaatggctacatcttttgaccaaattccatcatgctttaagctccacggtttaagcccctgaagtcctttagaagatagaggcaacggctcttatttaatctatagacaccagttcaacagcagaaactattatcttgaacagggtaacacctacaaccgtgaggaatgataaccaccttcttaaacgttgaagatataatctgtacgacagtggcaggtgatgctttacattgttttataatattatcccaccacccagttctaaaataaactttaacttttttgttttttaaagccaggaaaggagataaagaatcaatgaaaggtcaacacagaacagacagaaagtaccagatgtgctctctaaattatgttctgtaagagtcagcagggagaacagaaataatttatttcaggaatcctgacgttaccatcatgtacactcggttaaatggtttgtatagctgaaaaactcagacaggtcttacaccattctcctttacttctaccacttagagaaattcaatcaaaggctgaggttaaagataccagttcccatcaagccagtatatatattaaaagtggcttttctgatcacagcaattctcaggcagtttaggtgtagtgataaacctaaaaatataatctgacaaattttcaactgttcattctaatgttcaatacttcagttattatacttcatattttccctataaatgtcaaggaaagggaattgtctataggatacacacatacctatatacacataaatgtatggggggagggatggaatttccattaaataaagagagaaggataaaaggtcacacaattgtcactttctaaaaataatttcccaggatctataatttctcagagctgtagtaaattagtcacttaaacttattaaaaccaaaaatttaaggaatacctctgaatataactcagaataatgtaacaagataatcatgagcctttacaagatttcatgttgattaacagtaaatagcttttttactgactgatttctgcttccaaatgacaccgcctaaacaaactttgttgccacagaagccacaaaattgtaaggcaatgaatttctgaattggggcctcaatgagaagtttgatttttaggatcttgagtgttctgaattgtgctcaacagtatttaccacacgtgttgcttgtttatgagacagagactacaaacatcttgaatgggacttttatttaaaattctagatgtttcacatttatattttaaagcaaaagatcttacatttgatcagcgtggcttttaattttagttatgattatttaaaaatatgctaagatattcctgacatctcaaaagaacaaattattactgtctgtcaatgcatttttagaaaaactgtatcataaaaaatgtatagcttcatataattaaaacattcaggtagtgtgcattgactaaagtaatatggactattaagtaattcaaaattgtgtttagcggcagcagctgtttaattaaaaggtaaaaactgcaactaatccactatggttgacagaaatacagcctatatcagcagtcagatcccctaggatagagaatatggatatgaattcaagaagtcatgagcttcatttaatgaatataatgaaaataaccacaataaatcagtactgaaacatactttatatctaaaattatctgtatgttggcccacttttaatttccttgtagctaataattttgcatttcgatgtagcaaaaaatcctttaacatacatattgtcaaccatcaatgcacacagcttttatcagagggcccatagcataagctcaacttataaggaggctagaaatgttcttagaatcagatgatcccttcaaagttctaaacttcagggttcaatattcaaagtactcactcataattaccttctatcatggagaaatacaaaatggccaataagctcataaagttaatcaaccttaccaacaagtgactaactgaacattacaatttcattacaaaattattttcacctacgatattaggggaaaaacctttttgttaattgaaaaaagaaactagtgatgttgaggatgatatagtcatttgtaaagataatcaagcaatatatatgatattcccagcccttgatccagaacttccaattctagtggaattacacaagtgggcaaaactttatgtacaaaaatatttattgcagaaatgtttttaatatcaggaaaatgtttaaaaatataaatcaatattggcaactgatccagaaactatggtaagcatacagtgaacaattatctgggcattaacaagaactggaaaaaaactatctgtatgtacattttatgtgacaaaaccaaaacaagccattggacaataaatgcagaataaattcatttttatacaatgaataattgtaaaatcaaaagatataaaaaaaattttcttaaatttgcctatgcttatgttaaagtaaactgtttaattcccttcataattttctgcttaaaaaatgcttatttttatattgtttaccctggctgtgctttaggaaatagatcagaagtatggaatgaggcagaccagtaaagaggcattgcagtaatacaggcaaatgaggtagaaatggaaatgtagagaaaaacaaaattataaatggcaaataaatgaattctttttagaacagttatactaaaataaaaagtctacctccagcaaatatatatagagagttatctttgaaggaggaaaaccaaatcatttcaacagtgttcttttatttccaggaggggaaaaatgtcctattaaaatggcagaagagaaaaggggaaggaaggggaagggtctctcttttactttacaaactagaaacaaacagttcacaggtttcttaacattcgtatcaaatgtcccgtggattttatttgcaaattatgaggccagcaaagcagaaaatgggagtctttaattaggaagaacaggtggctgagaggcacaaggtgagtattagccacatctctgcctggtgccaaaaaacacagatccgacctgcagaacaaattttaagggtgagagcgtaactgtctccagttggagtggagcttgagtggagctcaagctctgtattcagcttttctgaattatatttactcctatttaaagtgaaatggtttgctcttcagctttggttggaatttaccaattacaaattattgaccttcttcatattgacattctccacacagtctacaatcctctctgctgcagttgaagcaaattcttgacctgccaaatgttcctgtttctcttactgggttttcaaaatgattctcctaaacagctgattacgtattttaagttagaatgacaatatagggcttataaaagtggaacacagaggattttcagtgcattgaaactattctgtatgatactctaatggtagattacatgcaagtaactatttgtccaaactcatcgaacatacatcactaagagtgaaccctaatagaaactatggactttgggtgtcaatgatgtgtcagctcatcaactgtaacaaatgtgacactctgatagggaatattgataagtatatgtggaaggggagggagtattcgggatgactctgtaccttctgctaaattttgctataaacctaaaactgttctaccaagtaaggctattaagaagtgctcagagctgggtatggtggtgtgcacctgtaatcctagctacttgggaatctgaggcaggaggatcacttgtgccctgaagtttaaggccagcctgggcaaatatcacaagaccttgcatcagaaagaagaagaaagaagaaagaagatagaagacagaagaagaaagaaagaagaaggaagaagatgatgaagatgaagatgaagatgaagaagaagaagaaaagaaacttaaaaaccacttatacatagatacatattttttaaagcttttctgtcattaaatgttttgggtttacaaaattaaacatttggcattcttgctcaaaaacagcagtaatcttatcttaaagttcataataatcatatacgcccagcctctggctctcaacttatgagtctcacatttaggcaaatttttatgaattgaaccaatggcatttcatagtaacgtaagttcatgtccaagtgccacagcttgccacttgcttgattttaggcaattttcataacatcttatgcctcagtttcctcatctctaaaatgagagaaattcacatatctacttcactgagttgtgacaattaaatgaaagaatgcagttaggagctcagtgaagggcttagcacacagtaaagacttaagaaatgttaactctttttgttatgactaactacaacttaatgtaaaagggaactacaagtaattttttaaatcgataagcacatggagccttcgaggagaaaacatgacaccttcaaaaatgaatatgcaaggtttggaattcgttacttcagagtagaattttaccaggttagaggaatgacttataaccatatctaaaaattgtcattcttcagtgcattgctcttcatctgcatttgaagctgcctcgttataaaaaagctgtaaaacgtcctcaaagtaactttagttcttccccctaagagttcaaaatccactccctaggtttattctttggtacaaaaaccttcaaaagctgatttgctgatgataacaaatttgttttcagaaataatattcctgatctgaggtgataaacaattcagaactttcatatcattggggaattacatttaagagatcaactggggatctgtgaaataagaagcatttaccttgctagaggaatgctagcctgcatttaattgtataatatttccccttcagggtgtatgagacagcgtgttggaaaatggaatgattcttggctttattcagaaagagaacaaaggagagaaggcaggtaaaggacacagcaccatggaaatgacatttcgtttccatttgaattctaaagtactgaacttttaaaatcttcatttgaagaaactctgagaaatttgtcaggagggagtaagaaaaatgatatagcctaccacttaagatagggtgccaaaaaacattaacaattgttcaacctaaatggttagtattcaggttgaagggtggcagaatatgccacccctacatatgccactttagcataaggattattttgagctaaaggcacttaaaaaacagcaggtgctagaagggcgctgtgactcacccctttttcttcccgaatgcagggataaaaccccaatacagaagatgtcctctttataccagaaggaaagtcacatttttatcatcaaggatgaaaaggtgagacctggagaatgctgcacaaagataccatgtgaaaataattcttatcttcctttagcctgcctacagagttcacttacttttccacaattgcatcttttcagtcaatcgaatataaaagcatctaggttttgccatttctttatgtcttcatttcctaatgagggctccataaaacttctattaagtatatttgcatgcttttcttctgttaaactgttttacatcagtttaattctcaggcccagccaaaaaactctaacaaggcaggggtagaatttttgccttcctcacaaggtgttcgtttttctattcttgaaactttccgtatgtttcacaatttttataaacaaaagttgggggaatgaactattactaaaaaatctggaagacaaaattctgttctcatttgacacaccgagtatctatttacacttttctcggaaacagcgtcttctcctcctccacaaaacccatgtgctctgagggaggctgactccatcacttgggctataaggataagccacagctctggtgaggacaactggcaaaatcccatcaccctgttcatttgattggctcaggggatgagtgagagatgaaagttggaccaataaggatgaaggatttttttttcaacagttatcagaagagcctttccattttcctacaagacatgaatggacaaattagaaaggcccagtgccaggagtgacattagaaccatgatctgagagtctcctggagactgggcacaatatcaaggaaatacagccaagacacacacacacacacacacacacacacacacgggagaagggggaaggaaaaagagggagagtgtattaatctgttctcacactgctaataaagacatacctaagactgggcaatttataaaggaaagagatttagtggactcacagttccacatggctgaggaggcctcacacgcatgccaggtgaatcaagagcaaagtcacaccttacatggcagcaggaaggagagcctgtacagagaaactcctgtttataaaaccatcagatcttgtgagacttattcactaccacaagaacagtatggggaaactgcccccacgatttaattatctccacctgtccctgctcttgacacatggagattattgctattcaaggtgagatctgggtagggacataaccaaaccatatcagagaaaaacgtagagagaaaaaaggggaaagagaaaaaaaagagaaggaaaggtagaggaagagaggccatacatgcactagataaagtcgcacctacagctgagcaagatagtttccaattatcctagccaataaattctattgtctgcttaagctagaatgggtcacatttttagttgcttactagtgaaattatcctaacatgctaacaggcaagataaaaatagtctgagcaatgactaaaggagcacattttttacctcatatactgacaattcaagagcattattgcatcatttgctgccaaatggagaggaaagttggttcctaaggaccccctcggccagaaaagtacaaaacatctgttgaagtcatgggtgacttgttagcaaagttcagcagcagtaaagcttcctaagaaacaggtcttttctcaccagcgggtattgatataattagggtcaattacaatttagaatttccagggcatggggctgaattacagtggcatttaagagctctgctaaattttcccattcatcttgaagatttctggaggaacctgttgtaattaagtaatcttcttcttttcatttttatgacaattttcttcttcaggctttgcaattacccactactccaaagtaccttcctttagaagaagaattaaaaaaaagaccacctgattttcaatcgacaatgagacttggttttgctgcctgctaagtgatggattgtgatgtgtacagcaatctctaaataagctgcttcaacaagattttttaaactcccactgccctcaccaaacacagataatcccaaaaactcattgtctgagtgggtgatcaaaaacgaaagaggtgacattatgattgctgggcatcctttacccacgtggtttgtaagtagccctgggagatgtgcaaacaaactctattacttccttgtgggttttcacatatgcttcccccatacagattttatgaagacataccttttgagctttatgcaatcgaggggaaagagctttcactggattaagctattccaattgcatttaccttgggcaacaaagtaaaccatatccataaaaaacagccagaggcttttaagtattaggtcaatagcacttgagtatcatatagtcccaaaagaagctgtaacagatcatgttgattttatggaatgccttggctctctctggggagggagtagtacatagggagtgaggaacattatgacacctattactatcaaccactgttcagtgatggctttctatgcaagcacccaaccaccctgagaaaaaagtactaacatcttcaattgcacaaaagaagagggaaaaataattacagttagttgtctggtctgtgatcatccagctcaagtgaaaaaactaaaatttgaaaacctcatctttccaattccaaagtttatatttaaaaattgtacttccagtgttgaaaagtatctttgggaatagttatgccagtttctgactcacaataagatacactccatgcatgttgtgtgtgtgtatctaaaaccatccttgacccagtacaggcacttctagttaatctttcaactgatcttatccttgtccagcgtgtgggccactgctcatgccatttcttctacacagcatacctttcttttccctcccatttccacctatggaaatcttgcttgtaagtcaaagccctgctgtgaactaactatgtgcaagacatgacaaacacagcagtcagacagatgtagcctctttgttatctattccataataacacgaggcatgtaatagtgtttcacagtttatgaagaccttccaatgcacttccagaatggccaaaattccagctaactctggaaaacgcattccaaagagaaccaactagaataaatggggaaaaattttatgtcatgagtaccgaatgtgtgccaagtatttccatatatgcctaacttaatcattggctgtatgacaaaatatgattgcaagcatattaatgtattaattcaaaaatatttttgcaacagctctgttgttaaaggttctgtgttagacacttgatgcaagcaacacaaagatgaatcagacgagaggaaataaagtctacacaagtagacaaagaaaaacagtgctttatattggacattaacaaacaaaaggaacctgtaatcccagaactttgggaaaccaaagcgggaaaattgcttgagcccaggagtttaagaccagcctgggcaacatagcgaaaccccgtctctataaaaaaattttaaaaatttaaaaaatttaaaaaattagcagatcataatggcaactgcctgtagtcccagctactagaaaggctaggtgggaggatcacttgagcataggggggtcaaggctgcactgcggcatgatcatgctactgcactctagcctgggcgacagtgaaactctgcctcgaaaagaaaaaaataaataaatagaaggaaataaacgtgtgctcaaagggtattatggtagtagacacctttattccagcagctagtactgtacatgggaaagagcaaataatgattatttaataaacagataataaaaaaagactgggctgggcgcggtggctcatgcctgtaatcccagcactttgggaggccgaggccggtggatcactaggtcagaagatcgagaccatcctggctaacaaggcgaaaccccttctcaacttaaaaaaaaatacaaaaaaaaattagccgggcgtggtggcgggtgcctgtagttccagctactcgggaggctgaggcaggagaatgccgtgaacccaggaggcagagcttgcagtgagccgagatagcgccactgcactccagcctgggtgacagagcgagactccatctcaaaataaataaatgaataaataataaaaaataaaaacaaataataaaataaaaaacactgtggcctcatcgagtttctactgtagtacaccattgaaagagcacagaacactgaagtattcattgctacttatatttttaagtttttatttccattctacactccagtgagcaaatcaaaatgcctactgccaaaaaaggctcataattaatacatttttacttacaatgaaggctatcattagtatatcaccaattaatgtcagaaaaggaagatctgtcatgatattctgaatcgacattgtaaaaaggagaaaatatatggatggaaagtattctggcatgtttctagttattaagaacaactctgctgaacagcaatttgggatgatgtgaaatgaaacaaatgatatcactcattgtattcagtgtgatgatcagttggcaacaattacaaaaatgtaccagtaaggatataatatcaaatgtctatagatagtcaaaattgcaaatggcatggaaaaaacataagagaaaaccatcacacctttctctctgttttgcagtcaatgattttctcatttgtattctcctatactgtagacttcccaggacagagattacctgaggttcttctctggatctctagacaaagcccactgtccaatacttaatatatgactgttaactatggaaacaaggaaggaaggaagtcacaatttcattctgaaaactaatccaccttcttatcagccaatatgtcctccttcaaggagcagcactggaaaaactaatgaaataaaacaccaggacaaaacgtggtatccttctccagaatgcacaggaaatttctgaatattaccaagaattaaatatatttgattgttatatagcctcaaatgggccagcacttacttgtgagttactaatctaatctcaactatttcttttctttacaacattgtatttcaaaataactcaaacctacaattggttgcaagttagtacgatgaatacctgcaataccctacttcaactgttaaggttttatcatatctgctttctctcttttacacacacagacacacatataggcacacactcagcaatatcatcatcattttcccaattgcttcttagggcacaatggtttgggtattcaagaaaacaagaataaaagtcatggcatcctgcagaccaaagcaagacctaacccttgtgtgaggtataatcagtatcttgagtgaaatcatttccctggagtgaagagttcccagtgcaatgaacagtgagaactacaaccggaaaaacaggtagcaaagaccctaataactccatattttatctaataagaaatgaagtgctgaagatttgtgagtgggcttgtaaccaaataaaatgatttttcccaatataaattagagatactatatcaaacgcacagcagagacaagaaggtggtggcaggaaaatcaggcaagtttaaaacacctagagtattagcaaaaaaatacataatataactggatttgttctattcctctaacaaaatataactaaaagggtttgaaaagtcatcggccaacaatatttaatataacatactcaaatcacatatatttcaattaattaggtttctacaggagtaatgtggtatttggacttggacattaaatcaatactggccttacagttacttcccatgttcttcagccctccattacaatccactcccctacccaaaaatcaataccaaagccttatatgagacagaaaggacagtaatctttaagtggaaataggaatctaaattacaattgtaaatgtctaaagcttgtagtctggggattttcctaatgggaatatttgatgtgactttttgttattcttatggttgtgctcataagcacatcacaaggatggtttaaaggcccgagcaccataaattagatattctttaagaaatcatgttcttgacatattttttcattatctgagaagaatgaaacagattttttttgttaattagtgctaaggcatgtattttgcattagcattaagtttaccaaaatggctttaaaaacttgaacagatggcagaattataataacttttccttatgatttaggttaagaataaagtgtcatgagaattctcctcctacctaacttttctataaagttaatgcatttaatagatatggcatgtttgtttttctcactgaggtgtaaacaactctatcacacctcagatgagtataatgagatgcgggaatacatttcaatactctctacctagggtaaagggattttccagggtttaaacatcaaaccacgcagaaacaactccaaaccttcgacaataactgcacaggatggcacaggggttgcaaagacagatgtctttaggggcctggcaggtactgaaaacgagtaaagtagacttgctctgaggataatagggagtagtgggaactgcagccagccggacagagcaagcaccacccggggcgacaaacccaacttctcaccaactgctttcaggaatggaatgaaggccctgagtagctggaatcacttattttccaaaagccgccccaaatctaactttcctatgtgaaatgtcccaataaaaatttcggtggctagtttatatttttttaaagaaaagataaaataaaaagaaatgaggactaaagaaaacagtcagtggcctccaggaggaaccatgagacattagtctgcagccttagatggatatctataactggtgttcatggacctgggaggtggaggttgcagtgagccgagattgtgccactgcactccagcctgggcaacagagcgagactccatctcaaaaaacaaaaacaaaaaaaaacaaacaacaaactggtgttcatggttagtgctatggcttatttcatgccctgtccttgagggggatctcagcccctaagtgaaacacttgaaattagtaaactgggtcggcttgcaagcctgatttttgaaaaggtattatggtgaaacctggaaacctgcatgaattctaatgtggcccacctttatacctatgtgagatgatcttgagctctgtaacctccattgatcttaccagtggctcagctagctctcattttatttgtcttcttgactctcccttaaattccccatcgtgcctattcccaatttatgcctcttaaaagtcattagtaactgaaatgagcaaagtttaagaactggtgcctcttcctggcctccatatgctttaatttcattgcagcattggatatctcatcttcccatgtctcttatcatcaacctcaagctccccaaatttccttgctctcactaaatttacccatttttctcaagccttttaagatttcttagaatccagaactgtaagcaataaatatttgttgtttctaaatcacccaggctaaggtattttgttatagaagcaggaactgactgaggcaaaatgttatcttgcttaattcagaagacagaccctatggttacgccattttgtagatgagctaactaaggctaagagaggacaggtaacttgcctgaggttacacaactaggcagaagccaaatccaaataccagtcaagcactagccaccaggctctcctttctcatctcccacttctaatcaattgataactttggtagatcccaccttggtttagtaccttgcatccacacctctgtgccatcccagcaccatcataattctaatcatacatttcagtatgattggtcaggtgcaatagtctcctaatctccttaatatctctagtttctttctcttcaacacaaatttccacactctatgatcttactaatattcagctcccatcatgttcttcagaaaaagaaaaatgtgtggaacctacgcaatgtctaggtctgttcagtgtcttcaaggtattttacaactctgttacattacaggtaactaatagtaatgcaaaatattaagacatgcaaattatttcctgtttgatacaggtttactttgacctccttccttcctgccacctggaggaagaaaacagctttgcctccattttcacacacatttcaatattcctgttttataaacatgcctgttgtttggattatcttttaaaccagttatatcatctgcagcttcccttgtgaattaaataaaatctttaacacaggttcatttctgtatctgtctgagagttatgacttaacctattgctgaaaatgttcttctaacatgtttagctcctaacagatccttgctctaaaaccttcaatggacaccagttgccaaatgaattaaatccagaaacgttaccctggaattcaaaactaagagtatcatctactctgtcagtcatatattacactgcttgtccattcacatcctgcatggacaataaaagaaactccgtgggtgccacacatttcactctcccagttttcttcctctgctgatgctactctttcaccctggattgtggcttttcatagagtgttcaacataatagctgctgtggatgccctaacccatgcttctcaaacatttcacagtagtaacatggcatagggattaacatttgcttcactgaagtaggggagcaggaggaggacaaggaaggtggaggtaaagtagactgctacaagcagaaatttctttgatgtctcatgctttagctcaaaaatatatgcagattaaaaaggaatgagatcatgtcctttgcagtgacatggatgaaactagaggtcactatccttagcaaactaactcaggaacagaaaactgaataccaaatgttctcacctgtaagtgggagctgaattatgagaacaaatagacacatggcgggaacaaaacaaactaaggcctgtcggagggtcaacggggaggagagagaatatccggaagaagagctaatggatgctgggcttaatacctgggtgatgggttgatctgtgcagaaaaccaccatggcacatgtttacctatgtaacaaacctgcaatcctgcacatgtaaccctgaacttaaaagttggaaattaaatacacacacacacacacacacacacacacacacacacctctgcagattttgtacacactccatcatatatcagcaggggcttttgtgaaaaataatattgccacctccaaatattacaataaaatttcccttcctggcaggtgactagtctgtggtgttgtacatcccatgaaacactctgtgacaacgttcaactttacctgagccctgtgctcccagaaaaccagaattaagaaatcttcaatcctttctgtaagatcccatctccatcgttcctcaggattcccttgtttagcggcctctctaaaactccaggcccacttcctcttcttcaaaatgttctaccataattaatgctctccctgtagcagtatcctaaataaaatcacctccttaactgtccagtgcattatatctttgacatatggcatcccttctttgaaaagtccatgattttagatggtgcttcctaagattattactttaaaatattaaattgtgatagtagtataggggaaaaatatattttcctcactcaccactaagttcatggctgaggcacctataacaaaaggtagatcaacaaggaaaaagcatataaatctattgaatgaattttacgtgacatgggagccttcataggaaaatgaaaccctcaaaatagggaagcctgtgtctttttctatgttggtttgatggaaaagtggatagtaatgaaaaagtattattggatgaaaaaatatgatctaatggtaataagctgggagggactttggaaggcctgtttgctaaatcttctttgtgtccctgtatcttcagagataaggatgttccctttctccagatctgtggagggtacctcttgaatgagggtcttatgagaaggggaaggggaaggggaaggtaaaagagatcttcctgcttctgctatgttctcaaatatcaagatgccatattttgaagtcatgtgtcctgaaccctattcagttaaaaaaaaaaaaaagacctaccttgatgtggttccgaaagatttttttcacctgtccccatttaaaatgactaccaaagttatagccgtcaaaactacataggaatctctgcagcaggccaggaattgctgaggtagagaaatagaagaagtgggcagagacctttcctatcacccttaaaatatctgaaaactaaaactactggaaatagacactagttttcattcaatctttctttcaacaaatgttgctcagacatagcagatgagcggctgggtactggctatacaatctgttcaggggaaagctatggaatcttgattaaaactttgaaatccaaaccacagataagatgaaaaggaagaagatgagtagtgggtgtggagagaccttcaaagccggaaggctacaaaacatcaaaacattctgaggacaggatgggaagaccttaagttatggcaactgcaaataataatggcttacatttgttttaagggagtatcttaaaatattcaggaactaagcttagtaatttacattcatcaccttgctaaatccttagagtaactccaggagctaagtactattattatccccacttaacataaaaagcaacacagcctcagagaggttaattaacttgcccagggacttgcagacagtaagtagctaggctgcccaactcaaaatcatgtttcaataatgcaccccaagtgctgttaccatgggttttctagaaagggtatccaatataaattggaatccagagtgaggtggagaaagagtaaagagtgggtcagatttcctatgccaactcagggagtgtgaacttcaccctggcaatgggatgacaaggaaataattcaagggagggaaagcaagaggctgggacctagcaatggatacccctgtaccactgggccccttccagagcatgaaaatgaatgagaatagggtagaatacaaccacaggctcaagtgtctcaataaccacaaggtcagaaaggatttgctttaaggcaatatttaaacgccagtgaacactcaggtctgaattctgtgcatctaaccactacaagttagaagagaaaaaaatattagtgttcttaaggaagatctagcaaaaccatccttccagttctaagggccgtagagggtgtaggaggttggttcacacttcagggtgtaccaattaagtatgatgactgcagcaaaatagtgagtaacacagctagatatttaaaagcctcagttactggattcctgccactgcaggaaacttctgtcttgactaaatttaaaaaaaaaaaaaagaaaaaaatagtgtcaggagaaacaaagtgtaaaatacagaacttatttttcttcctgccaggtgtaagcgttaaaacttggcgtattcactattgtttagaagtttgaaaacttttaacaaaacaatagaacacagaagtgaaaaagtgattgttggggctttagacttaacacaaagcttttgcaaataaatgcctctataaccttaatgaattctaataaaatatattatgctatttttttcttgtatctgtcagaggtgtttgaaccagagcaactctatcttgaatagcggctgggtaaaataaggctgagacctactgggctgtatttccaggaggttaggcattctaagtcacagacgagataggaggttgacacaaggtgcaaatcacctgataaaacaagatgcagatgcgtaaagaagctggccaaaacccatcgaaaccaagatggtgataaaagtgacctctggttgtcctcaatgctcattatatgataattacaatgcatcagtgtgctaaaacacactcccaccagcgccatgacagtttacaaatgccatggcaaagtctggaagttacactatatggtctaaaaagaggaggaacccaaccctcagctccgggaattgccaaccccattcccgggaaagtcatgaataatccaccccttgttcagcatctaatcaagaaataattataagtattttcagttgagcagcccaaactgctttccaaataaacttgctttcactttactttttggaatacaaaagtattttggaataaaaaaagtacttatccctttactttcctaataaagttgatttcactttactctttggactcactctgaattcttccttgcatgaggtccaagaaccctttcttaggctctggattggtacccttcccagtaacatatccacgacaggtgagaaaagaaaaacaaaagacatatatatcatattacatcctacctaagatggtaccaatcgcaaggaacgtattaatttcagagacggtgagtattagaatcatcaaaatacactataattatcacattcatgagtcctgttgatacatttattttactgtctaaaattcaggagtttatggtaagggagtctatttgtaagagaccctgttgattttcacaagtcaagaaacaataaacttcaagacatactaaaaagaaaccagcctgatgtcagatcctcttcaacatagaaactatcctcatagtaaattaaattgaggaaatatttaatggataagcttgactttgtaaacgtgccttcctgaccaataggtacgttactgatgacgttcaggacaccccactttggcactggaggaaacagcagaagcaagaaggtctcttggaccttcttcctgcccttctcctctgaagcagactatacagtaattctctgacctctgcagtacatcattaagactcccatttcagaggttctctcactgtacctggagaaaaggaacatctctgtctctctgaagacaaagggacacagaagaatctgaacaaacaggccttcccaagtcagcccagtttattaccattagaccataaccttttatcctcctataatatttctcccctaccatctactttatcaaactgaacattaaaacatgtacatttccctatgtctttgggtcttcattttggaatgatcctgtgtcacataaaacttatgttaaataaagttgtatgtttttctccggttaatctgtcttttgtcatagtgtctcagtcatgagtctagtgacagatgaaaaatcttttgtcccctacagcatctatgaagatccaaagaatgtcaaagtataatttttaaaaagttacaaacattgcttttagataaatataaagcaaacatatcaaaatgaatttcttaatgagggaaccagtagcatggtgtattcatacaaaaagaattaaagaatctaagtacaaataggccctgacaatgtcaaactttacctgagccctgtgcttgcagaaaagtgatggttaacaaccacccctacaaaccttttgaaaattaaaggcaaaacatccccaccctttttggttctgggaaatggctgctgaagagaactacccttccccaaatgacttagatatgactattcttactctatcataattttcacaaaatgtgcagaccaccccttttgtttacctgtaacaaggccagaaagagacccaaccctttttacctctagccaatttcccactctgtggctcaggattgattagctaagattagaactctttttacccctaaaactgctagacgctgaaataaacatttcctgttcagctaactgactgaaattccctgacggcaaaacaatcccagctgtgaatctcttacctaaagagttaaccaaataaactctttatgtggttaggtactttatatgacttagtacatataaagtacaaagaaaaaaagataaaaaaaaaagacttggatttgaagaacaaagaactttagttctttgaaaggcacagtttaggaaataaaaagccaagtcacagactagaagaacatatttttaatgcaaatacttaataaacgacttatatctagaataaaaaataactaatatctcagtaagatagtcaacccaattaaaaatgagcaaagtacccaaaatgacatcgtacaaaagaaaacataattacaggaaaaaaatgcttatcattagtcattagggaaatgcaaattaaaacccaaatgagatactgctacacagctaaatagaatggctgaaataaaaagactgacaatatcaagtgttgacaaggattggcagcaattaagaacttccaaatgttgatggtagagtgaaaactgatataaccattttagaataccactggcaattccttgtaaatttgactttaaatatagcatgtgactcagtaattccacttgtaggtatgcatccaagaaaaatgcaaacatattctccaatagactcatctatgaaaaattatagctttcttcataatagccataaagtagacacaacctaaatgtccactatcagatgacttaacaaactgtagtataatcatgcaacaatactactcagcaatgaaaaggaatgaactgttgacacatgcagtaacaagaaggagaaaaggccccaggaacaaaaagatacatgctacatgattccatttatacaaaatacttaaaaagccaaacctaatctatagcatcacaaagcagatcagtggatgcctgaggccaggggtggtagagaggaggtggaatgcaaaactgtggaagaaacttattgatttgatgacagtattctacagtaatccacagtgtatgtaaattttatgtgtgttgctgtatataaatgatatcaaaaaattaaaactaaagaaataaagtctttagcttaaatgcatctttcaacaagttcttcatttgcaatctagcttatcacattagaataattggcagtctcctaggaaactggtctggagaaagtgagtgtttttttttttaaatgaaaagattttagatttacgttgagaattttaccaatcatcttaaatatttttcctttgaatctatttgatctgttcaaattaaacttgttatgtcctgaggtggttagctaagggtaccatcaacaaagtatgtggcatcagcttccagtgaattccccaaagtgggggagaaaaatattagagatggatccaaagagaaagcctttcaccaaaatctccattcagccttgcttttcatcacttaaatcctagaagaaaatgttctctgaggaccactctgtatgtaggagtagcctgatgagcaaacataatacttctcaagtatagacatgataaagcagcaaagtcaaaaccatggacagattcaagtcataaaaggattttgaatacatttagccatgcactcactgataaagccttcctaccaatagttcagctcatattacatataacaaggaccagtagctagaaaagctaaagcttaaaaagaaaaaattatcacagtggaaaattatcattagaaatactcaacttaagaaaagacttgaaaacctcttctgtacacacagcactttatcactataagttactggttctattatcttatttaatcctaataacactaacaataatacattaagagagttaatagagagttaatataaaagcacaatagagcaaacactgcatatagagcatttagaagtccttcgaaagcctctgctaggaatggcttcaaaacccagggagttgaatgtggactctccttttctcctttcttttatttcagtggttcttgaatgttcaagtacatatcaatatatcaaaaccatgtactcattaatgagccacttaaggaaggaatttttaaggcaattgtgatgaaatgcgactttcacctcactgtttctcaatctttttttcatcatcatccctgcaaggagcgttttctaattgcccccctgaaattttaataccacagattttctttatatccttatacgtattgtctctatgtctgcgctttacacataaaaagaatgactttttattgctcccaagaattaattttcaccggcttgggggtgatatcactcccactgagaatgcacgacctaacctggacctctagcttaatatgaacctctcctgtttatcttcaatggctcctttcaatgaaaagtctacatcccagagccttcttggttgaagcatatctattaaagtttgttttctttataccaagtttttcccaacatttctgctgaagtacacaatgatagtggagaaggaacatacatgctgaaaatgaaaaacatatatagacatatttagcaagcaggaaatgtatttgagctctgatatcttaaaacattaagcaaacagagaaagagtagtctttttaagagatggtccttggacaagtggatatctacacacaaaagagtggaaggctcctacttcatagaatatataaaaattaactcgaaatagatcaaagacctaagagtttaaagtataaaacttagaagaaaacatacatgtaaaccttcatgagtacggattacacaggggtctcttagctatgtcagcaaaagcacaagcaacgacagccacaacaaagaaaaaatatatataaattagacttcatcaaaatgtaaaagtttgtattttgaaggacatcattaataaagtgagaagacaatcaaagaggaatgggagaaaatatatgcaaatcacatatctgagaagggacttgtatctagaatatataaagaactttttcaactcaataataaatagatgattcaaattttttaaatgggtaaaggttttaaatagacatttctccaaacaagatactcagatggccaatacgcaaatgaaaagatactcagcattaaaagccatcagagaaatggtgatctaaacaccatgagtcaccatttggcacccacaaggtcacctataactaaaaaaaaattaataatgatggggaaaaatcagaacccttacatcttgcaggtgatcatgtaaaatgatgcatctaatttattatatacataaagatagtatatataaaggtatatatattacccagcaattccactcctagttatacacccaagagaaatgaaaacatatgttcacacaaaagttctatatgaatgtttataacagcatcatccataaaagcctaaaagtggaaacaccccaaatttccattgatggatgaaaagataaataatgtggtacacgcatacaatggaatattattagcaataaaaaaataaagtactgagacacattacagcatgatgaaccatgaaaacattattctagctgaaagaagccagtcacaaaagaccacaactgtgtgatttcatttataggaaatgtccagaacaggccaagatataaaaacataaaatggaatcataatgcccagggccgcggagggggcttcatgagaaacagaaatgactgctaatgcatctggggtttcttttggtggtgatgaaaatggtctaaaaatgactatggtgatagttgcacaattctgataatgttccgaaaaccacagaatatacactttaaatgggtgaatggtatgctacatatattatatctctctaaagatgtttgagcaggggaagggaaaggattaaggaggagttagatcctcagatcccatctcccactcctgatagccaggagattgcgacaccccctcatcctggccagtgacttaagctttgttcctgtagagagtaaaatagagggtctctgacatagagtaccccagcaaaatgagagagcagggctgcaggagagatgtctctaggaagatgaaagtgccagaataccagaagtgcatgaacatcttgagaaggtatttagacaaccagtgaagactttgggggctaagacagtgataagtatttacaaaaccaagcaaattaaaaaacaagaaaattattacatccagagaaatcaaaagtcaggcaggatagaaagtgtgatggtagtttactccacacttcagctttagatgacatttcaatactgtactaatatgaatattaatttcatcaaatttgcagtaaaattacattgagataagggacagaagaagagcgtgtgcaatagaagtgaagggaagactagtgatattagttatgttctctgcttccatagtgcaaaatcaatagaaagagcttgaaatgtaaaaaataaaaaagtatacatattacttagagatacagagataaatactaaaataatcagtttaaaagaaatgagggagaggaaggagggacaatgtaggggttttgaattattttttagtaacaagccttatagggctacatgaggtcacatatacacacacacacaataaatgggaaatgcttgcaaattgcataatgtaatgaaaattttcaaatactttataaaaataccatggaaaaattatgctattataagaaatgttatgtgaattgtgttctcaataatatgatttttgtcataatacaaaaatattttaaattactcagtaggtaaagtatttaactttgttctcaaataagcaaaattcctcaaaagatgcagcatgtttatcctaggtctccacgggcctctgaacacaatagcaattaccactataaaatcccagtctgagattttgtgcttaacatatgaccgttcttccacacttagcattttctactgtatacatcattaattcgtttagtaaatatttaagcatttactaatgatcaattcaagtaaaataaaaatatctgatctaggactgatcctaacaaattagttttctggaattatattttttctagattgctgatcaccacgtacatgaatacaaaactatttattgaagatgtgtgatattcagcctaaatcttgtaaaacttggacttgatagtctaagaagctattatgtgcacacatatttgaaggacatttttaaaagtgctaaactataaatattctgattcactgctctcttacatgcactaaaaatgacttcgtgcaatcactaaccaggaggtaggttttgtatcttactgaaaatgtcacttaataaataaccttcaaatttaaatgcaaactgtggatatcattcatagaacctcaaacttgcccttgaagtctaaatgggcaaacaaggtaactacaaaaagcttttcaggcgttaacaccctactgcttcaactccttgaaaagcagtctgaacttttgagtttttagcataatattcttatgctgaataatctctatctcctatagcatttaggctgaggacgttaagtatgatgtactgttgggataatttgcaattttcacttctcattctcagattagattactaacagtgttggaggaaatcactttactgcatagttcattcatagcagttcatttgtctattcaaaacctgatgtcttgtttatggctgtatatcctaatgtgttgcattaaggtgttaacagaactagttgcaaccctaaaattggactaggcaacatgacttgggactggcacagtcagagaccaggaagctggacatttattgagtaagaagaaagggaaattttgagacagagaatttgcaattatgtattatttacattatgtgaagttgactttttcattagccagtatacatccttgattgtgactgctatatatagtttacttttatatcctccatagtatctgtgttcacagtaggtgtaggtgtggtcgacagaatcctggccacctatagatgtccatgtcctaatactcagaacctctgaatatgcttacatgggaaaggggcattaaggttgcagatgatgaaggttgctaatctgctggccttaaggcagggagatgatcctggattatctaggtgggcccaacataatcacaagggtccttaaaagatggaagagacaggctgaagagaaggtcacagtgatgaaaagtgagaagtcaacctgccctttctggctttaaagatagaggaaggggccatgagaagctggaaaagtcaaagaaacaggttctctactagagcttccagaggaaacacagccctgctgacatcttgattttagcccagtgagagccatttaagacttctggcctccagagttgttaaatgattttatttttgttgttttatgttactaagttttcagtaatctgttatggaagccatcaaaaactagtaaatgattaatttaaaactttcaaagtaaaaaataagaactaagaagaacacctaaaggaataagtatgagccatcaagatattttcagttttctacgtctttaaccttattgggaacctttggttgatgtagttaatcactggagttttcctgtccattcatttgaaatctagaatttctttccatttgaaatagttttcttttactgaccagaagctaaactgtcctggatcacctgctggctgttcttttgagaaatcttggtattttccagtgagttatgactgcactatgggatactacttcctgagaacacaaaagttgctttagcttatcgctttaggcagatatttttgcctcagttatcttttagctgtgtatgacttaaacacaaaaattttaaaaatgtgggagtgcaaagaaatatcttttgaggtaggcagtcttttatctatttctccattcaaccagcatttgctaagcatttaaaatatcctagcattgagccaggcattgagtatgtgaagactgaacaacacagggtcattttcttcaagaagctcacagtctagtgaagcagatagaaatgttggaacaaataagagtttaagaaaggaatctgtaagtgttacaggaactttgagggagaaatgtctaacttcattttaaaaaactgccatttcggttcataaaaaatggggagttacacccctatgggtgaacatttgctgaccttgtaattagttataaactcatgggttggttagaagattcttttaagtatctattcaggcccatagctttctctgaaaatgaccaggcctcatacgacgccagaactaacatgaccaagggggtgtatctgactctacactgggccagccaatcagattctcagtccagagaatttggaattagaattcatgggatgaggttgtatctgttgtgacagcgaagtcaggtgacagagactcagtggtctaagagaccaggccacgcaggcgcatggagccccagcacagaaggcagcaaacagagaaaaagaaggccaaagcacagactccgaccacaactgcagttcttgcttgcctcccccagtgaggctttgttgccctctctctttcctgctgcagtgagagacacatttgtgtccttcacatacaatccctattttggttaaagttactttgagtttctattacttgcacagtgacatggttctacctttttaaaacagattccacattttcaccagtccatttgcctcaataaccttacctgcaatatgggaagaggaaagcagtttcctttcagggaaaaggcagtagaactcataaaagatgttcaagtataaaagcacttggactataaattatcatacacatgcagaagattgaaatctgtaactggttatgaaatattgttcacaaatgacccctattaaaagccaaatggaaggattttccagcaaaaatgaggtaggaaaaaagctcaaataaaaatgggccaagattctaggcagagctctaatattcagtttcagagattagttcggctttggccatttccaagtgtgaaagagggatggggcgaagaaggtaatggcaaaaagagaaagaatctacaaagaaccatggggaggaacaccggcaaggattttatccttccagagaaagccatatctgctgttaaaacacagtgcacagcagactgacaatgatcttcttgcaataggtcatagaaagggcattaaaagacaactttcaaaggtctcaaactagataaaccgaaatcagtaatagaggacttatgctggacctataggagattttcttccaggtgactattaccagaggaatctacataacagtggactgctgctatttgggggctaacttctgctgcccacctttgaagtcactaatagcttgttagcacagaagccacgctccgtggctcacacctataatcccagaactttgggaaacaaaggtgggcagatctcttgagctcaggagttcaagaccagcctggtcaacatggtgaaaccctgtctctccaaaaaaaactacaaaaattagccaggcatggtggctcacatctacactcccagctactcaggaggctgaggcaggtgaatcgcttgaacccaggaggcagaggttgcagtgagctgagatcccgccactgcactccagcctggggaaagggagtgaaacctggtctccaaaaaataataaaataaaataaacgcccattagcatagacaaagagaaagacaagaaagtaaaaccttagcttatgttattccctattagcatctctgataatggatttgttcattaacaagttaggaactaattgaactggagattcaaaataatctaaaaatttcagttcttgatgttagtactgctgtctctatgcactatcaagtgcacggaaagtatagaggtcaatgtatggcacatctgctttccattaccatgaaattcacttcaacacatcactgtcataaaaaagtcctatactaagcattctgttgttggtattgatccttcccttccatgttatgaagatagttattcatttttgcagactcaacatggcataatgcctggcacagagctaatactcaacatctgtgaatgtataaaagagcagatagtagaggctccatgcacttctgaattgctgaccataattgttaacattttctgaaaacttaccaaactccaggtgtagtaccaagtgctttatgtacattgtttcattaaaccctcacaacaacccaatgaggaaactgaggcacagagacctgtccaagatcatagactactaactggaggaagtgagatgcagacagaggcagcctggttccagagctcaagctctacaccacgctgcagtactgcctcccgtattctagtcctctcatgaaggcttgctgatggtctagcacatccttcatgctctgcgggacacaaaaccagacacaattttaaccttgctctttggagttaagagtgagagttaagtggtatttatacaattaactccaatatgaagcagaatttaacaagtatgtctagaaatgaggctgaaggtacagaagacaggaacacaactcttagctaggatgggagagaaatggaaggttgcatagaccagggacacataggctgggccttaaattatatagaagatctgcaaaggcagagatagagaccagattatagtcagcaaaatcatcacatgtcagaaaagtcagtgtgtgtctggggctatctggggcacagggtatcttcaggaagcagtaatgatgaatcctttaatgatactctaccaattcccccggtgtgaaaacatatcaaatcttgaggtacagaaagggggacaaaccgaggactcccaaaactaatcaaagaatactccttgaagttctgaacattaatgaggatgaggacctcactgaatggccacttctgtacaaactgagtttgaagtcacagaaatgttagaactgtaatcctaaaactcagttaagagggaagtgcatctacaaatcaagacagacctccagctgaaaatgcctcaacagacacttgcataggccttccttccacctttccgtgtgcaaacggatactgtgattttgagaatgaaacatgatagctcctgcatccactactaacaaaagcaagtgactggcaatgagggtaaatcaggcctcccttgagttggtccttgaaggtgctatcaaattaacgtatgtctaacaattctgtctccattcaaatcaattcgcctaggtagctaacctgctcactgtttctctaacaaggtaaacaatggattagtaaaaactacacatatcagacctggtttcttacaacattaggctcaaaatgcaagatttacataaagagaacatctatggtgagaaataatttgcttagacaggaaattttatcactgccattcagttagttggaaaatgaagatttagagatttggggaattctctaatgttctacataagcatagggtaaaataaaaacttcgtatttctttgaattaatatccaattctcttctagaggaaattttattgaattggaagtgtaattcttctgtttaaaagaaagcctcagccaggcatggtggctcacacctgtaatcccagcactttgggaggccgaggcgggtggatcacaaggtcaggagttcaagaccagcctggccaacatagtgaaatcctgtctctactaaaaatacaaaaaaaattagccaggggtggtggcgggtgcctgtcctcccagctactcaggaggctgagggggagaattgcttgaacttgggaggcagaggctgcagtgagctgagatcacaccactgcattccagccagagcaacagtgcaagactccgtcgtctcaaaaaaaagaaaaaagcctcattattttttataatgatcatgctgatcatactgctattctagtcactgtcaataaacaaaatgacaataaataaccattacaaggcagcaattaacatgatggtacctcctaacttctaagcttgtttctttaacgtgaaaacactatttctattggcaagtatgtagatgagagctgagtcttcctgaaggacagattgaaagagttttcacaaatatttaaaatcacagaaaaagtaatgttctgaaacatttacagaaattaataaaagtatctcatctttgtgtagattaaatattaaaatgcacttatataacttttattaaaataattaatatttaacgaagacaattgaaagaacacaactatgacaaattacattttggcagtaatgataagcctttgagttctagttctttctccttagggatgttacatatctgttttctctacttaaatcactctgcctcattatcatctctgccttctactctcagttcagcttgaaagttcatcttatacagggttacacgattttataatatcagataactctctttcacaccacttaccagagctctaatactaacttatgtgtctcattcttggttgaacatttctctacctcactagattataaactccttgagggcaggcactggttccactctcttccactaaatccccaactccaaaaccctaacaccttaacacctaatatatatatcaccatttacatatcagtcactcaataaatatttgaagaacgaaatgacaaaataccctttacctgaatgcttacctaaaaatgtatcttatatatggaatgaatgatccacacttactacatggatgtataaactcaaacattatacttttctttgcacatttgagaatatgtgtcataagctatgtttacaatgatatggaaacaaaaacttgtctataacaaaaacatgcccatagcaataacagcaacaacaagaagtggttccaaattcaaggtggtagcacagcttttttcaaaaatttgagaaaaaacaaatctattaaaacagaagatatagtctcttggactccactaaaatgagtctgttcaggtctactacaaaacacatctttaagagagattcatggccttagtagccagacagtaggtatggcccagaccttcccagcacagcctatgtattgaagactttagtgaaaacactcatgtcagcaaatttagcatggataattgcaataggaagttctataactttgctttagggaaaaaaattctattttaattttcattcccaaacagaattatgttagaataacaaaataaacttccccacatttatctgttttttaaaaatgatagtctcaaggaagagaaactttcttttcattcatttaataaagatttttgcattttatttaaagactccttatggctatattttaaggattcaagttcatttatttgtgataactagaaaaattttttgtccctttgtgaaaattttggaactaggcatattttcattactgttttcattattactgacaacttggctccctgctctgggaaatatttctggaagaaaagaaaaaaaaaaaaaaactatgaatcaactaacttacttagcaaggtcatcagcttactcaccagggcttatttcaagaccctctctgtgccacaaacacaagactactttgtctaaactcttgtccaattccaatcatttctctgacttgcagtacctgccttaaagtaatgcagaacaagcccagaactccataaatgtgctctcctaatttatccattttgagcaactaatcagattctctcaatcttgtatattcttttcctatagatctaaaatcatagctttgcttgatcaacaggtttttccggtagtcttgtggaaacttgacagtaggcattcatcttatatccactacacagaaacctgagttcacagatgttgtcttagtcaatgccatacacacacacacacacacacctgtgaccagcacagtggttggcacataatatgtgatcaataaatgcatacttaggaaagaagattttgttctatagtattacagagggtcaaagttcttataaaggagagtcagttactaaaactaaactgatattctatcttctcatgtggtctttcggcatcagtcctatcctacacaataatgccttgcaatctgtagttgtgaaattagacttctttttatgtgtgcacaaattaagccagtttctacaaattaaagaacatccagcaattattgctctccttcaagctgaccaataggataagtttaagcagtagttttgagaatttgtttttgcaattttttttttttttgagatggagtctcgctcagtcgcccaggctggagtgcagtggcatgatctcggctcactgcaagctctgcctcctgggttcacgccattctcctgcctcagcctcctgagtagccgggactatagatacccgccaccaggctggctaattttttgtgtatttagtagagaccgggtttcactgtgttagccaggatggcctcgatctcctgacctcgtgatccgcctgcctcggccacctaaagtactgggattacaggcatgagccactgcacccggcctgtttttgtaatttcttatactacaatgtttccttctggagacagaggaagtccagcagatgaagtctaaaatactctgcttattttgtgaaaagaccaggcattcacacaagcgtttttctcaaagctgagaaaaaggaggctgaaggtgcaaaagatatcagagtactcattcagaacccaagagtctataaaatataaacctggtgagagaactggcctcagccaatggagatgcctcaatagtgtttgtgtcacgagcgaacaaggtgaatcataaaaatattttttaaacttctgtttcaaaggtgcaaaaggcatatatattagtctctttgcattactctaaaggaatacctgagactgggtaatttttaaagaaaagaggtttatttggctatggatctgtaggctgtataggaagcataacactagcatctgtttggcctctggtgagggccttggggagcttacaatcatggcagaaaacaaaggcgagccagcatgtcacagggcaagagagggagaaagagagagagtagaggaagtcccagcctcttttaaacagccagatctcatgtgaactcacagactgagaacaaactcactcattactgcaaggatgacaccaagccattcatgaggaatccaccctcatgtcccaaacacctcccaccaggccactcaaccaacaatggggattacatttcaacatgagatttggagcggacaagcatccaaagtatataagtacagcagctagaactttcagttacttaaaaaaaatcttgctgacatcttaattacctgctgaagtcctggtggtcagcaagaaagcagtgaaaacatttaaaatttcaattttcatattaatggtcctaatttctggatctggttttctcttttaaccatttgcataaaaatgttttgtgagggacatataaagaagttggaagctgcagatataggcgttaaaaaggaattatttagcagacagtgagggtatggagtcctccgtaaggttttcctttgaatgaaaagcagccgccaaatcattttcttttctaacaaagagcagcctgtaaaatcaagctgcagacccagacaagcaagctggaagcttgcaatggatgaatgccagcagttgtgccaataagaaaaagctacctggtactaagcatgctcaaaatggcagctccatcttcccttttctttgccagccacatgtagagtaacgagcaggcaacatggcgccagctgggagaagtcgccatttgcttaagatcagggtagggcatccagcttcctcgcatgttatgtaaacatcacacctcgtccaaccaatctttgggccctatgtaaatcagacaccgcctcctcaagcctgcctataaactccaatgcactctgccacaggctggaagtctcattcaggcacccttttctctctcaagagagaaagctgttctcctttctctttcttttgcctattaatcctcagctcccaaactcactccttgtgtgtgtgtgtccctgtccttaattttcccggcatgagatgacaaatctcggatattatcccagccaatgacactgcttcactgcaatttgcaacaagaaaaatatttacgacaaggaaaaaagatgaaccaactggaaattaatgacttttttagattcagcagagaactgaggtccaaagcaaactagtatccccaaatttggagaaacatgtaaacacaaagaatcataagatcagattacctaaagcaaaaacagaaggacctaggaactgatacgaacacgtgtatgataattttgacaaattgctggaggctcagtgcagactagcttgagagttaaaaactcttgcagcctagtcttaggggagactatacttttctgagttttatgtccaagaaccctatcatgttctcatggggaagtctggagaaaaatctcagggaagagaaaaagtaaccattttggaagtttcccagattgttctctgtaagaaagacacgtcctttcagggaagctattttaccagagttctatctgacttgggagaagggcaattagtcccctccagactcttttagccttcctgtctaatgtcaggggacgaaaaaagggctcagaacatttcagaagatcgcagcctagaaactcaggctcactaagaaaactgagatgtaatcataatatacaacaattatccttcctgagacctcatcaccacgtgaagaggtctttggtgattacaactgagaggtgaaacacacagactctattgaataaggagctcttaggaaagcccaaagacaacagggaagacaaaaaatacgagcacacagaagcatctggaacttaaagctacagcaagcattaaacacagtccagctctaagctagattaacataaaacctcataacaaaaaaaaaaattcttagttcccatcactcgaggtattatttccagctttcaacaacaaaaataaggcatgcaaaaagaaatttcttaaagataaactttaaactattttaaactaaataaaaatgaaaatagagcttagcaaaatttgtggaatgcaaggaaaacaatgctttgcaggaaatttaaagaactgaacacatatatcaaaaaagaagaaagatctaaaatcaataatctaaacttctgttagaaacccacagaaagaaaaacaatttaaacctaaagcaatcagaagaaaaacagaatagaaattagagcagaaatcaattacattgaaaataggaaatcaatcagagaaaaattaacaaaaccaaaagctaattattttcaaaagatcaataaaattgctaaacctctagtcaggctaaccaggaaaaaaagagcaacaatacagattactaacattagaaatgaaagaggggtcatcactactgatctcacggatattaaaaagatgataaagaaatatgatgaacaactctgtgatctcaaatttgataacttagataaacagaggcaattccttaaaagaaacaaactaccaaaactcacaaaaagagaaatagataatctgaataggtctattcaggttatatctatatctgtatctttttaaaacattgaatcaataattaactttctaaaaataaataataaattgggtccagacaatttaactgatgaattctatcaaatatttaagcacaaaatgatagcaattctctacaaccttctttagataggtaaagcagagggaacacttcctaagtcattatgttataccagcattactctatagcaaaatcagaatacacgtgcaaaccccattaaaagaaagaaaaactagaaattaatatcgctcgtgaacatgatataaaaagcgtcaacaaaatcttagcaaatcaaatctaataatgtataaaagttattatatactacaactaggatttatttcaggtacacagctggtggaacgttcaaaaactcaacaaacattcctagcactttgggaggccgagacgggcagatcaggaggtcaggagatcaagaccatcctgactaacacagtgaaaccccgtctctactaaaaatacaaaaaaattagccaggtatggtggcaggcacttctagtctcagctacttgggaggctgaggcaggagaatggcgtgaacctgggaggcggagcttgcagtgagcggagatcgtgccaccgcactccagcgtgggtgacagaacgagactctgtctcaaaaaaaaaaaaaaaaacaatagaagaaaaccaaacaacaaaaaaaactcaacaaacgtaacttagcgtatcaactggccagagaagaaaaatcatataatagcaacagatacagaaaagcactgacaaaatcccacactcatttatgagtagaaactctcagcaaactaggaatagatgaaacttcgtcaactcgataccaaaaaatctacaaaaaaacctacagctaacatgacatcatactcaatggagagaaactggatgctttaagatcagtgtagtatagtaggctgactaatgatctcccaaagatatcaggtcttaacttttaaaacatgaaaatgttaccttctttgaaagaaaggactttgtagctgtaactaaattaagaattttaaggtgagaagattaccctaagttatctgagtgggccttaatgctatcaatcataaatatccttataaggtagaggcaaaggtgaaataacacagactcatcaagaagccagtgtgaccaggaacacagagatcactgtcacacccacacccacaacccaaagaatatatggagctaccagaagctgtcaaggaatggatttccctccacagcttctgtgggagtacggccctgctgacacctagattttagacttctggctttcagaactgtcagggaagaaatttctattgtttgaagctaccagtctgtaataatttgatatagcaagctactgagaacaaggcaagattttcccctgttaatactcctattcaacagcataatggaagacctaggtaaaagtaagacaagaaaaggaaagaatattaagaaaaagatataacgattgggaagaagaaaataaaactgtttttgctctcatgatatggctgactatgtagaaaaatcctaaaaaattgacaaaacattctctagaacaaataagcaactgcagcaatgtttcaggataaaatttttcttttatcctgaaaaaaacaggataaaatatttctttccaatatgccagaaaataacaaatggaaattgaaattagaagcacaatatcacttatattagcgtaaaaaataaaacacatagatgtaaaaatctaacaatatatgtacaggatctgtaaggaaatataaaaaattctgatgaaagaaataaaatctaaataaacgaatagatattctgtgttcatggataggaagacttgatactgttatcggttcttcccaacttgattatacattcaacgcagtttcagtcaaaatcccagaaagttattctgtgaatatcaaaaagctgattgtaaagttcatagagaagggctcaagatccagaatagccaataaaatattgaagaacaaagttgaaggagtgatactactcaactttaagacttgctacaaagctacagcgatcaagacagcatggtactggtgacagaataggtaagtgaatcaaaagaacagaagaggaaatccagaaatagaccaatacaaacataaacaacttgccctggacagaggagcaaaggcaattcaatagacaacaaatagtgctagaataactggacatccatatgccaaaaaaaaaaaaaggggggatctacacacagaccttacaccttttacaaaaataaactcaaaacgcatcacagaactaaatgtaaaatgaaaaatgcaaaatgtaaatcctctgaaagataacacagggaaaaatactagatttgagtttggcaatttgtttatagatataacaacaaaaaattatctacaaaaaaaattttaaattgaattgtattaaaatttaaaacttttgctctacaaaaaatactgttaagagaatgaaaggacaaggcacagaatggtagaaaatattaacatcatatgtcattaggggattacaaattaaaacaatgacataccagtatatacctattaggatagctaaatccataagactgataataccaaatattggcaagaaagtggagtgatgggaacgttcatgcattgttggtggaaataatggtaaaatggtatagccactttggactacagttttacagtttcttataaatctaaacatagtttcaccacagaatgcagtaaccaagttcctaagcatttactcaactgagttgaaaactaatgttcacacaaaagtctgcttagggaagcttatagaaactttattcataataatctgtctttcacaacacgagaatgtataaacaaactgtggcaaatccatacgacagaatactagtctacaattttttctttaaaagaactcttatgccataaaaaggtgtggaggcaccttacagacatactgccatatgacattatggaaaagggaaaactatagaggcaataaagggattactagttaccagggatccaatatagtttcttagggcaatgtagactattctatacgaaactgtaatggtggatacacgacaatatgcatctgtaaaactccatagaaccacagaaggccaagagtgaactttaaagtaaagtatgaacttcagttaatataaatgtgtcaatattggttcattaacttcagtaataaatgtgccacactaatgcaaggtattaatagtaggagacacttggtggtggggcggggatgggggaatagtggcgacacggaaggaaaatgttatggtaagtctctcaactatctgcacaatttttctgaaaatctaaagctgttctaaaaaataaagtattttaattttattttaaaaagtacatcttagaaaacatacctaggatgatctctaggctctggatccagaaacccctatttcaaacaagtaggaagattcttatggctgctaagatatcagcagtccatggtttcaggaatacagagccccaaggtgaatacaacaaccagactgaaataagtgcagttccaagaatggagcttaaactggaaagactagagagcagctggctagctgtttagaggtaacagatggcagaaccctcaggatcaagtcatcctgaatgaagaaagacctttggagagtgcacacttgagtaaatagcggcctctgttcatgttctccagtaacaaagaaataaactaattagatggcattcataagcaagctaaaattcctttcactggaaatctggaaagaactgatttaggagagcgaaaaacagggatatatacacacacacacatacacacacacatacatgtttgtagtatcaggaaatgctcaactttgctccctcaagtcatccagttccaatgttttatatatgctattatatgtgacaaaatcatataatatatattaatacatatcattaaaaatatgtaactgttaatgtagcataggtatatatttttcacataccataacatttatccttctaaaatatgtaattcaatgcttttcagtatattcagaaaaacatgtatccatcaccattatctaattccaggacccaattttgtttttaacacatctcaaatgtagattacaaaaaaagaattgatccactagggatacggtctgtaagaagcagcctagattttttaaaaatgtttttcttctactctacatgtaaataagtctgcatcctgtcagtatttaaggttttctttctttctaacaatcatgtaaggctggtattttttaaagtttccactcagaagactgtcttcctgacctgtaaagaaattaagtgtaaaaatgtatgcaattggactaaataatgaaaaagaggttgagaagagtgcaccgaaagaggtaaaaaaaggagactatgggccaaaggtatacaatagggaaaataaaagaagtttctagggcactgcagaaagacaatgtattctagtgattacctttattagactctattggatcaggagccagttcattaaacattaatggcaggggaatgccatccatatattataaatagccattaagttgagatagacagctctgcccagggtcagtatgaattaataaaaaaaactgaagctggcatttcagaatcataaaaagataggtttagtagaaaatattcaataagaaggaagaagaacagtatatattacactatttgtctgaagagcaaactgaaaatgagaacaaacttaacataaacctaaaaagacccttcatgaatgaaacacttatttctcgaaaatggatgtcacttacatttaagaatcgtaacagtacaatgtgtgacattggcaaatggtaaatgtaaagacaaatgaggtgtagacgttcagctagaaattagacaaaatgtgaatgcaaacaaaatatcctcactgaacacagttccaaacatagtatgtggcagcaggagaactgaagttattaacagataaggtctaatttccaatttatctattgagttaatcctgaaacctatcccacttgcctgtatttacaaggtaggtcatcttagttttaccatgagttttcactattttaagagagaaatcatgttatgaaacatggtactgataagatacttacataaagagctacacttttttaatttatttttctcactttctttgctaatttacacccattgtttctgagtaatctgaagaatgagacattcccatttttttatgtatcataatgtttctaagataacgcatggactttttaaagaatttcatggtagcaaatattatgactcaaagtcaatatgaccctggttaacaaaaatgatcaaaaactaggaaataaagctaacagtagtggtagcaatggtgtatgtggcgtgtctgttcaatactgtactagaattttgttccccaagcccactcaaggattatttaattctctaaaagaacatatctgtgtttggctttgctatatacattttgattattgtaccaccactgtcaagttataggttaacttgtagtttttgtctagtacgaaagaaccactgaagtttatggtttaattgtcctgtgggatactaatcagtcttgtataaaacctagtaattttattcaaatattctccctctccaactcctttttaacaaaatgtctagaagtacccaggtcctcaaaatgcccctggattgcactggtttcttcattaaagacatattaaatgttggtatatatttattctgtatttttattatagtcatattaacccttagaaagtagtatttttcactccaccaagcacctgtgtaagattttttaaaaaaataaacatttgccaatgttttgagaggtgaattaactcaagtaaggcataaccagtaatgccaaaaataggtttatgccccatgaattatctctccagtggtctgccagccacccataaaagtacatttttaagttatactatagaatgagtgagataaataaaatgaataatgaacggcagacttaaaaattatgacattttcttaatcttcataaagcctgtgatggatttttcacttgtctacttggctaaggtgaactacagtccctccccacttgttcaaacacagatctagatgctgctgtaaagagatttttcaggcataattacagtccctaatcagttgagtttaattttaggaaatcatcttgggtgggcctaacttaaccagtttgaacactttaaaagaagactgagaaagtcttgtacttggtgttggctgccagctgagatcttggctgagactgtcagctagaactctattttttaaattttattgtttaaattgacacacagtcgatgtacatagttttgaggtacatgtgataatgtaatacattcatattacttagcattgggatatccatcaccttaaatatttgtcttttctttatgctagatacatttcaattattttcttccatcaactagaactcttataactcacggctagccactccacgtgatttggcttctctcacagcatggctgttggattccaaagaaaagcatcccaggagagggtaagtgggtgtagagggggaggaagcaggggtggggagcacacaccaacatgcatgaggtgaatgctattcactccacctgcactgagtgcatcctactctattctctatcctagtttcaacagaaggaagagaaaacagactccacctcctgatagtgtatgacaagaatctggaacaccacaatgaactagaaatgcaggtgtggccacttttggaaaatgtaattatgccacaacaatctttgactatttttctattgtatcattttcataatggtttttagaaacttggaataaattagagtcattagccctatgtacataatatgagttgcaaatatttttccctcaaacaaatgtatttttgttattcttacgtatcttttatctcagaattctaagtcccttggaagtatgcaaattttattgaagggaattgaatttttaaaagaagcacttgtagaggacattttcaatattagtgctatcagttaagtaatttacagtaactcttatggtacccaatctttctctcacagtgatatttacaagtttaaacattttttatctcaaacagagtggcctctgaattttcctcctaacaaggagcttaatctactatagcaaccataatgaaaatgttatttaaaaatcagacaagagcaacagggaaagtcggtgtttgctatttaaattgtttttgtatcaatgggcttagaacactgtggagctatatcattttattcagttttctttcattttaatgtcactgaaaggtcaagcaataatccagagatcaatttaccatcccatgcacattgcttccctccaatttgggaatataaattcaaatgtaagatggtcttcacccaagctcttccctgcaaaaaaaagttaaggcctcagatatttttatatctacagagcagagaaggctttacttcaaataaatgctgttgcaattagcctgatgacccttcttttgccttttaatattttgatattagcaggttctacttttcctcctgatgccgaaaaaaccatgtcatgttaacaaattccttaaatgttgaactcagtcagatcatctataaaatgcaacaatatcatctccctacctatctgttaagtttattatgaagacaaagtaaaatttccatttttttttcagacagagtcttgctctgtcacccaggctggagtgcagtggcaagatcttgcctcactgcagcctctgcctcccaggttcaagcaattctcctgcctcagcctccccagtagctgggattacaggtgtgcgccaccacacccggctaatttttgtatttttagtagagacgggctttcaccatgttagccaggctggtctcaaactcctggcctcaggtgacctgctggcctcagcctcccaaagtgctgggattacaggcatgagccaccacacccagccaaaatttctgtctacttctgacattagactgctgagagtactacatatatgacagtttattagtattgcttttaatacttagaacactgtttgagacacatattaagtgcttaataaattttacctggtgtttttgtgatatgctttattttatttaagaatttaaggggatcaagtgtggaaagagaagacctaccatctcatcatcaagtattatgtgcatatagcatgagaggaagagagaagaaaaatggggagacaaagaaggaaaaggaaaagaaaggattcagggttctctgattatctctgtgcaggtaagctgagggaaactgcacacacttcatcagcaccagtgggttcccatccagcctctttcatttactactgatatgaccttgggaaagatacataacccctctgtatcagttatctattgctacttgacaaattaacccctaaaattcagggcttcaaaccaccataaatatttagtatcttatacaggttctgcaggtcatgaagtttgaagctgattagctgagtggttctgactcaaggtctctgggaaactggagtcacaacacccaccaggttgggaataatctgcagacttggctgaagctgaagcatccacctcaggttcacttacaaggctggaagttggcgctggctgttggaaagaaactttattccttgctagaggaagctctccataaagctgtttaagtgttctcacaaaatggtgactagcttttcccaaaatgagtaagattttatgacctagactctgaagacgcacactgttgctttcactgtattctactggtcaaagagataacataatacaaggtgggaggagatgtcactaggaggagaattttaaaaggtaaggatcactggaagccacctggaaggctggctaccgtgccctcaaagtctctgatccagcatctataaaatgagaataataatgacttctacctcacaatgttggtggaaagattaaatgacaccatgtattcaaagtgactgtggtccagcacttgctccacgaattgcaaacctccttaatcattctgttttctaggttctggcacagtgtgtgtgtgtgtgtgtgtgtgtgtgtgtgtgtgtgtggaggggggtgtgggtgtgtgcacgcacacatgcctgggtccatttggccacctgatgaagtctgtgtacaacttccaaaaatcatacttttaaaaaaaagtacataggattatgagaatacagattatactagaacatagccatgaaaatattttaaaatatatgtaatacactaatatttgtttctttattaagacattatacaatgaaacccaatggaagctttaacaactatatcttcaaaggaatgataagcacaaatgttttgggatacatataataactgaaatatgattagacagtatctgtgatttctattggtgagaaagtcacaagtactgccaatgccaccgtggtcttttgcctatattcacacttgaaagaaaggctaaaatctactcagaggttagtgtaagtgaagatatcatttttttaatccaagtttaaagttttcataaacactctccacaaacccaatggggttcaccggaccctggactaaacttaatttactttaaaagaaagaggaggaaagaagaataagaagaccattctagtatttaatattctctacaaataattttcttcctattaaatttcctactgtacacaggaacatctgttctccatggttctctcatttcaaaatgatcactcatttcattggacatatacctacataatactttcatttaaacatattttaatgaatctttagacctagataaatggatttacagaagtgctacattaaaaggccattttaagtttgggatcgaaaggacctttaatttatagctccagaaaatatccattccatggctcaaagatccttgtggattataaaagaggaaacgactaacagaaaaggaattattcaccacattattaaacatgacaaaaagcttctgaattggagcttaaaacgggctatttaagattccagcaatccctaggactttggcaacaaaaatgttcaaaagccttttatagttgctgtcagatttctgtaaagcatttgagattcctgtgaacttatttatataacaagctaaaacctgaagctgacttgaaagtctttctattctaattatgtagaaatggaaatgcctagaaatgatgttccgtgttctcccaagaatatcctcttgaaatggtggtttcagaaccgggtatttagaagaaggaatgagagtgtagctgctatggtttattacacggaaccattcagcagatatacaaactatagtttagcaaagtggcttcaaagaactgccatttagttattctctctgcagcagcacattctaaatgactgttcatattgttccctcctggcccactacagtggtttatttctgaagctctatagttcatgtgtaatcatgtagcaaagtaattcacgatataatgacccaccaggatctcagctgattgtggttcttatcacaatactgtttctgatgctatgcgtggctttccaaagccaactttttaacctcttatgcttcagcattccaatttgacaccaggcccctctgtgttccgagaagtcagcacataccctaagctagaaatgctaggagatattccaacagaaaaaataagatgggttttgggaaagagtactgtgcttgacagcttctaaaatggctcctaataagcccaccacctcctgctattcacacccttatgtaatcttctctcactttgaatgtgggctggacctagttatttccttttaacaaatagaaatgtgatttgtttataaatgactgtgacttcatccttttcaccctttctctgccctcttcctgcttgatgagacaaggcaagctgacctatggagagcctcatgtggcagagaactgagaccaacagtcaacaaccctagaagaactgagtcctgccaacaaccgtgtgagtgaatctggaagtggaatgtctctaatcctgacaataagatattgacaccaacagcagagatgttaaaacatgtagggtctcagaccttatcaaggaaaggtctagaaaaggaatatgaaaccatttttttctagttccaaagcctgtgcttcattcactgcattacactgtgtctccaaatgagtcctgttccaaatactgaattgggttttgcctgtttggaagttggaactcatttccctagagataaaatggcataactgaaattaacagagatctgacacaatagcagagaggggaagacagaggacttggggtgggagggctcacaaaggtggctgtgccaagaactcctgagtcttagcagtctgatccaggcagctcatgggggctggaggagtgaagtccaaaggctggactgagaaaatcacttcctgatttgagttagcttttacttgatactaggatctttgtggattaattaattaaaaatctccagatgagactaaagcggcctcattgtctgggatgataatcaggttcattgtctcacagctgaggaaatcaaggctgcagacacacaaggagtgaggttaaatggggaagtttaataggccaaagaaagagaatagctctctgctggggagaggggttctggaaaaatgggttgccggtccacagggaaatacagggggttttatagatacctggtgaggaggcagagtctgatttacatagggtgaaagactagttggaccaggtgtgccatttgtatagggcatgaaaaaccggttaggactaggtttgccatttgcataggatgcaaatttctggtcgcctccaccctaatcttttattatgctgtcacgtcctctatctgagctgtgccatgttgcccgtttctttactgtacatatggtaacaacaaaaaaagggaagatggagcctccatgtcggacatgcctgggccccaggtagcccttttctgttagcacagctgccagcattcccctgtgcaagcttccagcttgcttatttatgttttcagctcgatttttcaggctgctctttggtaggaaaaaaataatttcttgggatgcttttcattagaaagaaaattctgctgagaactcttttacccttactatctgcttaaataatttctttccacttcctgtgtcaaaattatccatatttagagtgagccttaaatccaatgactggtatctttatgagagaaaggactgggagatttgggcacagtgacccagaggaaaagatcacatggaaagagaggaaagattggagccagagtgccacagcctaggaatatcaggagccactagaagctcgaagaggcaaggaagtatgctcccctgaagacttcccatggagtctggccctgtccatatcttgatttcagatttttggcctccagaactgtgagatgatagattccggtgatttttaagccaccaagtttgtgataatttggcacagcagcccttagaaatgactaccaacaccagtgatactaatattcaactagacgtgagagccaccacttgaagctgtggcgccaaccttgccaggtgaactgttattgagctcaaggtagggcccaggtggaaatcactagcaatgagaacaccagctgcaataatcaccagaaaaccaccttcatcttcaaaacaaaatattaaaaacccactgtgttaaaaagtctttttttaagcaaggctgttgtgagacgcttcgaaatagttgaatataaaccaagacctatattatactgtagtcggatatcatctcaggattagcatactgtgagcaaatcctcaacacgttgggagttccccttccccttccagataaaagttgaaaagcctgagaaaatcaggggtgtcctcctaacttggatgttagctgccgtccatttctcttgaggttttcctttctttctttaacttttacaaccaaatatttatagttagtcctgctctaagaaagccttagaagccaggataagagcatataatactcagaacaaaactgtgtgaaacagccatattattctatctgtgacttgataattagatgtaactaaattgccggccaagatatcccatacccaagcaattatagacaccaactaacgaagacaggaaatcaaagaatgaaagctgaatgccatcagtggacatatcagaaaacatcaagaaaagctttctatgaagaaaaaaagtgtgcaactcttttaaagaaagcctagtcataaaatgaaattgaaatgtgtatttttttgttttattggctttatttcaaatggctattattaaatccctgatagtcaattaaaaaacattcaccaaactagaaatctgctgaagtatacatgtataagcatgcctaaatatattacaaactattgaattgaaacattaaaacattctccatagcaacactaaatcaaactgatatttcattttggttcccctgatgccaatacatatagtacattaaacccacagctttcagagcataaaaatgtctttgaaaacatacgtaatctagagatgatgttcaaatatagtataatatacaccttggtttatagttattatttctttcccaagattacatttctatgagaaagaagaggagcctaaatatgatatagggtcattaattttaatgatgaaaacagaaattttgactttgccagttctgaccattggggaatctgtgcccatagtaatagattactcatgtcttacttgcacttttcccaaaaatctcaagtcaaagaccacagaatttatacgctagaaaatataagaaaaaagggcacagaagctaaacaagaaaagaagaggaaaaatattccagttatggcttcaaagtcactaatttccatggaaggagattaagcgtatactttatcgaccttctctgccagcaaacaacgttttattcatgtcacttaatggggaaggaggtcaggtacagatctgaaggtcacctaactatatgctttcttccacagtattatagggcatagggaaagagcctaaaatatgcctgctggttggaattgaaaatgaaacggtcccttgtttaatgccataaaaagtatcctgagaaagtgtagctcttaggcttttcctctccgaggatttagggaaaatcaacagtgcccactggacaaaaccactttagataaagaggaatggcaaatttaagggctcacaaaatgtacttaaaagtttagaaattgggctttcaaattataccagtcaagttttacatgaattaagtcctattttgagctaggatgcatcattatgggaggtaaaccaaaatcttaaaaaatatattagtttagaatgagaactgtgcctcaggaggtgccatggaattcactaggaggtaaacctactgcaaattacattttaaaaagcaatctcagcaatatattcttctctaaaaccacaaattcattttgaatcaatatttgttatgagtccttttcaacatttttccaggagcaacacagcactgtgtcttcaggggtcgaagagggaatctacaggacttaaaaaagcatagggagtgaatatggggtcatagcttctgtcattgttgaaaagagatgccagtaagttctatgcattaaaacagaccacgcaaagcacatctgatggaataagataaataacataacagattcactcttgcatgtccaagcgtacttctgagatggtgaaatgcatttgatgcactgaaacatgaaaccatcaaaatctacagctggaagggacctcagagatgaatcatttgaaagccctccagaggaacccaggttccaggaaatatgaagaacgtgaccaaggtcacaagttagctggcagcagaacttgcaccagaatactgatctaattttattatatacacttttagtttctaaacaccaagaggcatgaatttacaaacaatgagtacagccacatgctgtgcctaaaataacaattacaaaagtaaacctacagcctcagttaaattacttacctgtgtttttcccccaccatacagaacattaccattcgcacaaaggtccctcatgttgcccctttctggccacattaatttgctcccgccctcactcctctaaccatccttaatcactgccaaccactcatctgttctccatttctatacttttgtcattttaaggatgttatataaatggaatcatacaacatataaccttttgaaattggctttttacgctcagtgaagttctctggagattaagctgtatgtatcaatagttcatctgaatgcagaatagcctccgtggtatggatgtaccacagttcatttaactattcacctgcagaaggacatctggattgcttctagtttttggccattatgaataaagctgctaggaacatttgtgtaacggtttttgtgtggatccaagtttttgtgtttcttggataaatgaccatgatcacaaatgctgggttgtctcagtccgcttgtgtcgctataaaggaatacatgagtagccaggtcagtggcacaggcctgtagtcccagctactcagaaggctgaggtgaaaagatctgttgagcccaggagtttgaggctacagtgggctatgattacacctgtgaatagccactgcactccaccctgggcaacacagaaaaagaaatctcttaaaaaatagatataaaggaagacctgaaactgggtaacttacaaagaaaaaaggtttatttggctcacggttctgcagggtttacaagcagcatgatgctaacatctgcttctgatgagaacctcaggaagctcccactcatagctgaaggagaaggggagccagcatgtagagatcacatacatggcgagacaggaagcaagagagagggtaaaggtgccaggtagtttttgagcaaccagctctcagggaaatgctccaggaactaagagtgagaagttgctcattgctacccggacagcactaagccattcatgagggatctgccaccatgacccaaacacctcccattaggccccatctctaacagtggggatcaaattttgacgtgaggattggaggctattcaaactgtagtaggttgtaaggcagttatatgtttagtttttaagaaactactaaactgtctatcaagcgtgactgtatcattttacattcttaccagcaaagatgcaaaagcagtttaatagagaaaggatagcttttccaacaaatggtgctaacgcagctgggcatacataggaaggagggtgatatggtttggctgtgtccccacccaaatctcatcttgaattgtagctcccatgattcccacgtgttgtgggagggaccaggtgggagataattaaatcacgggggtagtttccctcatactgttcttgtgatagtgaagaagtctcacaagatctgatggttttataaggagtttcccctttcgcttggctcattctttctcacctcctttcatgtaagatgtgcctttcaccttctgccatgattgtgtggcctccccagccacgtggaactgtgagtccattaaacctctttttctttataaattaccaatcttcggtatgttcttatcagcagtgtgaaatggactaatatagaggggaaggggggaaggaggaggggaaagaagaggaggaacagggaagcaagaagaactttcacataaacctcacaacttgaataaaaatcaacacgaaaggaatcattttccccgcatcttcaccagcatttagtgttgtcaccacttgtcactctcatagatgtgcagcgatatctcaacgtggttttatttagcattttccttagagttaatgatgtagaacatctttttgtgtgtttatcagttaaatggctgtccatgtcttttgcccattttccaaatggtttgtcttttttgttgttgttgagttttgcgagttcattataaatgttagataatagccctgttttggatatgtggttttcaaatatttactcccagtctgcagcttgtctttttagcctcttagcagagtctttcagagagaaattttttaaattttgaagttaaactaatcaatttttccttttatggctcatgcatttgatgccaagtccaagaaccctttgcctagacatagatcccaatgactttttcctctgctagtttctaaaagttttattttctaaaagtgttacattaatgttcatgagacattttgaatgaattttgtgcaaggtgtgaggtataggttaattttttttcctaactgtacaatttgttgaaaagtctattctttctctaactgaattgcttttttatttttgcaaaaaaaaaaaaaaaaagaccagtgggcatatttgtgtaggtctgtttctgggttctctattctgttgcatttatctatgtgtctatacttctgtcaatgacacatggtcatataaatattacaagtatgtaagtcttgaaactggatgatagactaattcctaccaccttattctttttcaaatctgttttagctattctagttcctgtgcctttacatatgaatttcaggataatcttgtctatatctactaaaaattgttgctgatattttcataagaattatattaaaactctgtatcaacttgggagaactgacatatttactatgatgaatcttctaacctgtgagaatatgtctctccatttattgagatcatctttgctttctctcatcagcattctgtagttttcaccatacaaattctatacattttttgatagattttcatgtatttatttttgtgtgtgtgtaaaaggtgctgtattttttatttggtatctatctgttgattgctaatataaataaacatagttggtttctatatgctggtctaatatcctggggcctttctgaactcatctattatttctaggattttttaaaaagattccttagacttttctaggtatgacttacaaggaagtcacctgcaaaaaaaaggctagttttactgcttcctttctaatctgtatgtcttttatttcctttccttggctcactgtgctggcaagatcaataatgaaagtattaaaagtatcagaacttgcgtagggggcataaaatactaaagtgttttcctactctcacacactactcaacacttctcacaccagattctccaacagacgctaactgggtatcctagaattcaattcagttcacacattatctacccagagatattgtcagatccaacaggttaggggttcagtcccacaagacagctcccactttggatgtcagttgtgtaccccaggctgtgaagtgtggttctgactggccagctataaatcaggattcctacaacctcctcttcatgttcaagaaatttggtagagtggctcacaggactcagggaaatgctttacttatgcagatatacaaccagatggaagagatggagaggacaaggtatgtgggaaggagtgtagaccttccctctctgggaaggtgccctctctacgagcaccaccctccaggcatcatcacacgttctgtaagctggaaggtctccaaatcctgtccttttcaggtgtttatgaagcttcatttcttatgcatgattgattacagcattggctactgatgatcatccagaccttcagaccctctcccctccctagagtcaggagataaggctcaaagttctgatgcttataccacatagttggttctcctagcaaccagtccccattctgaggctatctaggggccccagccaccagttatcatattagcattaaaaaacactcttatctccagagatttcacaagttttaggaattgtgcacccggaaccaggggcagaggccaaatatgtttattatatcaaaatatcacaaaagtattcgatcttccaacactgtgttgaatagtagcggtgagagtcaccatctttgactttttcccaaccgtaaagaaaagcattcagtctttcaatgttaagtatgttacttttttgcagatattctttatcaatttgaaaacattctcttccttttatagtgttctgtttttatcacaaagtggtattaaatttcaccacatgctttttctgtgggaattgatatgatcatgtcatttttctttcttagcctgctaatgtgtatgaaattagataatttaaacttaaaataagtcaacttaaagctgttagagctttaaatcattctgaaccttgagaggtggctctgcagcctgagtcaagtggcatgcagctgcaacttctggcttttttcttgtaaataattaagaagaccaagcagtgccagggacaggaccccctcagatcattaccctttctcacagagtaataaagtaatcttcctttgaatgtagcaatccataaccaatcaaattactgtggcatgtgcactggtcttgcatggaaaatgttgtaatcctgctggaacttctctgtccctgcctatgtaaatgaaacctcaacagcaccaaattgggctgctgatccatttgtgtagagtcagccgtgacgatcctcaagctctgcactaggataaactccacatttaatcgtattctttgaacctcattatttacggttgacatgcggtagattccattgctgattttcaaataaaccctacttgatcatgatgtatacttctctttatacattgctgaattcaatttgctaacattttgttaagaaattttgacatctctgtctatgaaggatgttggtctgcagggtttttcctactattttcatttggggcaatacaacttcaaaaattaaaaaataaatgaatattcttccttcatctgagagtgtcttgatttccctttcatatttgaaagacattttcactagacatagaattctaagttgacagttattttctttcagtatggaaaaaatatgatgccacttttgcctgcctgggaaacattggctttattactactgggcaggggagaaagtcctaattgtctataatgcctcttctggtatcacccctgagtggaggaaaaggtacttctctactgttggtagaggtgaaaatccaggctccccatgtggactcgttaccacccactggatatgagaattctggctctctacttggctttctgtaataccaacctgacaaggaggctggagtggctcattacatcccagtgacgatagtagttttggctcccacttggcctttgctgttggaggtaggagtaggtaggccacacgtttttcaatgtgtgtatgtgtggtgtttagctggagtagtacagatattatctaaaaattttctctatattgctagactgcccctttcccagtccttcacctacagtgagcaggctttcgctgtaacctttccttttgtctgtgccctctgtcagctaagggttactagcttctttagttccagggctgggatagctaaggcaaaaacaacgtctagggaattcactaccatattgtttcttgtgtctccaggtctctagctgatctgacttctctccacctctcagaatatttttagttttgtcttatatacaatattcaggattttttacttgtcctaaatgagaggaagaggaaaaagtacacctttttcctagaagtgaaagtccccttgttttactttttcaaaaaaactaaaatctttctcttgactgttatcacaacagatcctatcaaagaagagaaattaagaccaaaaaaagtgtaactgagggatagtaagagaatattcacagctttacttgagaagaaaaaaggaagggttacaaagtggggaggattagagtcaaaagactcaagttctaatggaaagatggtcagctactagccttgcatctctaaatatcacttaaatattcaggcagccccatattttgttttgttttgttttttcctgtaagatggggatgatatcaccgaggtgcccttccacagttgtggtcgtataagatgagataggaaatgggatggtgctttgtcaattttcagtcaagatataaataaagggcatgttattgcactccgatgataaactccctgcctacttcccacttgctccaacaaaacccagttgtttccagtttgtcctgtgtttcagcattgatccagcaactattgatccatgtgcacaaactagaaatatgggaggcattttggatacctctgactccccctattccccaccagtcaaaataagaatatcacagtcctgatgttctccttccagatagctctcagatccatctgcttcactccatcagccctagatccagcccccattctcttttacctgtactgtaatagtcatctcccaagtttccctgcttccaaactcatctctaaaaagcagctagatcatctttcaagcacccaaagcatctctcccgagtccattctagattcccccggatccctagagttcccatttgggcttcccgtttctcaggagacttatctgttcatttatttaaaaaactgaaacggttttctcttatttatcctaaaataaaattttgacctgaaagtatgattttaaaacactttaatacctttatagtcaacaagtaaataatatttcataataggaaaataattatgtgacatgtcatattggcattgcttcataaggtcaagggaaaagctggacatataaactagagatagtgtgtttcaccatagccttatgtacgtattactaaagaatgaaaacatcagccataacttgcaaatctgcattatgactcatgaaacaagtacactgtatctcgccaagctataattactgactaaacctaaacttctttatcacaaactcattcagcctcatgtgctcaacccatacacataaactctgttctagaaactgcctagttgatcaattctgacccagatctactaggaccatttcatggctagttctagctcccaaaaccttctcctacccttctccagttccttttgacataccccccagtttccctggtgttggttcacctttgcaacagcaagctcataacatgacttagaatctaaaaattgttctgatactctttaacgggttttagcaaaataagtgattaggataaacattgaaaattttacacctaattttaacagttactaatattacttctagttagaggagaaggactacagagtagggagcagggtgtagaagcacagattactcttatttttctgtaaggactgaagttcaaacaataaaaatgcactcatacatttcctcagaaattttaaaaacacacattaaatgctaaatatacatcctgtcaattaaaaactgtaagagtaaccttataaaaggaaaaaaaagtttgctctcgggagatgattaaatacccatattgactaaatatatttaaagtggttatgattcaatgtcagactaatatttttgcctctactttaattgctttttaaaaagaagtatcaggaggttccaattagaaatttaactgaaggccactttgaatcaatatgctgtgggaattaaatgatgctgtttttatgttttcctttttgaagatattggtcattctttttttaaatttttatctctaagagttcaaggaaagcttggtttttattggtaaggcaagaaatgcagcttctgactaaatgtttatatcttcagtgtgggatgcccttctccctttctctcctcctggcatatttaatcaacagaatattcacagatcttttacctcctacaacaggcctactccaaccctgcataatttctcctatcttagggcctctgacatttatcccgaaaaagacaactaaatacttgattctatgttttaccatatttcttttcttcctccacatctcactttttatttttagaaaatgcctctaatgcaatttagtgatcatcacagtgcctaggacattgcttggaactaaataactatttaaaagaaaaaacaaatatggttgattagtataagcaactactttgcagaactttgaaatgtgacttcccatttcaaaggttgtctttcgtattccccagtcttccaacaatcatatttcactgacgtctaacacatatacctgatttgagaatattctgaggctgagctcctttatcaaagttaattggtagaaagtgtcactcaccagaaaattccatctaattgaaaactggactgaaatggctaggctcaaatgggggctgatctaaatttctcatcaagcatcactttaaggtatcttagacaagactgccttgagctgtaaaaagctttgatgccatcagccttacaccaggatcaaaatcaattttcaacttttattgaaagctttgttaataagtttctcccctgttcgtcacagttatgaaaaacctttaatatttttgttgcatgggaataaagctaggaaggatgtaaatttcagacaaattggaggtacattttaaaaatattgtcatcgagactgacaactgccaaacctggaaaccactttctcccacatcaaacacaccctgaagtaatggtgaattcaaattgatatgcaagcctgtgacagaggctatcagaagaaactatttcttttcacctctaaaatacaattcactaagcatgacatccaaattcctattgtcataggcattttcactggtttagaagaagactgcaggacggctaatgtgttttcgttctcagataaggctaatgggtttcagctctcttgccagtttgattgccaaatgctgcctgtgacacagtaaagaattttgaagttgctcatggactttgtggaggagagtaacacagtctatcagcaacatttaccagtatggcaaagcagcattcactaatgaatctgagccctctcccgttgctggacccatggaagaccatttccagagccttcagtgcagctggacagggccacatgaccagttctgtcccacaggctgtgatcagtgttgatgtgtgccgcttcacagcccatatgtgattttctatgcttctcatccctgaagccttgagataaaggtgccataagacagcagtagacaatcgtgctgagccaccccttggaggtgagctgtcctggagcatcacctagaacctccgcaggctttgcaaggatgagaaatactcccagttggttaagccactgtgattttcatattgtttgttattgcattataacccaacccactctgacttctacacacagctctcagatgagggactggagacaggagtgcccagcacttagaggattacagattaatagtaaggaacactggttcctcttacatttaagacacccacaacatcatgatgcatttccctccaatgagatgggaattcttgtacccttgcacagcttgctttcattttgatgactactaattgtgacctgcaccttggctcttgcttgtctcctttattccttctctccttctttacgtagacacacagatgttctagagcatgcctgatatatcacactaatacatttattaagtatccctttgaaaagcaaaatgaaacattacaatttctgtggctcttttaaatgcctgtgaacacactagcacattacatttttaagtatttcagtcaaggggtcacttgggttagcctacattttggcaagtaaatcaacaattgctgccaattgcatcagaaagattcctttacttttagcagatctctaccaggagaaaaggagcaaatgtattggcttattggagcaaatgaccaccacacctcaggaacaaaagcttatactttcacattgcttactagatgccaggaaacactctatgagctttactggtatcaatgaatttaatcctcccaacaaccttagaggtcatggccacatttactcctattttacagatgagacaagtgtgtgagtttacatgcttacaaaaagcacttatcttttatcatcataaaatagagtttttagataaaacataggataagcagttaatctttagataaataataaaacagttttagtatatgtgccatatattgcatgggacatacttattctaaactgttttttacatttatctgaaattcaaattcagctgggtccctgtactcctatttgctaactctgggaactctaaattagaagctggatttaaaatttcatcaattctcagtatctaactttattaagcaaccaagctaagctgattgtacatctctatcaaacaaagttaaagacaagtttttattaaaatctctgaatctaatctactataaaaataaaatgccaagaagatttttactacaaaaatttgcttttgctttcctactacccagtctgtggcaattgagaaggatacagacattgaatgtagattctgtccgttgtcacattttatatctaaattggtgaaaatcctaccactcgtgtctgtaagccattcactttgtttggattgggggctggggtttgcaagaaaacacagaatattcctttttgttctttttttttaaacttttataacatgggacctgttaagacagaagcatgaatattctaggtcaggcagagatgaaaggacataataaataggaaacactgctctcccaatgtatcctgaagaagtccttgtcaatcatttccagtaaagtgaataaaaaatgcttaccatggcaagagcatacactgagtttgatgtagtggggacaaatcataaaataggtgtagggtgaggccaaattttaaaatctaaggtaccttggaataatatacttccagagattctcaataacagcattttaaattcttcttctctcttccaggttctgtttcatgcagggccatgagttactgccaacaagttaatatctactctcggctgttgattcaacccaaacactgtgcatctccaatctccatccatcaagggcttcaaaacaatgtgtttatctttctacttgttgtgaatattaataaattaagatctttaaactgtctaggaagaagtaagaaataactgccaagagcttgggtacagatgaggtatttacatacattagagaagtaccattaacagtaagtaatggtgcttttacattctcagaatgcagtgcaatagactgtcgatttgttttgaaggtgtctgcagtcataacacgtatctcatgctaaatggatacttagcaatttttaataattttaaactgatgtgctatttaatggtttggtgataacgcacagttttatgaagacggtttttgaatttggaatttttattgaacttgattaaatttaatgagactgcatcacttacattctaccttaattcttaatgtttataaaggtcacaacaactaattttaaaagttgtattttagaaaagcaaattctgtcagttaatgactatacaatttaaaccataattccaagattttctaaagctagcctacatgtagtactgtggtatgtcttcatgaggggtattaaagcgtaaaagtctaagacatatcactgttgtgaaggaaaacaaataggagaattttattaactccagattcttttgactttgtctgacttttgattagaactagagtacgcaaaactcagcagactatggtaaagaggatttacgtcaactcaacttcccaagaagttaaaattaaaaacatatctcccctaagtcaatacatcccgcattatttcactggtgactttagtcccaatttgtttgaggaaactaaaggtaaaagagaaaacaaatttgctttgaaggagtcaaggctatgtggaatagaaatctctgcaaaaatacttaacccagtctgtagcctttccatgaagcaaagaaaacgtaaaacagattttggggcattctgacacgaattactaagatatcacttatatgcctgtttttagactgagaggctcctcaattcctttttctttctgtctgcgtcatttccatcaggaacaactgttcaacccttacttgtagatcttcataatgattcttgacaatacacgtgcaaaattaaaatgggtctctttgcactgcttgcagtatggcaagagagtttacaaggcaataattctaaatataaaataaaaaacaaacacattacatgattttacaaatttaagggaatgtgtagaaggagtactaatcacacttggcatgtttaaaaatacacttggtgctcgtcagtgctcaaagagtacagtcatatcgtttgaattatcaataataataaaatcatggaggattgatcgtgagagtgttttccttcatcttagccacagtaataagacctctatgctgcacttcttttataattaggcaaaaatctgacagaaatcctgtgaaggcagaggtagttatttctgtgtattctttagacttccacattaagaaaaccatgcccccttttgacatgactatctctttcttccccacacaacaaaactgagaacataaaattatggacacaactgggcagctaaatgcagacacgctgactgcaataaggctctcatctcacagaggaggaggcagtacagcactctgtctccagtaaaacatctcctcaaaaacttcaaactttcttaacatctacagagaagtcttaacagaaaagtcagtaaattcgcctgccacacaccatcttgtcatttgacctttgatttctatagttcagcactccctaattccaatagacaagattcaaagaaatgtctgtaatacttcatctgcccgaaggaagacagtgagataatatccacacaagtcttgaacttttaaaatccattctcactgatacaggggaatatgaactggaagaaggattgaatgccatgcttgagtttttaccatcaaataaaatcttcagtgtgttgtttgacaatgatatttactttgagtgtgttttaaaaaatgacacctgctacaaatatcatggatctgtatatccttgatgtctcacaggtcataaaacagcaagggcaaatattttatgagctacattgcattgttgttttgttcccaggaaaagaggtattttctcaaatactaagagaccagtctattcctggggtcagctgaagccagtgttgaccctggacaaacactgggagagagctgtttccctactatgatgatccctggagctcagatgctgtctgtgcccagaccctcaaggcaaccatggccaaggtagagaaggtgaggacactgctctgagacacatgtggttcggcacacacgtgtactgtgataattgttgctaatgatgctgacagtagccaacatttaccaagggatcactatgcagtgagcactgtgcacagtgccttatgtgctgactcactgaatcctcataatgtcatttggaggtaagtactatcagcaacactacttcgcagataagaggaaaacaacggacagtaatcgtgctgcacagcagcaatcttgggagttgaacttgataaatccatgcatttattaagctcaagtcacccatataaggagtcagacttcagtcagtctcagctccacctttactataaccttggccaagttacttaacctcacaaagcctcagtttcttcatttgtcacatatggatgacagtattacttgccttacagaaaagtcatctcaaacttggaaagaggcgattgagcttactgcattccttcagtgtagagttcccactattgggcctgactttctgtttacagggttaactgacaactctcaggagagggaataattagtatgggctgttacagaccaggaggacatcatcctttctgtatctaacccaacactctaccaaattgcacgtataggtataggtataggtgtatgtgtatatatatatatatatatatatatatatatatgcctctcaaatgctctttggactgactttaacgttacattgggtccccccccaacaattagtgagctgaacaaaatcttgatgtgttcattttatatttgcatgagagcatgaatttgcctttctgccaactgtctgaacacaacattgttttaagaattgagataatgcatatgaaatgttcagcataggacctgggttaccgatgattcactaaatgtcatctatcacatcactcctataatcatctctataactgatcaccaaaagtatactatttaaaacttttaatgtgaggaatggttgtttctatttactcatattcaaatacaaacagagagtatttaatcactaactgtgagaatagctctgaaattatatactgttatccacagctggggccactttaaaatctggcctagagagtgattatctcacacatcacacacccagtacgaaaatggagtttttaagatatccactttctaggctgcttggagccttagtgccgtcacctctggtaaacaggattcattagagtgataattgacagttgtttccctttctaagtgattgctctgtagttccattatgttctgtcagggaagtgctagcaattaattaccaataaactaaacaccagctctgcttgcagcggaaggtttggaaccatttatcttgggggttgagggaggtgtttgggagaggggaaaatccacctcaccaaatacataaagtgctgtgtaaaaaccttattacaagggtgggtggggatggttagaggctctgggaggacaagagacccccatttccacttctgacactttggtatattaaaagaaaaaaacctcaaaccagtggtccaaaaagtatggtccattttaacataggctactttgaacactaaaaaaaatacactgcagaatgattatgacagtcccaagatgacgacaaaactttttgtttaagccaaaagcatagcaaggaaatactcaagtggtgtgacagaggactttttaccttctattaaagattttctgtgcattccttctactggaaataatatataaactccaaattgaggctttttgtgaaaccctgagatccaagggtttgagcttcctctcctcagtaagccaacagactctgaggtcagattcttctgcaaaccatctgagatcctataccatagttgcttgcttcctttcctgtttaactttttttttcaatatagaaccatgtggtggctttttatatagatcctggggatacatcctcgcagctctccaacttcctctatcagctcaagtcgctcccacagccacaatggtctctgggttccctagattctcactacatattacttactataatttttaaaatatacttaatcacacgtgctttcagtccacttcacattcgagtgtctcatttcataagactgtagctccttgaggacaaggacacgtcttcacagggtaattaacaattactgagcacctgcctgctgtctggaatcaggtcatgcaggcagagcaggcaggcaagaaagcaagtaaacaaaggcaacctttatttacttctcccacatttctctgccgtgggaaaggcaagtcaaagctgaaagaaaaaccaaaatggatttcatggatttcaggtctccacagagcccatgacctgttatttgaaggcttttgacccaccagtatgtccaaacatctgttgacatctgcctctctgttctgtggtgtttttcaagggatgctaggtgttcttcaaggtcaaaagggaatggtgctctcttaaagaaactggtgctgaaaagaataagggtttagttacctggggcaagaagtagaacaagaattgggtggaggtcaagaaaagcctaaggccaagtgagaaagaccaacagaagcaaaggagacagacaatcaatgataaatttcccccaccctaggcctaggggtcagtactgataaaagaggaacagaccaaaaaggcacaggtgcaggaggtgaccagtccaagcctctccagttggcttctgagagagctaacagctactggggaaaactggagcctccagtccaacctaacctggccttaaaaggcacaacccccaagacaaaagcactctacgtattcctgaaacacacaaggacacagattagaggaaagaaagaaaacaaagggctcatttacaaatgaaatttgtaattgaaattattttgaaatttatttcaaacttatctacatggtccaagaattagatgagtacaggggacaactgtgtatgccccagattcactggttattatatttttccccatctgcctatcatttgtgcactttcttgcttgctttctctctgtatacacactattttttcctgcttcctttgaaaataaattgcatttagcgcatacttcttaaaactaaaactaaagatattcttttccaccccagtacagttactaatttcagtaaatggagcattggtacaatattatatccagtccactgtcttctgtttctcaattttgtcaattaacccaacgtcatcccttttggcatcttcccctctttaatataaaatccagtataggatcttatttagtgttcctaactcttaagtctcctttaacctcaaacattactttgtctttctgttttcttttttaacagtacacctccatgccccaaacccctctaccccaacgtgtgtgtgtgtgtgtgtgtttcattttgtttaaatagaactattcctcatttgggggttctctgctgtgtccttgagtttagattcaggttgtatattctggacccaagtaccatattggttatgcttctcagggtactgcatcaggagacacacacatatctctttgctcatgaatggtgatgtgaattctgatcacaggtcaagatgttgtctggtttcttcactatatggctactgtgtttttccaaacacaagactgcttaatattctgagtgtatattaggcaggcaaagaatctagctcattatattttagttatacactaacaaagtacgcacatttataaaagcttacagttgtattttgtttgtctaaaataatgacacattaggaccaatgcataattgctcactctgtgttgtctaccattctgagctataagcttttattatgcaaaggctgtggtttgtgagctatcatttgtatgggctccttcaggccctctcaataaaatgacacatacaacaaccaataaacatgcccttttcttaaacatggtcggggtggactttcacatttcatagagcatctcagggctgttcaagctaacagatatttgaaatcaattagtccaacccacacatttttacagttgagaaaatcaagacctaaggaagaaaaaaacgacttgcctaaggtaatacagtataatagttctttataaactgaattataaaatcaatttagtgggccgtgaccagcatgttttaaactgaaatacaatttttaaaaaaatctgagtacttagcatacagcaagggtaaacactgtttggtgaaacctttaattatatatgtgtaggagtatagatgctctcctgtactaatgggataaaaaaatcttttttttaagatgggggtagcccaggctggagtgcagtggcatggtcatagctcactataacctcaaacacctgggctcaagcaatcctcctgccttagcctcctgagtaactagaattataggcatacaccatcatgcctggctgattttttttaaaaatttttttgtacagacaaggtctcactatgttgcctaggctggtctcgaactcctgagcacaagtgatcctccttgccttggccccccaaagtgccaggaccttagccatgagccacctcacccagccacaaaatgtatttcttactgaattctgtggttaaaatcctttaaagaactccattagaactaacccaaaaccagtggtcattctaccaggaaagtgtttttgcaaagtttagtgtgaaaacaaataaaggttgaaatgcagcttctgatttaacagttctggtatggacctgagattctgcatttccaataggttcctaggggagatctaagctgctcctgccagcctatcaactacctttgagaagtatgattaaaaaacactgcatctgagggaggacctactttatttttaacaacgcctccctgaagtaggtactatgtatatacatacgtatatacacacacacaatttttttgctaacaatttgaataggaacaactaattcttgaaaatgtttaaaaataacaaaacaaaaccttccacaaagaatcacctcaattcactacagagaaaatgtgctaattgtgatggtaataagagcgctggtatttactggtgttcacaatgacacgcatgagaccgagtgcatccataacccagttgattcaggttgatatgatttcccccagattacagatgaagaaacagacccaaattagtttattttctccaaggtcatcttgcttgagagtggagggacacagattagcatccagccaattaattcctaaggccatactcctatcatactcactgactcacagatgtatgttatccacacacctatgcacatgctctaaacattacatatgatataaatacatatttagatacgtgcattagcaccttggcatacacttttataaacactctacaatattcaggagtcagggatcacaagaggaaactaatatgtaaaaacccagttctctaaaattaggtgccttctcaagtaggtcaagcaaccgcatttatattgtctacattaaagggatctcttgaaaacagtcacattagcagaatacaggggctgagtgagcaggctggcaggggaggagtgtgagcaggctaacgactagagctacaaacaagattccatcacctataacttagatttcatgtggtatatttagttcaaaccctgtcactttatacaaataggttgtcacgtaaagtgcaaacaactctcttttgacaaagtgatactgctgtggtgctgggttgatggctttatattccacaaagctttttaagtgacaaatgatagctgagtcttgaaaatatggtgatatgaaatgactgcataaatcctttcaggcttcccggggggagcaaaagcatagcattttgcacattaattaaaaaagaaaatctgagaggatgaggttagatctttctaatcttgactctgtgcaaacggactttgaagttactggcacaaaattgagagatggccccagaaaagtcttcaaatgagatgtacaatgttgtttaaagatcaggctcaagtgctgctcttggcccaaatgaggccaggcaagggtgcaataattatctctgctagagactgttggtgcactggcgttgaaatcttttgatatgttggataatgcagattttgtgtgcacacattgctttcccaagctgtctacatcagtgtcatgttcaaatgaagccgaatagtttaaaaggctcgctttcacactggctttatttagcttgcataaacattttcccttcaatctcatataaagtcttgctgcgtaaatgcagctgtcctgctcttgtgtcttaatacagatctttacaaagaggcctgttgggcaacatatttctggtagatgattaataagagatataggatttcttttaaaaaaaatcatgctctgactacagagggcaaattcattacccataaatcaaaaggagtaagggatttcagtagtatcagaagccttatctggcttcaatctgacagttaactgtaggccgtgaatgattaaataaaagtctaagttcacccgagcctggataaaataaaactcaaagcccagaaacttcaaataaaataagaaaaaatcataatttttcacctcaaaaggaaactgagaagagaagtatgatgtgacagaaactatgatttcaaatggagggtttcttttgttgtttgtttttcagaactagactcacattttacaaaaggctccctacccataaggaagaaagttttgagagtaatgaggttgatctgaactgttaaaaactttctaactgagatatagcaacatatggtgtggcagaataaaaatggccacaaaatctttaacattccttccatccagaagtgaggggtctatgttccttctccctgagtaaggtggggccactgagtattttcactaagagaattcagcagaggctgggtgcggtggctcatgcctgtaatcccagcactttaggaggccaatgcagcaggatcactcgagtcccaagttcaagaatagcctgggcaacacagtgagagcctgtctctattttaaaatttaaaataataataataaaagaattcagcagaacttactatgcccaggcctcaagaaactggcatttctcttcaaacactagctttcaaatcctgaattgctctaagataagaagtctgccaccctgaggctaccatattatgaggaagcccaagacagcatgtggcgagagaaagggaaagatgcccacccaacctccagctatctgagtcatcccagctgaggctccagacattaatgaactgcagtaagctattcatcctaatgccctgtgggaatctctcacccacaaccttgggagacataataataataaattgtcttcagctattgtgttatggagtagtttgttacacagcaacagatagccagaacatacaataaaatgggctaatcttaagtgtatagctctgctcttttgcatatgtatacacacgagtaaccaccacctaggtcataagacatgtttccagaagcctctctctgaccctacccagacatttccctcaataaacatccccatcctacccccacacaaataagaaaccagtatcctagcttctattatgatagacaagttttgtcagttcttgaatttcatgtgtaggaaatcacatagaaggtacgctctagcatccagcttcttccgttcaacatactatctgtgaaattcatcactgctgctgcacagggcagtagatggtatgttttcattgctctgaagtgttgcattttgtaagtatactacaattatccattctgctgctgctgatggatatttggttgcttccagtttggggcttttatgaataaagctgttatgaacattctcatacatcttcctggtggacaaatgcactcatttctcttgggtatatacctagaagtaaagttgctggatcgcagggcagtgcactcatttggtaaagtattagttcatattccaactactcaaagaattgctcatctgggccacgttatcattgttttctcccctataactagcaaatattgaggcaaaatcatgctgcattaaattaagcaatttatgatttgtccttccatattgacctttcctgactaactacacaatagtattgttctcaatgatgtctactgtcatgaacatgacattgttcttggaaaaatcctatcaggcaaagtcaacctctaaaatagcattgtaataaatatgcagaaatgtcactttttgcattagcccaaaggttttgtatagcttaaggatacatgcagtaagctaactataaaaatagaaacttgacagtggggatgtatgtgtgtgtcaaaataatattactctttctgggtgtatggcagaaaaaatgacactacatccaccagcatgatttttatagatctgcctctttgccagatgtcaccttttataaactgctttataaaaacatgacagtataagtgcaatagtgtgtttattgcttgataaactttagtaataaacttaggataggttgaaaattaaagccttagagcctattcattaagcatttaggacaagtgagtaagcaaaaaatgcaaactattaaatcctaaatgtatgcagatcaagccactagcagcaagcactatttctcaatcagtatgtcttatggaaatatctgccagtttccttgtcattgagctaaatgcattacagccacatctaaagcatgccatttgcattgctacaaatttgaatgaaatccagaatgttacaactgccacaggctcactcaaaacagattaagtctttttcaaaactgttctgtaacttagcacagcatattttacatatggcaaaccatggttccaacaactacttttctgaaaagacttgaaaagactttaaggaatttcttaaaataatttcatagcacacactcaatattttgattactgatggattatacacagcaatgtagtgtggtctgaggactttggattacctgcagagcttgttaaatagagcgatcctgtagtcctttcctaatcgattgaaataaaatctctggaacaagggacccaagaactaggattttattaagtaattccaaatgatccttattcacaataaaatgtgttaaccatagctatacagtaatctaataaaaagaaactttacaggaaagtatattggcccagaagggtgtcattttaagtgaataatgtattcttacattcttaggttcaaactgttactcaacattatatttttaaaaattcaaatggcttatattagttcatattccttttttttcttgtagttatgtatgaacacccacaaaataaaatctacttaagaacttttgaaaatcaatccctataacaagtgcatatataactaaattttcctgatgattctattcatcctggactgacaattgttatctttgtaattgataaatgaaaaaagcagtaaaataaaacaatccctttaccaaatggtctattagaattcctctgatgctcatcacatttttccactgcttactattcacccccagatctcataaaatatttcagtagttaactacagcaaagctactaacatgcagtttgtgttgggtggatcctcacaaaagtgatgctaatatattggaaatatatatacatatatcattatatataattatatatatcattatataatcatataatatgtaattatatatgtgtgtgtgtgtgtgtgtatatatatatatatataatattttccccattaacaaatcagtgtgccaacatgacaacaagtaggagagactgtcaaagcttcacagttgctacagaactctagtactgggaagtactagttcaaaattccattctgggcaagtttttcttctttttttttttttttattttgagacagggtctcactctgttgctgaggctgtagtacagtggtgcagtctttgctcactgcaacctccacctcctaggttcaagtaattctcctgccttagcctccctagtagctgggactacaggtgcatgtcaccacacccagacaatttttatattttttggtagaaacggggttttgccatgttggccaggctggtctcaaacccctcacctcaagtgatccacctgcctcggcctcccaaagtgctgggattacaggcatgagccaccatgccccgccccattctgggcatcttaaacaaaagcaaaaacaaaaaaccctgaacacatcatggtataatgcagtgataaagcaatgtagggcttttctggacattaaaatgtttgaaaataagcaccaagaaaaaaatcacattaaggagcaaaaattacagtaactgcttgcctttttctttggacatcaaaagaaagaactaacaaaaggaaagtcttgctcgatttctgatcattttatttatcttattgtgaaagaaacaacactgaatcaagagtgaaatagaaatcaaccaaatgaaatgacagcaaaagttgcaaagaaaggcatctggggggtgaaaaaataaatgttccttcacagaaagaaaccagttgtttaaaaacaaaacagaacaaaacaaaaacttacaaaaacacagaaataggtcaagcaaattctacccaaatccctcttcctttgggccttgtcacaacaagtaaacctcatcagaggggtcaagaccacaatgactgacatcctgatcatgtgatgtgatggacagagaacttgactccgagtcagcagaatcgtatagtccagtttgacttcaatactcattaattcaccttttaaaagtttctgactctctgcattcatttttgattgctgctgtaacaagttatcacaaactgagtggttaaaaataatacaaatatattatcttacagttctggaagccagaagtacaaaatcagtttcactgagctaaagtcaagttgttggcaggctgattctttctagagattcggaaggaagaatggatttccatcttttccagcttctagtggctgcctatactccttggtttgtagttctttccctcatctccaaagtgcatcctccagtttccgcctctgttgtcacatggcctgctctctgattctgaccttcctcctgccttcctcttcttacaaagacactatgactaccctgcacccacccactttatccaggataacttccccatcttaagattcttaacctgatcacatctgcaaagtcccttttgccacataaggtaacattcacaggtaccaggaattaggacatggacatacttgggggccatcactcagcctaccataatctctttggattttcttcttaatactagttcattctttgttcatttactcatccacccacccactcacccatcaccctcactctacaggagttggccacagcttcccgactagtatggcagaacaaaacggtgtgttgtaaaccttcaaaggatctgctgacaagttctgatcaatatgtataattgatttttgctgcaacagagtacacattctgacagggtgatgtttttaagggaaaaaaaaaaaacaacgaacagagtagatgatggaacggtatatagattgggataactgactgccagtaaaagggcagagacattgattcacattaaggtgggaccaaagaaatgtatcaggttttctggaatgtgcagaactgtgtttacaggaagatacagaaatttgtctcatgagcacatagaagtccgtgaccagaacagcaaacagcccaactcaaacagcagcacagccacaatgaaaccgcacaaataaagtgatcaccgtggaagcttccagagacactgaggggggctgtttctccccagcagtggttgcactgtaattaccatagttcgtttggggttgccgacttttggtcttttcatgccaggatggactcctggttctgagggtagaatcatctttctttaatttcatgggaaggggtagggtaggtgcctacacaaaacagggttttatcaggaagaaaaacaggaaaacgacctaagaggatgcacaatagcagctctcacaaaaccgcagtcactgggggctctttcagtacctcaatttaaagcgctccgtaggatgacaacttatatcttaatttctcccacacaaaatccctctaaggtgagtttctttaggcaccatccagaccacattttaagttacaccatttaaaataaactttttaaattcagagaaaactatccaagtacgttgacactcttacgttgtttatgtataaaaacaattacaacgttaagcttcctcttcatttcaaatttgtttattcttacataagcttctagacaaaagcatactctctgaaggaaaactggggcagatgggggtggcgcaggatagcggcagcgttattgtgactaggtggtggttaagaaaatattttcaagacaacaacctgaaaatcaggcttaagtgccagaagtaaaccaaaaagaagcaatagcaagtgacaaaaatggctaactggagaggaaaaaaaataggatttcaattaaatcataaacgatggctaataaagtgcgttttaacagctgtaacgctaaacataatgcatcttactctgttttaattcaaatattaatccttgtccaatcactgtaatgggagaaaaatggtatgctctgaatgtcacattcgaattgggtagcaattatcttcctggtatcaatgtcagacattcacataaatctttaaaaaatgataaacttacccaaaaacatccaatcaaataaaatgaaaagatttctataaaacttgtgctataatttatttaaaattacaagtaacataagaaagatggataattacaattagggagatataaatttgaaatggaggaacatattaatattttaatctttctgataattctttaaaattacctaatatttttatatcagcaaatattgcctcaaggactcaattgaaacccaaatcgtaatgatcactatttaactaatttattaaataaaacatgttcaattgtacactaaatcaaatgacatggccatcataatggcagagctacaaattttaatgagactgaagaaaacagtaaaaggtctttgaacctgttatccatgtgatcacagataccgaaaacatgcttgtttctctcctttgtggaggctcagggactccccaactctaagcaacagttataataatatttactacgtgcttcccaccctgcgaagaatggacaggcagtatctcattacattctgacagcaggccaggtacagtggctcatgcctgcaattccagtactctgggaggctggggcaggcagatcacttgagctcaggagttcaagatcagcctgggcaacatggtgaatccccatctctaaaatacaaaaaatagccaggcgtggtggcatacacctgtagtctcagctactcagtaggctgagacaggagtattgtttgaactccggaggtcaagtctgcagagagccacaactgcaccactgtactccagcctggtgacagatcaagactaggtctcaaaaaaccaaaaaaaattcttatagccacctaaaaggttatcttcacttaagagatgcataatcaggcattgaggggttacaaaacttgcacaagatcccagaactaaggggcagaggaactccaaagcctgtaggagaactgctgaaatctgaggatctcctctctctgtatatatttaaaatatgatttctgtctcagtctattgaagctgctctatcaaaatgccttaaattgggtgatgtataaataatagaaatttatttttcacagttctggaggctgagaagcccaagatgaaggtgctggcagcttcagagcctggtgagggcttgctctctgctttaagatggcgccttcttgaagcatcttcagtggtagaaggggcaaggaagctccctccaacctcctttaagagggtgctaatcccattcatgagggcagagccctcgtgacttaatcacttcccagaaggtcctacctcttaatagaatcatgttgggtattaggttccaacatataacttttggaagaacacaaacattcagaccttagcaatattcatccatgcttctcaactctcattttacagcagaatttcccatggaattttcaagaaacacatttgtccaggtacagcccatagaaataccgtgggcccaacagcttattttcattatgcttttctgggcaattatgatgcctgctcaatgtgtggaactcctgctctgtgtatttcaggagatcctggagtatattagcactaaaatgtctctttttctaatagtagtacatcacattggttttataaatacttataatacatgacatactacaatgtgaaggtggttttgcatgtgtcatcacatgtgacatcccattaacttaccaagagtcacagggaaagacttgttattatacccaattacagtttgagtcaataggcacaaatgaattatcaactttttgaccttggaggccatctccaactttatattacataatccttttgctttattaacaagaagtctaaggtccagagagattcactgacttttacaggttcacccagttggtaaataagggcaccggacaagaaaaacaagaattcagctcccacaactgatatgatgtgttatttgtaacacctcacccagaatgtctccagccacctttctttgaaacctgcacttgcactgttaaactgggaaaagattaataagtacaatcgtatgatcacatgggtagtcacaacactgtaatctgagaaataatcattatagatgataaagaaagaggtagaggaggaagtactatttttgtgcccttgattatcacattacaaagacagaaactgcgacgactataaaagatgatcagaggaaatgatatcccaaatttgaaccgtctgaattatgaaaaaaatacaatgtttaactagaatgttccctaaacatgtcacactttgaataaaaggagcagaaggactgtatagaagactggcaacaaagacatacaggaaatgtaagattcactatttaggtatgagtttagatttttttgtatggaagtagagcattctccccaccctttctcctacttccaacttcctgcaaaaatcctacacagaggcaaaatatataaaatgtcttaaaaccaaattgttaaggccctgtctcctcctactggggcccaaagtacctcctccctcaaggggacgcagggctcccaggacaccaccgggaatcactgtttcacattcatgaaatacgtagtcagtgatgatatctacataacgtcaagcgtctaagtgcttgactaaattttcccattattttcactttgccaactacatggataataaagaaaaaaatgagaattttaaagctaaaagactcctactggccaattttgagtacttcctgaggatgagacactttccacataagccggttagagagatctcagtgagccagtgtcccaacagaacatggaaaatgaagcccagggaggtcatacaacctggtatatggtacaacatcgccctgcaggctggaaacaaggccaggtcacactgaggtttccagactccacagggagaggaggaaatcctagggagcagatccccatctgtgttgatcttcatgattttgctcacatccctgtgcctcctgtactatcattccggtctgtcttctttacatctgctcagttcctccttaaattactttgacttaaatggaaacattctatctgtaccataaatggaaaaccagtatcacttgccacagatagacagctaaccctgttaaccttgaaacaaaaggatattaaactgtagccggaagggatccctgcctgaggctctgagcctggggcctgcccacgctttgttataaggaagattagcaaatactagaaaggtgagaaagcttccccctggctaatgagaagggttgaaagaaatgaaagggaataacttcccaagcttgccagaaacaccaaggtagggcagttttttttaaccctgctttgaggtctagaatcctttgttgaaatgaaatcttattaacaatagaagcaataatgatgatgctgataagaaacagctggttgtattaggatacaccaggcattcaaatacaagtaaactcagtacttagaagtattaactcatttactcctcattaacaaacttgtgagacacagaaaggtcaagtaatgggccccaaatctctctgctagtaacagccaaaaccctggtcctataaccccagagtccctgtttttaatgaccacccagactgcccctcaagattccagttactaaggccgggcgcgatggctcacgcctgtaatcccagaactttggaggctgaggctggtgaatcatgaggtcaggagatggagaccatcctggctaacatggtgaaaccctgtctctactaaaaatacaaaaaaattagccgggcgtggtggcgggtgcctatagtcccagctgctcgggatgctgaggcagaagaatggcctgaacccaggaggcggagcttgcagtgagccaagatcgccaagcctgggtgacagagcgagactccatcagaaaaaaaaaaaaaagaattccagttactagcaactgacaatagagttgtggttgaaaagggattaaggagctaaagtgttatgctaagcatggttatgaacaaaaggcagaaaaagaacaaatgcgtccactatatggcttgatttgattacttgaaaattattcatttgttttactctttagctctttgcttcctttaaggtaatcacttttaaccctcttctcatattacttggctgatgatataccttggtgtactgttttctttatttgaacaaatatggttactgtgccagtaccttcaacagattcaaatctttttaagggtaaaaaggcttttctatttttcttagactacaaataatgactaaagtaattcaatgataatgagcattctagatatttctgaaggtttctgaaggtcacacaaaggtgactgtttctactgtgctaatatatccctggaattttcattcttaatattttccaaagagcaggtcaacacttcacagcaaaaaaacagagtgaaagagaaaacaatttttttcatattattcatatatgtttttaatagatgattaaagaagaaaaacataccctggaaatgtagaaatatgaagccatgctacatatttttataattatgttttattgcgttctgttaactggccagagggtttttaaaatgccaaaagattccaaattaaattaccattattaagccccttaagcctcatattgagtttagactgtcactaaaaacttttgataaattaaataatatgcagtatgagtattagagtttgaaatgtttaaaagtttctttacacatctgtcagcataacctaagacataaaatggcttacatacatttttttcaatgatagtgttttgttttcaatttgttttttagaaatgtaattaatgaaagctacagagcaataatctagcatctagaaatgccttcagagttgggtttttaaactcttctctaaatttattctgttgctaaaaatacattcattacatttttaatctaacaggttttagtgaataaaacaatgatgtagatataaagctaaatttctacagtacaagacatttcaaacatcataaaccaaggcaaaagaggatttacaatacagagtcaaactacaatggacacttcagaataaaattcagtcagtgtcctctgccctgccagcagggcatttactgtagtggagaggaccaggaaggagattcgctttataggataatcatgttatgttatgcttttattgaatgcacttacattttggactacacaattgttcttgaaatgtttccaaatgtgtgtaatcatgaccgacgtgatggcagggatctacttaatttccgcattcaaaggggaacatgatgcaaatactatcaagcgagggcacttcctgtcatataacacagaagagataagaacttgaccatgagctggcaataaattcatcaacatcctaaaccagcagtcagtccccaacctttctggtaccagaaactggtttcatggaagacaatttttccacagatgggggtggagtggggctggcaggggggtggtgatggtttcaggatgattcaagtgcattacatttattgtgcattttatttatattattattacattgtaatatataatgaaataattctacaactcaccataatgtagaatcaatgggagtcctgagcttgtattcttgtgactagctggtcccatctgggggtgatgggagacagtgacagatcatcaggcattaggttctcataaggagcgggcaacctagatccctcccatgtgcaattcacaatagggttcacattcctatgagaatctaatcctgccgctaatctcacaggaggcagagctcaggcagtaatgggagtgatgggggagcggctgtaaagacagatgaagctttgctcaattgcccactgctcacttgttgctgtgtggccaggttcctaacaggccatggactggtccatgacgcaggggctggggacccctgtcctaaaccatgtttgcttctgccccctcaccctttcccagagtgaatggtaattactgtgtacgatatttaaaaaatggacgatgtccccttaacagtattttctgcctgagtccagagctactagtagtagtgactgctgactaaaggatgaagctggagtaaaacctttcctgtgctgtgacccacatctccccattgctgaagaagagaaatgtaaaaatgctttctggaagaagaatttcacaaggttatgttttccctcagctttccatgatcacagtaatcgaaaaataacactcttagtttacagatttcaatttggcagtatctggcaatgttaattatataaatgagaagagagagataagaggtgggaaacaggaagtgaatgccaggaaaatgaggatccaggtctcctcctcatggaggtcgtccccaggcttcctgcaccagtgacagcacctgccaaccacaacatttcctaggcttcttccctgatttattttctccctagagcttacccctctataacacagtctatgtttcatattccatcttcttcatcagcttctttatcccccacaacaaaatgtgctccaccagggaaggggtttgaagttgttttgttcactgctgtgtccccaggactggatgacagaggatgcccaccttatttaccaatatattcccagcatctagtccaagggtctgtcacccttttcagtaaagtgtcagagattagctattttaggctttgcaagccatacaatctctgctgtgcagctacttagctctgacaccgtagagcaaaaacagccatagccaataaatatataaataaacgggcatggctatgttctaacaaaacattatttacaaaaacagccagaggaccagatgtggcccagagctatagttgccaactccattgtagaccatgtcttgcatatggtgtgtgctaaatatttaatattatgaatgaatgtgataactccaaaccagccaaccctcctatttatcattccagaacaaagaagactctcataaaagacaaccactaccagatgttttaaggtaacaggtattaaaagcagaatgggtaagtaaaacatagagtttgtcctcagtgactggagatggtctctgctgtcctgactaaatgacctatattagggtcccagtgggaacctaattcaattcagatggttcaaatgaagagactctaataaaaggcttattaatggaggggctggcaggcgaaggaaacaagaagggaggtggaggcactcagacaagagcaagagcaggaggtcatggcatccctcaaagggcaaggggaggccacagtgatcccagagccctgtgagagctaaaacatggaggaaggactatcaatgtcaaatgtaatgctcactcaatcagggaagaagcaagaaagagaaccccaacttccttctgctccagtcctctgattttcagcctagccaccatgcttgtcaatcccagatccaatccaactgtaagggagcacaggcaatgtagtctattggaaaagttggaaagggcaggcactgaacacagagtaaggcaggaatgagcagagacagggatctagatgagagtggcagactgagcaactaacacatggatcaattaagatcaaaacaaaatcattgtattagttcattttcatactgctatgaagaaacacctgagaatgggtactttataagaaaaagaggtttaatggactcacacttccacatggctggagaggccttacaatcatggaggaaggcgaaggaagagtaaaggcatgtctgacatgacagcaagcaagagagcgtgtgctcgggaactgccctttataaaaccattggatcttgtgagacttactaactaacaggagaacagcataggaaaaacctgcccccatgattcaattacctcccaccaggtccctctcactacacctggggattatgggaattacaggatagatttgggggggacacagccaaaccatatcaatcatcctactgagtacagaaatgaaaacttcagattccatacacttgacatagattacataaaagaccaccaataataagattgtgccccacctgtatacaatgagctgttccaagccaaaaatgtgtcttgattaatgctgtggtctttaccaggagcagttttcccacccaggtcacagtcttcacaaattggaagcagcattacctctagagtaagcaataaatgaaaatggtgcctttaatttcaaattataaggtaacacactgatggataaccatagcatgattagtcgattcaggacctcaatacacaatagaagaatccatccattatctgctcaaagtaattctttcatcccagcaactttaacaacaacccaggaaaattactgtcccttagcaaagccttttgaatttcatatggatttaattagttaactgccatctcaaggatgagaaccatgacaaatagttgttcttttcaaattagaagaatagactgttcaatgagcaatattgatgtttcccctcacctatttatacaagagattttctacttttttttttctaatttagctaaccattttaacatttatcgaagcttttgtgatcactgttctctagctgagtgttctagccattagccattagctttaaaaaacagctgaaagcagcctccctgtgtacagaaaataccgtgttcctcactagagacccctggcaatctgaaccactactagaggattctaacaagacattctttaccagtggacagaaaagcaaatagagaatattgttcaatgaacaatgcaactactaatcataacagtgctgtatcttaacctgtagtcatgaacctaacccagctgcttgaggcaagcagacccctctttctttttaactgtggaacaatctatagcatgggaaatgggttaagatttggaaaagaagttaggtgagtaactagcagcagaaagccaagcaccgtaagactctacctattccatctgcattcctgccttttctcaaaaagatctcaaagcagaaagaagcaatcagaacaaagccagtcagctctggtagcttgctcttacctctattctagctacatgtcacctcctgtgagaccctctgcccctccagacagtttaagaaacttctcagaagactagacacacactttgtggctactagtgaacaatttatatgtgtgtttatatttctacagaactttgaaaaagacttgcatctatatggtaagtaaatgctcctgatgtagaaaaaagacaaacaggaaagacaaaaccattttatttggtatcatcaaattaaaaattaattgccccatatgttcaaataataacttatagccgattgtggtaatccaacatattggatgttggctttcatgatctcaccaatacatttagcaaatggctgtggaatctggcaataaaatatttccagtctctaagtcttcttgataattcactctgtgttttacaaacaactgggctcccgggattctaagcacatcactcagactgacagagcaagtattccagacaattggttcctggagggtcaagacagcaatgctcgatcaggattcaaacgggtcataaacccttcatggatctctctcaagtgggtggtgatgtctccctagggctgctcatcatttgctgctacagtcaagcacttgtcattatagacaaacaccccatcagtcttaggtcctcatccagcagagtcttactgccaccggtggagacaaccaccggtataaagaaatccaaacaaaaattcggcatgtgtgcccatccaggcatgactgttcactgtgcatttcacttctacgtctgcactttcagcatggccacgaaactcagcacctgtttatctgccatgatttcaggcatccagattgttctggaaccatatatatcaaaagctctaaaacaccaaacccgtttctagaaatttatcctaaggaaataattggacaaatgcctaaaagatgtatgtacaaggtggttccctgctgtgttctttacagaagtgaaagactggaaatgcatcaatctcagtttggttgtctacagaacgggattgcaaaatctgatttacacgtgttacaattacatcttgtcacctaatgccaggagcagactatatatggctttaagctaaaggaacatcaaagtcatgagtgccttggaaaacagagacaggagtgtgcatattttaaagcagaagctcccaaccacagtcttgttcacatccctcagttctttgaaaggcagccagacctccatttctaagggacaaatgtgaccacaacctctcccttttcaagattcttccaaggcttcctcctgtcaccagaatcccctgcatatcttagcgtggagttgaaggtcttgtgcaatcttaagtccaactcacctactgccacttttctcctcacctacactatgctctagacactctggatttcatgaagtacccttacctccaggcctgtgtacatgatgttcatccattctgcctggaatgcctttctttactcatccatcagcttagctagcctcctagtttcttgcacctctcagtgccctttcctgatttttttttccattctttccatgggtggatataggttcccctctccccacatgtccctaagtgccaagtttcatgtttcctctatacattataactgcccttttcatatctctttcccatcagaccttagtcaccttggggtcaggaactttggcttattcatgttttagatgacaaagaacacaattttaggcaatctctaactctgccctcatgcctgccctaggttgggaagacttggtagcttctttgtcactccaattctttaacatagaaatatactcggtccgggtatggtggcttgcgcctgtaatcccagcactttgggaggctgaggtgggtggatcacctgaggtcaggaattcaagaccagcctgaccaacatggagaaacctcgtatctgctaaaaatacaaaattagctgggcgtggtggcgcatgcctgtaatcccagctacttgggaggctgaggtaggagaatcacttgaacccaggaggtggaagttgtggtgagccgagattgcgccgttgcactccagcctgggcaacaagagcaaaactctgtctcggaaaaaaaaaaaaagagagaaaagaaaagaaatatactctactgacactccaggaagcatgccctaagatctgtacctcatgattctcccacattattaaggtacaattgtcctgaatgcacttgtccttcctcaccatttctgtgtaccatgtacacaaaaatgaggggtgtatccaacaagggagctgcaaactagaacaagtgccactagattctttcattaatgctaattaaatatctattctatactaggtactgtccttagctctttacatatattaatttatttggtattcacagctaccccagaagcaatgtcctactattaacctcatttgagatatcagaaaatggtatgagagaggttaagaaaattttctactatctcaaaactcctaaatgataaagccagaagttgaacccaggtagcctggctgcagcatctgtggcactgctgcctttccaacctacccaagatgactgagcctcctggcctgatcaaggaggtatgcttggctatagagtatctgctcagacactagagtatctacgatggaggaaaattcgagcagacagtatcatcacagaaagaaactgattatgaatgaagaacgagctaggtgtcaaatggacatgcagcaacagaaatagacaaactagctggatcattcttttccccagagggctgtgggatctaggaatgggtgttaaccatcacactacttctgaatctcatatacacaggtggaacctgtgggaacctccaaaagactgattttccctcttaatgctattattctgtccctagatgtgaaaaggcaactattttggggagaatcgttttcaacaatatgaggctttatataaccagcttctactcttctgagccatcccttccttgatttcccccaccactccatccctatcacaaccaagaatttgttctccagaaacaaagatgacagaaatcaagttagggacatagagatgctatcacagccaactcagaggaagatttttgccctcccttatctcaaaacctgcattggccgacattgtgtctgctcctagacaccacttaacgaaagactttaaaaactttaggaacaatttatttaaagaaaactccatttccagtatactatgactgtattccaaggtaataaagtataaatgagaacaaggaacaagctaataaactgaaatgaaggctgcatttcaataacaaggtttgggagccatttaccagccacgtgtatctcactctcatgacttataacattggctgaattacttaacagaaatgaaagcgcatattgcttctgttatccaatgctgaacaatgtgacatttgcttcagagcacttgtatctaatcgatacataatgctaaatgtgatttaaaatcaatttaattgtgctcttgctctcccatgagtcaagggggaaacaaaggtatcatttgagatatgaaaccattaggctatttcccaaagaaatcatagatcccttgcttctaatggagcccaagaagtagatacagttagtttacactaaaaactccacatgtgaaaaacagtattgctgaaacagttaagatactgtgccctaaaaggcatatttgaactgtttttttttttgaattacaaaccaattgaacttttaaaaacttctttatttgttgtgacctttctacaaattatagcaaatttaaaaagaaaaaatataattaagaaaaaaacataatattgcatgtcatatatatacttactttcctagattacatacttttaaaatatctgtattcctacatattgaaaccaaccaaattgtcccatagagctaatgtgtatgatttattttaataaacatagaaattgattctcccagtcttaaaacatgagaaagttatgtttgtcttttctgagttcctttctcaagaaaccaaccgtcaggcctcccagataggatcaaggagctgaaactcaccagattactgtatttggacaatgagatgtcagatccctcacccatcatgattgcctaacagaccacctgcttcctgttgatcaacttctctcccttacccctccctaattcctgttttcctacacatggttacatttcttctctgcctacataaacccctcattttagtcagtgagagagatgggtttgacactgacttcccatctcctcagttacagcatgtgattaaagccttcttccttggcaatacttgttgtctcagtgactggctttctatgaaacaaatggaaggacctagactgaacccctggtgtttcagtaaccatgtaatattttctattatattgtttctctgaaaataattgtatagttatatgctgagccaatcctgagtgtgtacaaagatttggacttggagtcacttctagcatccatctgcctgaccaacagttactgagtccccagttggcacaaggttgtattacttatactcaaggaaatgaggctcagaccaattttaaaggagcaaattcaggactcaactaataatacaagagtctctagactttactttatatgaggatgtttaaacaatccaaaacagtcagtaagttccacctgaattgcagtacttgggttgagtgtctcacttttaaaaactgatgtattggccagcacagtgactcacacctgtaatccctgcactttgggaggccaaggcaggtggatcatcgaggtcaggagctcgagaccagcatggccaacacagtgaaatgccatctctaacaaaaatacaaaatattagccaggtggggttgtgtgtgcctgtaatcccagctacatgggaggctgagaaaggaaaattgcttaaacccaggaagcagaggttgcagtgagctgagaccacgccactgccctccagactgggcgacgcctgggcgacagagagagactccatctcaagaacaaaaccaacaaacaaaaaaactatatattgattaaacgaactatctgtgattaatgtacagcctgtgtgtattttttttctacctgcattcaagaaattgtatggctatagtatataagaaacagaatctttttaaattattttcctaacaacaactgaaaatagtcccatacaatgtacccaacaaaacttcctttttcaaaatttgctttaaatggacaaaattatgtaatagtgaagtaaacttttattaaaaagaccaaattactagttgaagttaattgggatagggttgttttataacactataacaaggacattcacacaagataatctctgatttgtaaaggaaaaaataaagtagttcacaggaaaatagtcaattttatggctcttgtgtttaaatagagggaagaatgtcaaaattcctataaacttaaaatttaaaatatcttcagaagttgccacaacttaaaaaaaacttgaattgcaccaaaaatatctagaaaaattttaagcagtaagtatattcttataaacatccccatattattgtaccttgtcttcccccttgaccaaggttttagactaaattcagttgacaacaggtaacatagctgataaactgaagatctctgcttggcatttgatagttcatcatttacatgggcaaacaacccacataaattcaaacactatgattcaaacatacagattcaaacactatgccaggaatgagcatctacagtgtatgcggttcaggagggtaaccaatcaccacacatcatcattgggtacttgatacagggttagcccaaatcgggtgctgtgttagatatgtcctggatttcaaagactcagcacacacacacacaaaaaagtaacacaaaaacctcttgtttttatattgaccacattttaaaatttattagatatattgggttggataaactatattaaattaattatgcctgtttctctttacttaaatgtaagaattactttggtgacctactttctattagacagtgctggtaaagaacttaaaaaaaatggtatgctccaagttaccactaagaaaaatttttaaaaatacattaaattaccaattacatttttttctcagatgaaacatgcatatgttaacacagaacatattctgacagatctgacagaaaacatgaaaaagtgtgctttctatcataatgattatttttcagataacaacagctgttggcctgtacaagcaagaagctgtttttccacatactaccaagtattagcattcaatcatgaaagaaaactaattctccatgggctctctccacatgctttacatcagcagcaagctgtgcactcctatgtaatctgaaaagccgaaccaagttggggctgcttcttggctcactgctttgccacttctctctaatatggcaaatacaaagcactcacattttgctgattcagaagtaaatgaaacattcaagacctgcacaaaaaccctgaccaaaaggaagtctcagacaggtgagcgccattttggctcttctttagttacaaaggagattaaaagtaatcagtctcttgaatgcctatgaaaagagtggttaaaagtcagctgttaaagaatggctttattctagaacacttgaacatagcccaaattttggaacttgaaaatagtttaaagttcccttataaatttcaagatctcatttatcacattttgtgctcaagaatcacctcagctgccaaaatctaaatagatctgtgctatccaatatggtagccaccagccacacatggctatttaaattaacaaaactttagttaataaaaattggaaattcaggtcctcattgtccatgaccacatgtggctactggcatagtagacagaacagtggagaacatttccagcactgcagaaagttccgttagacagcattgaattagataataacatacagtaagttagcaattcagaaaacttaaagagagaagcaaatagggcagaggaaggcatgtgactagaatgcagactaagactatttaaaaaaactcactgcagttgcattatgtcaaagtaagcaaaaaaaaaaaaaaaagttctttgtcagtttgatgagtgtatctgttatgcttgaagatgtagacagagagaaaataaaatcagtggacagaaatttcatttatatatactggttacgtacttgccacgaccacacacaaactacaacacagaccaaaattcattactgatgaattatggttttgcttttctacaagacggaggtaagcttggcaacatttattcttgggctaagttcacaattgagacaacaattctttccttaatgtgataaattatgctgctctacattagggaatgcatacttttttatcgaaaggtaggaaaaatcgcaaggtgtgccttctctattttttttttccgcccactaggaagacatgaagttctatcagggagttaaaacagttaaataatggttaaaagcctgcttctggaatctgaaaaactcggtttcgtggctttactactttctagctatgtaagcatgtgttctgactgtctcctcatctctaaaatttaaatgaagtaatgcctgaataattcttggtacacaccatttctaattaaagggatgcttaatgatgcaatcattcttcctttgctgctaattactaattttgaaatacatgttatgttttgtcatgacacatacaaataagcataacttaagtgacaaaaccataaacctatggcaaaaataccacagaccactcatatccctcagaggctttcatggtggacaagttagccgtgctgtctcgtacaccccactgcactgagttgctttgataaactgagttatgatcctgggagagagtactgaaataagacagacacactaaaggcttctgggaaaccacatgacatacaggtgtacctggggtttccataaagcccagagatggcagagaaagactcttgggggactggaatgtctgaaaatcccataaagaaaacagtttgcattcctggtcactgggtacaatcaaactcaggaagtactttgtatgggcaccgaagtgtatcctggaatacacagtcacacattactatcaagcctgggcatttttaccagttcgaaaaatcgaacacccaagtttccatttgtaaggtaatttttcaaataatgtttcttttcgaattttttttcccatttatgtagagaccttgagagaagtgtcatacctgagatgcagcaggggacaggatggaatgcgttttctagagaatcttccataaagggaagcatacatatattctgcatcactaagattaatcagaagaaattgctcaaattccaccacattccactttaagactatagctttcccattaatcgctactagcccgaagacctgtccaatgctataacagtgtatgataaagcatatatacctgatttttcacaatcatctataccacaaaaactctattcctgtaaatcatctaattatttagagatcctatttatttatttacttatttatttgagacagggtctcactgtggcgcccagactcgagtgcagcggcatgatctccaccaggccttggcttctcaaagttctgtgattataggcatgcgccaccatgtctatgtctggtcccagtattttatttacatccatagtatatatgtcagattgtttcttatacctagaattgatagaaatcctttatcacatgctgccttccaaaaaagagttcaaaaagcatggttaccacataaagacttgcagttactagaccacttagatgttgcctgagaaagatagagcacatgtggttttctgcatggtatgacatatctgaacagcaccagtgaatacagaagaccatggcacataatggtggtactgtgatggggaataaactgcctatttatttattagagcacataaattaccaactgatacgcaaaacaccaactgcaaattaagccttccctcagaattaaagagaaaagaggctggggaatggaaagaatcagatgggcctgcctcaaacctcagcgcactacttaatagctgcatgacctcagtttccttaaccctgaaatagacataacaaggcctcctttacagacttagtgtaaaggaggggacccacagaagataccatctggcatatagtttgtaaaactttacatttgctatttctgttatgtatttatgaatatacacatataattttatgatatctattgctataatatatgcaatatgtaagtatgtatgcacatatgcatatgtgtgtttatatataaaatgagtgatttttgctctttgatcttcaaatattttctttggatgtcaatttttctttccttttttttctttcttgatttggatctcaggatccaaaagtaaactaactttcctaaacctcttcagtattaaagagagattcattttgagccagcacactatatttctagtccatatctgaatccatatctgaaacaaagaccacgtctaaaagtaatactcttatttctaattctcacctaacacacccatggaagataagaaaattaacttaccaggcagcagtaacttcttggaattctatgctcacactttgctcagcacacataggcgttctgttgacagttggctctcaacacctcaagtacgtgtcagagggacgcgagccgatcagtttacccaagctccttacttattctcatttaccctctagaattttatttcctgcctcagaaagaagaatcccatctgccagaaggaaatatttgtagccaacatgacaaaagtggaatccctattttgtaacagctgtgaatcaaaacactagtgactgaaattaactacatcgtgcttcggaacagatgtgtgcacagaaaccaactcaagctctggtgttcctgggcaccatgtgtaaatcatccacagacaacacggtgggccatgttctcaccttgttgctatgcacgctcatttttaatgttctcctgaaccattgcagactttgagatttttttttaaaggcttagaatctttatttccaaaagaggagattctgaaagttgccaatcactcactggaagacctaactaaacagatgggttttgacacctctggtttgattttaaatgcaaacatgtcaaattatgctctggcacaggttcttctgcctcaaaattttatggaggggtgtttaattttttttaagttttcttctctgaactcagttgttccaccattagcaattaaggcaataaaggacttattacagaaacagtgatatgattgctgtattttaatgcagcagccttaagtaattgaaaatcattactaaaaactttaggaaataaatttcaagaacagacatctgcaaatgaagttgaaggtaaggtcacatttttatataaataggaagcgagaagaaaaacatatggctttctttggtgactcttcccataatcaacatacatgtattatctcctacaaccgaattagaagtaagtggtacattgcctctgatcactgttcttgggagcccatggcagacaatggtaatccactgcagcccttccaccatccatgcccttcagatgcaaaagacttgactagctgctctgaacagatacaaatcaagggaggacttgaacttcagacaagtaactatatggttagaaagattaaatatacacaaatgtaatcacttgagaacattttaagcaacatgtcagaatatgcaagacgatgggctgcaggataattaattattgagaatatacagttgacccttgaacaacacaggttttaactgtgagtgtccacttatatgaggaggacttttttctttttttgagacagagtctcactctgttgcccaggctgcagtgcagtggcgtcatcttggctcaccacaacctttgcctcccaggttcaagtgattctcttgcctcagcctaccaaatatctgggaccatgcctggctaatttttgtatttttagtagagatggggtttcactatgtaggccaggctggtctctaactcctgaccttgtgatgcgcccatctcagcctcccaaagtgctggattacaggtgtgagccactgcacccggcctatatgagaattttttttaaatgaaacatggattaatagtatagcattggggaatatgatacctccatatttggatggctgacttttggtatctgcagatccacagagccaaatgcgggacttgagtattcacggattttgttatacgatgagtatatccttgagtacacagaaggatgactgcgttctcattccaccgtgggggtgtgttgttttgagctggatatatccacacagcactttagtttgtaaggtatacctatattaagcctcatcgttgcatgtattattttgtaataatatgttgaatttataattttaaagggttaaataaccagtacagtttaaaaattgagtaaataaaaactgagaaattaaaatctgttcaaataagcactgcatttaaaacccatagatacacaaactctacagaagcctggagaaccaggcccacgtggagacaaaggcaggattgaatgagaaaaatgtgtttctatcacaaatcataattacttgtagaaaatctttttactgcgttctaagctctgttgggatccatgccttgaaggtaacacaccattggttgctttttcctgctctccctcttgattttttttttaatagactgaaggtaggaaatgctatatgcttatctctgagaagatgcctctatgtagtctctctgctttataattagcaacagtctttcccaaattctacacttagattgacttccaacttaacagatgttacagtgaatttcttttttctttttgtgtcttcatgggtattttagtgcgaggtaaccaaaggctgtgtgtaaggctaccagggaaatattcgcaccgcctgggtcagaaccctgtacgtggcatgggtcttagtaatcttgcagaattttgttccttagttcagccaaaacgaggttcttgtcacatgaccagcgaggattagaaacgtggacacattgaagggtaagggaattggaatttattgggtgaaaaagaaaaaagaaaaaaaactctcagcaaagcaagaggggatcctgctaacaggccatcacctcacacattgaattccaagccatacacaggacctgaagatgccaggctcctccccactgcacaggaggtgaacttcccctggcttcaccctgttctcccaataatgtgagggtgggtcagagattctccaggaccctccttttatctgcatcctgcatctatcagtaagtagttattgaatacacaattgcatgagcaatgtttaaggagcagagagagctctttgcatagcatatcaggcagctgatcactcaataggatttaaaagtcactgaatagactgctaggttccatagtgtggcagatataacacagggtctgagattctcatcctaggtttatgaatgttttgtgtttggacaccaaattctgattttaaaaagattactgtgataaaacctatttaacataaaatttaccattttaatgtttaaatatacagtttgtgtctttaaatacattcacattattgtgaagcttttaatagattgaatattcttctcttctgatcaacagcaagatgatttacataattctgtaaaactatgagttggcccattccctcaagtaaagcatgaagacttaaaagcaacatggaacacagaaagagaaaaaactttgagcccaacaagattttggctttgaaagagaagtaagatgtttaactaagactcaatggaaggaaaaatattgtctggagatactgaaagttgagaattataaagagtgattacaaatgcagaaggtaaaagtattggagcaaaaattggaaatctgctcacatttactggctttttaagcaagttctatcatagaggatctctcatccaaccttcccaaggaatttgtcatcactctaatccacagctaattttggcacagaaattatattagtaaactcagccatattgtcttctcacatgaagacaggactgatgtcctctaaataaaaaattagagtctatagcgatttgtttacaataacaactgatagttacaccccagggatcttctttttgcatatcctggtttttaataatgaattataccttctatacattctttcaaaatgtaaatcaatatactaaaaaaactacagaataagtcaacataaattgccctgtgtgagggtgcctagtagaccaatactaatattttggaggagatttctactttgtagaatctactgagattctgaaagctgcctgcaattctgcaagtgtagggaatgggggaagagacagggcagaggaatgaagcaatggacttatctaatcaaaagcctgattaaaacactccctagcagtctctaagatagaactatagggaggcagcaggcaatcaaaaggaagaggtccagctatttaagtatagctcatatctattcactccgttgtttgattagatttttacctgtaccaagtctatgtaggtatgatgaagaaaggtggtgtattaaagatgaggaaaggtggtgtattaaatattcctaacaccactttccccagatatgctactaataccaccccaaattttccactacgctttgccatcatgccctttgaaacctaattaataatgtttcatttttaagatgatagtctaggctgcaattttaaattggtaagactaatatcactatctatagtagaatacctctttcctccacccacattctgatgcactgtggatacatctgtccacaacaagagattaaaccatccctttctgtctttacttctcctttaaaagccctggactgtcttaatttttgacagaaactaacttctttcccaacagtggtggactactagaattccatgaagcatgcttttggtggctcatgttgtaaaaatcatgtatcactttctcttgtgacctgtcatcaaatgtgacataatttaatgcaacagctccaattttaaggatggcattttgcactttgctttcaaactctatgactacagttatccaacagaagctggccgacctcagtggaacagacggggatctgttaacaggttgccaactttaaattactgctgagtagcttagcatatctctagaataattcctttaaaaagtaattaatcattatttcaaaaaggtcttcagtgaagtgtattttctatattttactgatgggtagcatttgattggaaacagctaatacttctccattctctgtcttgcatttacatttttactgttttcaatattgctgtttttgtttgatgacaactagggacaactcagggagcagactgagatgcgtccaacaaagagaatatgaatagcaatctagaagagtgaacattaggcagctaatgcatagaaatacttgtattttgtatctattttctccatatttcaactgaagattcttgcctcatgttggaaacagattgagaaaagtcactcgtgtcagtactacagagaacacattccatgagcccatatcttcagcaatgtgtttgcatcctagaaattatttcagattatgctctctcttgaggccataaaaggcaaacactggaggaggaacagtgaggagaaactacataaatagctacaggctgtattttagagacgcctccaaacttgttagaagataacgtgttgacttttagggtttgtcaggaaagttaataaagctagatttataagtatctttcaagatttttttttctaattgaaaaataagccacacgaaaactgtattctaacactctttggaaactggtatcaaatcagtccatcacccacttcaaagaattttattagccaagatatcataaaagtctacattttaagattttttctttttatcataaaaaatttcaaagacatagaatgatataatgaatcatttatacctccactatcactcacaaaactatttaaaaacaaatcccagatgttacttaaggcaatgtcattagcaaatttccctttgtataaacactataaattgctttaaagtaaactttatgaaaatcatatgctttatttaagattaggaacatcctaatcccttttccccatacttcacaaattttaaatcatttgtgtcatactggtaatgaacaaattactaagtgtgtacaacagagatgatatatgttgtcctcctattagggacatccagtacgtgtccatgacaagtattcccctggatcttactacaggtccctgttgaagctgggcagggcctcacagtgagttccaacacagcacaccaggtaacactaactcatcaattagagacagcatgagaactactgaccttcctggtctacagcttactgtcaaggaatctcatagccaggaataagcttctttaccaattcctgctattgttaaatacctacaatcacactgttcaactaggaggagaactaagtattcatgatggcttggacctatgtggatactctccttgcttttcaagctcacagagaatggataaattattagatttcagaaaaccaattgtagactagaacgagaacctagaatgatctaccaaatccagtttgtgactaaaagatggcattgtttccattgtcaaaatcatgaaagtagactatcgtctcaagatagaaacaccatctttaccttccattatggaccttttaataggaacacagtgctaaattcctaaattacaacagtttattgaatcttgaatgacatcagtagtaagacctaccattattttatgcactttaagaaagaaaatgtctttttgaaaactatgacatgctatcaattataagaaacacctggtttcacagttactaacatatttgtatatacacacagatgcattctattaatttgtatttaagctaacatttcttacttgaagatgcattggtaatttattgataggaaaatcacttccacaactaaggatagtttttcacctttgttgctctgcaaagcttggtcttatctattcttccttttaagatttcatttccaccatcaatcccaagggcaactggtttaacgtaatagagaaagtcctggctagggaagcagagtgtgttccctgccaacatttgcccatgtctgcgcccaaatacacagtgactccttagagagtcctcacgcaatgtccatcaattaatatttttattattagagaggctagtgctctttacagcattggaaacctagaaattctaccagcttagccagcttttgctacctataagagtagtggaaaaataacaacatggtaaggatatctttctgttttcactgatctgaagtcacaagcctataaaaccattcaattataaatgtgaaaataaataatgctaataatgacagctcttgtcaactggacatgcccaaagcagactggagccagatatgtgcactgagggaagtgggtggagccacagggaatttgcaccttacccaggggaggagcctgtgctcttcagctcatctgtgtggcctggaatcgatctatgagatgaggacctgttagcaggaatcccccacgctttgctgagagtttgttttcttttttccttttcgccaaataaattccattcccctcatccttcaaactgtctccatgcctaacttttcctggtggtgtgacaagaacccagttttagctgaactaaggaacaaagctctgcaacagttgcaactaaattgcattaaaacaagatgtgcaagatgagttttgagacctacatccttttattaaggcagaaaaattcaagtccataatgaagtcaatatgaaaaggacctgaatttaggtttctgtagcaatccattttatggatgttgctttcttagaaattttatgttttaaaatagatttttaaaatttattaccttaaagattttttcctgtagatcatatggacacttaatttcttctatcaggcgtatcatctagaaatataatgcttacatgggaaatatattatcttatgatttgataaaaaatagatggagttgcaaatatacttttatgatattcttgaattttttttttccaatgcaaagattcccaatctgcctaccaactgaactgttttggtcgtgaaacattaccttctcggtatgtggtatgcctatcagcagaaaagtagtaaagaagaatagactaactttagttattacatttgcattgtctacaaagccatttacttaatggatgagtctcattagcagtccaaccacaatataaagaatacaatgatgtgtttcataggttcattaaaataatatttcaaaggagtcattagaataaaagaagctgaagtttcaacagacagtaagttgtctgcaaataaatgagatggaaccaacatgttttcaagtaagttaagagacatgtttacaaatacattacagccattaaaaaaggaagcatcaacttagcaagtgctggggggacgattactcatgcaatttactaaaacaaaactgtaacactctcacatcaatagttattgtagatgcaaacgcctgtaggtacaggaaaatgtgtcttaagaaggaaaattcattctacagccccgagatgattctccacttggaagcaaaattgaaaacattcaatcctgtcttcagatcaccactggtttggggggggggggggtttgttttttgttttgttttgttttgtacacacttttgtgttatttgccccaaaccccaagcatgcctatcttttcatttttttttgagacaaagtctcgctcttgttgcccaggctggagtgcaatagcacgatcttggctcactgcaacctccccctcctgggttcaagcgattctcctgcctcagcctcccaagtagctgggattacaggcgcccaccaccatgcccggctaatttttgcatttttactaaagacgaggtttcaccatgttggccaggctggtctcaaactcctcacctcagttgatccaccctccttagcctcccaaagttctgggattacaggtgtgagccaccacacctggcctaccctttcattttaaaaagaaattcatggtaaattagtaacatgaataatcctgtaagggcaaaaagtatactgaaaaaaaaattgtgtctatttgtaattatctaaccacacctaagaattgacaaatgtttgtttaacaaatcaatggatgaataaatgaatgaaaaaagcaattacttagcaaaggagagtttttagattaggttgttaattattgctgctttatcaatttttaaacccagtatttccacctgtaagcaaaataataaacagcttgtatatatgttcaataatgttgaaatcttttcacaaatagcagtgtcaaattttttttaaccaagatcatagagtttatattaaaactaaggattttatttttgggtttttttttcacaaagaaaattaacatgtagaacaaaataaaaaccactaaaggaatagagattgccatttatttattaactttccttttttgaaagagcttagatttataattctaagaaatacaaggtaagacacacacatgtgtaagtatacctgggacttggcaataagtcacaggcacctagaccacagctcttgtggcagagagcaaaaatggccccatgtaatttgcaatgtcttcccactctgcatcctgactcacctttggatgcttggcttagccatgtaacttgacttggccaatgtgatatcagcaaatggacttggaaagagacttgaaaaggctttgtgtatttctctttgtgctcttcctatttgccatcagcattagaacatgccagggatagcctgctggcggatacaaaatatttagagcggagctaagtcattcagccaagaacagcctagatcattgcccagccagctaaccctgacatgtgattgaacttagccaacctcagcacatttgcctaggtgaccccagctgattgtaggtataagagaaataaacatgtgtagtatggcactacttgacatccaacagattcacatataagctttgtactttgcagtaagattattctccaaatagaacatcaggttgcataaaatcaaagtagtactgggttttattaaagtaactaataaaaaattattcattttctattttttaaaagagaaaagacaaaattaaatttgtatgcacagtctgaattttgaagtgctggaagcttactcaacaatacatctactgctgaattcagctcacaagccaccaagtgtcaacctctgttctaggtactgagaagattccatgatttcaagctgtttacggattttgtgagaaggacagacacatagtgcattacataaaagaaattaaaactattatgtcttaatgcttaccacgtggacgaatataaacaatttggatttccagatgttttctggaatgcttgctattttgcctaaaaggtaataatcagaccaatccctacaattaaggagtttactctctattttttaaatatataattgataagcaaacatattccaaaagattcattgtaagtctaagtttttcagaaggtactaaactccaaaaatatacaagcctccaaagataaactgtttattaataaacgtatatataaggacttcagcaaacatagcttcctgagaaaaagcaattcaaagatcaatatttccttttaaattttacacaacttggacaaaattttctaaagaaatcacaattttaaaaatgttggaaagccagttccattgctgaattcataaggtaacttaccgtaaatcatatatgattatcatatttataactaacatcacatagccccttccagactgtcaactccatgagggtaaaacctagttatgttgacatctgttttctcaagcagttagaatttcctgattcattctcttgtctatctggctggaacagctaaaattaaggcagtggagatcattagtttgataaaacaatagaagacaattggtattggtgtaggagccactcaccagaaatgctgtaagtaatgactaggttctgcagaaataaaattaacagattattacagtacacactcccatacctacatcaggagtgaaaggatcaagcaccacagttaaaataataatgtcagttgcaactggggaactgagggtcctggagactcccaactcagatgcctgaagaagccagggcaggtatagtaagcaagcagggaaaacttggtaatagtgtacatgtgtacttggcttctgagtagtgggagatggcactgaactggcaagcccatatcccaactaaaagtgggtttcagctactaatctctaaccaatatttgccatgtagaagggtagagctccaaactcccatgattttatatatacatattaaatggaaccacaaatagcaatttctacatattatctccaaaattgtacgtaacgtcacaatttttaaaaccattatgtagaacaaataagacacatgtttaagcatttgtgctttcccaaagatgatgtcacctttgttcctggtccaggaagctaaaaacaagtaagaggtgacttcctcccatttcttctccctccttcctccctgtattccaccaacagtgctacttaaagtatggctatggaatattgccactccaaaacctatttttttcttttttggtctaagataagcgtgatgaacaggtaaactccatgatccagccccctgtattcatgctcttgtgtgtaatctcctctcttgagtgtgaacagtgtcagtgatttgcttccaaccaaaagaaatgcaaagatgatagaatgttactgctatgattatgttatgtaaaactccatcttgctagcaaactcactcgagagtctctctcccttgttggctttgaagaagcaaactgtcatgaatcctacagccacaaagaaacgaagtctgtcaacaacctgagggagcttggaagtagatcccttcccagtcaagcagctgatgagaccacagccccagccaaaagctatattgcagcctggtaggacactgaagcaaaaaaaagccattaacccatgtctgaacttctgactcacatgaactatgagataataaaggtgtgttatcttagcaccactaaatttggagtaatttgttatatagcgacagcaaactaatacaaggggcctaccccttaatgttaattaactgtatcactaggcacattgtttagtttgactgatatttattttttgtaatagtactttctcaatgaaggaagcaatacattgaattacactcagacgcaagccacctcatctcacagcagcccaataccttgagttctacagttgatgggcatagtggaaagagaggtctggtgtaactttatatgcagaaaatgagaaaggcacattttcttcctttgacttataattttgtctaatgatatatgcaacagaggtagtcaagagcagggtcagggaaatggagactatggtgaaggagttattacctgtaatacttctaagttgcatcataaaaatttgctatcactacagataaaagcaaaggatgagctaactgataatacctgtaaaatgctgcaaacaccaccatgatgtggtgaggaaagcaagataaacattcctatagaatcctcctattactacttgccctggggccttgtgaaaatctagagaatctaatagtctagtactcagctcgcaaggaaaccagtcagtcatctttgtcattctctgctcatatcttatttcctaacacaacaaaatcacttatagacccatgcagaaaccatgcccttccttctcagtcctagacctggctaacccctgtgccctctaaagatttaattagctagctcttaccctgaagaagccttctttgataagtttgttcctccttatagcttgctaacatcctgtgcaatctccatcatttcacttcttgccctgtatcgtaattagctcttccggtgactgtcttatccactggagtaattaattgctacttaagataagaaaccatggctctcatttttgtatttccagcactgaggagcatgccttgctcatagaaggccctcaataaatactaagtgcagagaaaataagtgagttattttactagaggctgcataagagccaagagaagcaacttaattatgaggcaacaataagcttggatgatgcagacaaaaatatgctaggagattttaagcactcagtctgtcagtggtgagcctaaaacaggttcctttaaaggtaaaagattcatacaaaacaatacgaaactaagaattgtacaactcaacacatgttaaaattgaaagaaatatcacaggtactcactatacccagatgtcaaattctttcatatcttgcttcaagcagcatgtgtatattaactcatatttaatacaaaaagctatgctttttctaaaagcatttcttttttaaaatttttttttaagagatggagtcttactctgtcattcaggctaaagtacagtggtgcaatgacagcttaccgcagccttcaactcctaggttcatgtgatcctccggcctcaggctactgagtagctgagattgcagttgtccaccaccacagtcaggtaattttttaaaatttttattcatacttttagaggaagggtcttgctatgttgcctaggctgatctcaaactcctagcttcaagtgatcctcccaacctcagcctcacaggtcactgggtttacaggctcaatgcaccatacctgacctaaaagcatttcttatcagagtcctacttacccagttttgtcaggtgccaggaaataggggagctcttacctaggagctccctctggtcagagtggcctcgcattctcagtgtgggggattcagtcctacatttatacctcccttggagatcaattccttaaagcaaaacaggtggctcactggatggcattcactttcagttgatcaattgatttgtttggagatcagttcttaacatttatttcaacagtttaacaagataaatttgaaatcatttttcctaaaaaaatttcaaggtgatcttaatattattttaccaacttcaactatgaccccttcttcagacttaacctaattccttctgaaagccaaaaattcagacccatttaccatgaagctgaatcctccactgcttctctaactacctcttccatcggccctaaaacattaaaaaaagtggggtgctgcttctctttttctgtaagatgcccaggcctggttggtaaaagtttaactgcttaggtgattattatgcactatacaaagtatactacatatcaagtgctctgcccagtagagggtctactaaaaaggcttaagagtgaaaactgccaaagggaatttcttaccttccctcagggcacacagaacctgaacctcagtaccaggtgttccctacatctccttctgctggtgagtctaaacctgaattactcttctttgtctaatcaatttagacaacaaattaagcatgaatactgcttggcatagtagccttaatcaaacaaaaaagtgagattttttatttttttaaacatctatgcaaacatagagcttttgttagaaaaagttacaaattaataacattaaataaagccaactctttagaaatgatacagaatagccaattcccagaagtatttgagtggctgaaaaacaaatctgtaaaaaagtcaatctcaagcaaaaatcaagttaaaatgagacagacacactttcaaaattgcagtaatttttaaaaatttataagaagtgtgtaaagaagttgacattcatacagtcctgttcagctgatagcttttttagagagaaatttggtaatatgaccccaaaaccttaacaaattttatatatttatcctatctattctacttcttagaactctaaggaaacaagaagagatggccagagacttatgtagtaggatttttctatcacgatgatgggctggagaatccaaatgtctcacgataaaaaagtggcaatataaaaaatggtatgtgatacaatagactcctatgctataattaatttttatgacatatgacatgcttgtaacatattaaatgaaaaatggcaccaaaattgtttaaaatacaattattttatttttaaagcatacataaactcatagtaaaaaagtatgcacattaatagtattagtcattacctgtgaaaggcagactgattagtgacttactttattattcctatccttattttaaacttttccaacccatatatgtggcccatcagatttgtaaaaatgaaaatccaaggcataggatttgaaggcatacattcctataccctgctaaaaacagactcagtttagtatctccttaggttctgatataagatgattctcgaaaaagccccaagccaacccagtctgaagaaacagatacagagtagttatcagaacaagaattcaatgccagttaagtcacctttcccaaatttaattctaataataagtccgtgttaaaaagcaaaggttcaaatattttagtgttattgagaggattagctcactgctgagagtgaatataaaaaacaattctatatcaaagccaactaattcaatcttatttttaaatgtcaccaaatatggcttctctcaaagtacgccggtccaattggtaatatctgatggctgattctgcttaactctactaaatataaaccattatcttagggaatcagtagtatactttattcttgttattctttagtattttgttagggatcataaaattggacttgactttgaggacaggactggctaagccagggcagttagtcctatggaccttttcactccgggagtctgtgactacttatccttaaacatttccagtaaatttatgttttagttatcaatcagttatctgtaaactagaactttaaagaatcctaaaacataaatctttttaatcctcaatgatttagactctctacatttttaaataattcagtcaaacaaaagaagggtaaattagtcattttgtgtgtcagataaaacacacatgcatacacagaataaatgttttttgttctcaaaggattttgttgtaacctccactcgtcatgtaacactggaacaaaatagttaggctaattacccaaaattaagttccacttctcgatttacaagctttccattttattctagcaattcttagctgtcatggactcagaaaattattactgccatcaattggaagattgttttagtggtacagatggctgtccttttataggccaacttaatgacttcttcttatctaatctgtcatctgttatttagttgtcattatgaactttttgggttgcatatcaatccattttccatgtttactaaacagatggctttatttgagaaaaaaaaaagcaaagcaagaaaatgacattgcatgattaaaaaatttcaaaaggctgcatacaatttttaatgttcctaaatgaaatgaaaaattgctattaaaaaaactaaatttgaagtcaaagtgaaatagattttaaaactcaatggacatgcaaagaaacaatcagcagcagctatctacaaatagaacaaattacttccaaaacagcaataggttattcttccagtttttgtcacaaatttttttttaaatttatcttgacaaatagatgacaaatgtcaacgaagtaactcttcaattcagaagctctttatgttgtaattcacaggtgtacctcctttgtctagtatttgtaaccttatttagagagtaggtaatgacataaatacttccatttagtgaaaattgttccttatctttgtctccttatgatgattttgtttaatcactgggtcattatcaaatcaacacccaaactcaagaagcgtaagggaaattgtaaagggcttgtatcaatgagttcagagatccaaaaataataactggcactgtgccatgaaagaacactgtagttcacactgtaccagagaaagaacttgacaattattagaaactaaaatacataatcatgaaataattttatgttacatttatgagtggtatttaaaattgtgtttgttcaggaaggatatttaccaagtcttgggatttgctgtatcagcctataacaacgctgcaaaagtaaccgagcagagccttctgaaacagtttcccatgccatactaagcacatcctccattgtagaacagattgagttcaactgtggtttttttacttgcccaagttcaaggctcctgagcacaacaaaaccaacaatgaggaagagcatgatcgcataattttttatgttcttcagacaatgtaggagaacttaaaatggacagccaatttttcaaaaaggacaaattatttgaaggatttcttttcttatatgataaccacagtaaaatgtaagactagtgtaggtaattgtcctgccactccattctaagctgtgagtgaaagtactccatcagcttaatgagaacaccgtgaaatataaaacatctatttcaatacaagttattgagaagctttaacaggctttcgggagaagctaccaaaagaaaaccgaataccagatacttgatttgagactgacaaaaatcttctattctttcctacggaaaattaaacaaaatgggctattatatagcaggaagacagagacaaaaaaaaaaaaaaaaaaaaaaaaaaacggaagaaagagtaaattgtatgaatcagaaacttggaataataattctacctcaaatacttctcttaggtcttctgctcacatctttcaggcagagaacatctatttgatgccaaatgtgtggctagaactgggccaggtgctttacatgtcatagatcaataccaaacaactagtgaaatcagcacaaattcaaccaatgaagctcttaaaacaataaggtgaaaaaccacattgttgaggagagccatacaatacagtcaggttctagttcaaattacgtttctttccttgagatcttctggtccatgatatgttttgatctgtctaaaatattatgtaggcattctcaagtgattaagaaactccggattgtttcaaataatcaggtcttccccaggcaaacactggagatcacttgttttttgtttgtttgtttgtttctgagatggagtttttctgtgtcgcgcaggctggtatgcagtggcataatcttggctcactgcaacctctgccttccaggttcaagctcaagcgattctcctgcctcggcctcttgagtagctgggattacaggcacccattcttgagtagctgggattacaggcacccatcaccacacctggctaattttttgtatttttagtagagacagggtttcgctatgttggtcagactggtctcaaactcccaacttcaggtgatccacctgcctcagcctcccaaagtgctggaattacaggcatgagccaccacgcccggcccaatatcactttcaatgggtcccaacacattaaatgatgatttcttgacaaagttttacacactacttaaggatcaattgacatcaaccctaactcaaagccaggaagcttaatccaacatgaaaatattctgtggatgttgtacttaggcatattattctctgtagtatatactttcatattgatacacatatttaacatattgcaaagcatattttaaaagcattgatctatgttctactggtaattttcacaacgcttaatcacatggccatcatagtctttgcataagactaccttgttgttcaagaatggttttagcattccatccttctccatcatactggctcagaggtgagaactgaccttctcccagtagataaaagactctcataattgtattatgtacagcagcatcagcatcacctgggaacatgttagaagttcgaactatagacctccaacccaaacctctggaatcaaaactcaggagataggccttagcaatttgtgttttattatatcctccagctgtctggagaaccacataagttttgagaaagaaggcaatgcaccttatcattcttcaaggcaaagttcacttcacttagcttggtattcttcactgcacctagcaccctcaacataacaagcacttaatacatatttgtgacataaaatagattaaaatattctaaagacagaactcattttagagaacaatcctttccagccactatttggagattttgatactagagatgtatttggctgagaagtttcctttccttaacctattgctaggttctgtgaacttgccatgaattgaaaccaaggatggactacagtcagaatgaaggaagatgaggaagaaaaaagcaaagaagaaaacaaaaccactctattccttctgaatttggcacaaagatctcaggtgttccttatattcttaagacgtaaatcacaatgaattatgatcattgagcaaatattactgtgagcctaggtcaaaaagctaaggtcatagtgttctgacataaacaaaatcagctttatttcagaaagagcatagtgaaaggctaataaacattgctaagtaaagaaggggctgataacacagatacaacatggtaggtctatactttctagtgcttatccatttctctgccagcccctgcatttatggcacatcaatcaaaagtcttggttttggagccaggtgaactgggttataatctggctcaggtcttcactagttgtaggtctttggggaaattattcttctcctttctgactgtcttcatctataaaatggagtaataatggtaactaactcatagaattgatggaagatttatattaaataatgtgtgttgtaaatgctcaataaatggtagattgtttttctttgtctataggaggtgttgagggcttgtagtctacttgttcaagcaacaggacataaaacaaaagctcattaagtcagatgtggtatcccatcagcacttgcccagcactgagaatacagcaggtattccagaagtgtgagccaaatcacatgcattataccacagtacaaagaaaccttccccaagagtcatggttgagaattacacagcagagattttccacatcacagaacagagtagactggcttgacttcatgatatttggatacaaaactgagaaaattagatttccaaaatatattattacttgaatatgaaaatatcttttttttttttttttttttttgagatggagcctcgctctatcgccaagctggagtacagtggtgtgatcttggctcaatgcaacctccgcctcctgggttcaagcgattctcctgcctcagcctcccaagtagctgagattacaggtgtgtgccaccatgtccagctaatttttgtattttcagtagagacagggtttcaccatgttggccaggatggtctcaatctcttgacctcgtgatccacccgccttggccgcccaaagtgctgggattacaggcgtgagccactgtgcccggcctgaatatcaaaatatctttttcgaattctgtgacagcccatgaccccttcaccagagcaagccaaacaccacttgttttcgccaaagagacaggagcaaaaggttctggtatttatcatctgggctttatctttttctggatagattatgaaattccagtgtattccagacaggtccattttcatggaaccaaccactgtcttccctaaaagcataacagcatcacaggcaaaggtcccaagataatagaattttatatatcaggctggctttctaagagaagtcaataaaatccaacaatgatgggaaatgcaggatgtagcagagatccttaaaagcaattagcagagagcagggatgaaaagcaattatgcaaacactagaacactaggacattcaagactttttttttttttttctttttttttttttcattctgtaaggaaaggacagatccctgctttggaaaaagaatacaaatgtgcaggtttgaaagttccccattaggtgcatctaccatttctattatattcaaatactaagctttttaggacttatattaaactccataatcttaatatttatgaccacaacttaacaattaatcaaactattaaacactaaaagagtcaaaggctgagtatgggtggggcaagaaaatttttttttttgagatggagtctcactctgaaacaatcttgaaaagcctccagaaggtacaaatttgctggcactataaaagacaaaggcaacttaaggaggttcaaggaaaaaggaaaataatgctaagaaagagaaaacatgagagaaggcactggggccaataatgcacagagttcagatactaaatagtgaagtgatccattcagcctagaagaatgttatggtagaatggaaaaatgcaagtctttgactctgagagccctgggttttaattctgtctttctgtgaccttgggtaaggcatataacttcactgagattcactctgagcacccacaaaatgagggcaacaatagctatcctatgaaataggtaactaataaatagcagcaatatttaataggcatgcaaattcttttctcttcccttcaccaagtcataataaacctgttctttaattcaaaatcaatatggccaaagccaaattcacaacatcttctcacaagcttcccttctcaaacagcctgtcttatcaatcgagccaccatgtctccactgacccaggcttggaatgtctgactgatagctgcctcaacttcaccttcaaaacaaatgtctgctcaagttatatccctccaacacgattcattttgacctctttatccctgttttgtcaaccacaacccaaatctaagtctgaattattgaaaaagccttccgtccgacccatgtgattcctacttttctccccacaaattcatatacctcccactgcttagcttatctatttcgaatactggtgtaatacatcctggtgatggctccctgtttcctactactcagtgatatattcatccgttcatccaataaacagttactggatatccaccaaataccaagtactgggctatgtattggaggtgcaaaaatgagcaagtcatgcctttgaaagtccagtggggagaagtaaacagatagattataatacaatgctataaagaagagatgaaactagaaattcgctttataggttgaacgagacaaaatctcagatcagagatggtgctgtattggaacagcatctcaagagaggagaggtgtttgtcaggcaaaaaaatggaaaagggcactattctttttcaaaggcacgtacacaaaaaaatcctgtgttttataagtaaaagacacccccaccaactgtagaggaggttgaatggatttcttgcagcagtgagtgtgtaaatgagtgactagctaggatgcaagactcccctcctttgaccaagcaagtaaacaaaggatggattcttcatagaagatgcaatggcaacaggtgacaagtttctttgggcaactactgagtcagttatgtaggtaaaggggtagagattcaagaatcaaacaaacaaaagacaacaaaagcaatacaatatttcagacacagaaccccactggccagagagagagacagattttacccctcaatgacagtgaacacagaacttagaccatttgaaataaaagttcttaccatatctctcctgactcgtacaaacaccaaagggcaatagtaaaggaggataaatctttttgagggaagtgagctgtactatctcatatctcacgggaatccattcatgagaaagtcaaatccagaagtctgttccacttcagctctcatttacaaaaaaagttttctccttcctttcttaaatcaagtgacacaagtcaactcaagatgtgcagcatcacatcgtcactcaaccaaactgtgcacacatcttctgccatgggtgtcaccaatcttaaatctcagtgtttaatactgagatttaaaaaaaaataattttattgtgtgcatttgaagtttatagcatgatgttatagaatatatatagatagtgaaatggttactaagtgaaccaaattaacatatcatctcacatggttatttcttgtgtatgacaagagcagctaaagtctacttccttaaaaaaatccctaatacaatacaattttattaactccagtcctcacattatacattttagatctttaaacttagtaatcctatatatctgctggttgatattgagatacaatacttagaagctaaaagcttatcaaacatgaaggcttttctgttcggatttttttttggagagggttaacaaaatgtgttgttttaatttcattttcagaacaaattaatttatctcaccacactttttgtttctagcaagcatgacaccactaggtatgagctgtgtgcttattgtggataaggacagtgtgttagttacctctttatcccatcacagtgtctgccacttaagcattcagcaaattaaatcatcaacatgagaaacatgagatacatttttatcatgtacatgagatacatgtcctgtatttttatcacctacgtgaacagagctgaacacctcacctattcaatagtaactccaattttattaactttcccttgactcattttcttcatcaataaaacgtggatcagattgccttccttatagagttatagtgagggataaacagggtacagtatacaaaaagtcaaatgagtcttcaataaacggcagacaaatcccaaacaaaaagaggggcaaaaaggcccgtgtcagagaaatcagaagttaaatcaccataacaatgaccataagcagcagagaacttcagaaggtatccccagccttttggaaatgtcctttaatttcttcatgttgggtaaatctagcaattgaaaaggaaagacgctgttaagttcaaatgtggatgttcattataggagctgaatgagagacaggtaaaagtttccagggaagaaaaaggcagtatgcaacaaagagttgggtatcaaaaaataaaaataaaaagaggtgcagaaaacaagctccttttcttctctaaattcgtggtgctcctatccaggtcggcaaccccacatcagtccttaccattgctctacccagtttgtgtccccactgaatcactccccagctccaagtgacgtgtgtgtgtgcctatgaagttttaaggaaaaattacctataattttgcttgatctttgtgaatctctgtagcaacacggaaaactgcttaacttttcaaaacaaatctaatcaccttatcattcttttatttcaagtaatggctacaatgtattgagcacataactaagcactgtatgccagacactgtattaattgctttatatggatctcatttattcccacaactctgacttgtatactgccgctatccctgttttacaggtgagtaaacctggagatgtggagtggttacatcatttttccaaggttatacagctagaaaataagtggtagctagaacttgagcccactgaattttaatggtgtcactgtaaagcctctgcgctgtgtatctcctgtccccatcactccccactctgctccactgtgctctgtaccccaggagtctggcctccgtgaactccaacaagcttccctggcccccctggcccccctggcttcagtgagtttgtgtgatagactccaggcaggagatgagaaggagggaagaacagttcaggatatttattcctcttggtccttcctggaaggtcacctcagtctagcttcctcaaaggacggtcaccatcctctaaaggcaggctcttctccacacttctgtcctttgaggttcccacaactgctacctccccttgtccctaggtcaaggggtggtcacagctctgccgttactcatcccagtaactcatgcagtcactataacatcatctgtggtttccctgcacccagcccacaactttgtaaacagtcccattgtaaatatactctttaatatatgctgatttgaatgtaccatctggtccctcttggaactctgatacagcctttctaataatgcctttggtctaggaataacaaaataattgttctccagtcattccatgcttttctacacctctgtgtgtgtgtactccatgctgctttcaagtgaaatgctcttcaccactttttctgctggaaaattctaactcctcctttataacttatgaaggcagttattttattcaaacctcctttgaccccctccttgccatgggcaaaataatgggctttttctatcatactctgtaagcacctacaacttagacaatacattatactgtatacatgtgagactggcaaaatctcagcatgcaccactgtacctggtatgcagtaggtaaaacaaatgatcactgaaggcttgaatgaatatattgctgttacatatattctttattctgttctacccaggaaattaatgtcacaggcattccattgagcaacacagaaggctatatgtgtacatgctggttcattctatgtgccaatttgactgagctaagagatgcccagataactgataaacattatttctgtgtgtatcagtgagggtgtttccagaagagaatagcatttgaattggtgaactgagtacaacagatatcctttcctaatatggatgggcatcatttaatcaactgaagggctgaaagaacaaaaaggtagaggaagggaaaattcactctctctgcttgagctgaaacattcaccttctcctgcttttggacactggcactcctggttcttggaccttgggcctaattagattaaatcataccataggctttcttggttatccagctttcagagaatagatcatgagacttctcggcctccttaagtacatgaaacaatttcatatatatgtttgtatgtatgtatctatctgaatatatatatatatattctattggttctgttctctctcatatattattacatataaacagaacattatatatataatactaagacctatatatacagtatatattatatatgtatttaatactatattatatataatactaagaccactaaaattgggatctttctggaaaatcaaaattcaacataaatttattatttctttgtaaaaatgcatatggaggagagggaaggcaagttaaccagatatactttgaatgtaaggttacatgttccctttaatcacttgatttactgaaaaaatacatgcttaaacctttgaaaaaggaaagttgtttttcagtagttcattatatactcactgagttttaaattctatcacaattcacgttttaaaatagatcttaacaccacacatatttacattaaaatagtaactgagtcatacttacctaaatagcctaatgactcattaaaacaactttcttttctgttaagtcatatttcttccttcataattcagttctcataactcattagttatttccaaagaaggatgtatcacagtcatagaccacttctgttcttagaacttaggaagccatctctttcagatcaaaatatctaaaatttctatgaaaattttcaatgatttaacatcagtgttacgtcttaagatttattattaagacatggtttctcagaaagtcaactcctggtctagtgtttttaaatgatttgactctgaatgttcagtaactttagttagctctcaattgatttcattatggaacatttttcttcctctcatgaaaatacgtaacaacaaaatatacctgattaacaaacagcttgatccatgcagcatgtaacattcatagatgctaatgcctctttgaagcatacttagtatttagaaatcattttgccttcattgaatgaccaaacaactggtgttcaaaataaaatatatgcctgactataataatatggcaagtacatatttgtcagtaatgggtattgctttgcatgatttatttttgttttcagaaaatgagtcctcgagaaatcctacaaatcactttccttgcatagaactgaattttggtaaaaggaaaaaggcgctatgttcagtccctccgcctttttgagatggagtctcactctgtcacccaggctggagtgcagtggtgcaatctcagctcaatgcaacctctgcctcctgggttcaagcgattctcctgcctcagcctcatgagtagtagagatagggtttcaccatgttggccaggctgctctcaaactcctgacctcaagggatccgcctgccttggcctcccaaagtgctgggattataggcatgaggcacagtgcccagcctgctaaccccttttcacatgccatctcatttgacccttgctatgttttgaatatcccctccaaaattcatactgaaatttaattacaggaggtgggacctctaacagtgattaggttatggtgctctaccctcatgaatggattaatgctgttaccacttatcatgggagtatgttagtgatgttgggaatggctatgttataaaagcaagctttctctcacattctcttgcccttctgccgtccgctcccctgccatgagattaacctcaccagatgctgacatcatggtcttggactttgcagcttccagaatcatgagctgtataaatctcttttctttataaattacccagactgtggtattgttttacaacagcagaaaatggactaagacaatcctatagacagcaaccctaccaaagtcagaaaggctaagggactagctgaggctctgattcctaatcccatgtccttcccattaaatcattttgtcaacttatataggttgaggctatacctatgctaagtgaaaatatccatctgatagattcaacttgagattctactttgccccattatatttgttctctgaggagagtgaagaagaagaaaaggagaggtttttgtgttaggccattatcaatgagactcatcaatactcaactaatctataaaatgagctcaaccttcccctaagaatactaaatactcatagataatgggctggccctttgattttaattctcagaggatcagtgtttttaatgttttatcattagttcctttcaattaagtcaggtaataatgctgcctggacattcaaacccaaatgaatggcttcaattatcccagggtctatttctcaatcaggagccaaggccctgggaccaaatagctaacactcctcaaagtacctctagattattttctgaaaagaattcaaagattattacattttagtgaattttctagagaatgcactgtttttattaaacgggagtttttgctaattttgctcctttctaaagatgttggaaagtctaagaaaactcttactcaaaaacgaggaagtgggaaaatctcaaactaaaccctctcagattatgttcttactcaaaatacatttgatgtatttgaaacacttgatgcctttatgaacaaatttgccttgatttattatgcaaagtcataattagctattttaattcattaactgcttgtttttaaaaaatatccaatttttaaaaacaacaaagcaaaagttacatggtatgacctatagaggttttacagtggatgaattttaacaaatgtatacacacatacaaagctctaatcaagttatcgaatatttctaccactctaggaagttctccagtgctcacctgcagtcaagctccaccactttcatggaaactgctgttctgatttctatcaccaaaaataagttctgcctgttctttaaatcaatataaagtatgtacactttggtgttgaacttctttcaactatttagagaagtccaccatgcacttacaggtattagaaatttttcttcttataggtgaagtatcttttattccatgaaatgaaaatccaacattttatctatgcttttgatggactatcggattatttccagtttagaatctttacaagtaaagtgactatgaacatttgtgtagcaaaacttctgtggatacatactttccttttgtaggggtaaataccaggaaatggaactgtaaaatcataaaacatatctttttaaaaaaaaaaaaaaaaagaaactgaggaactgttttccaaagtgattgtaccatttcatactcccactagctatgtttatgcatttctgttattccatcatcttattcactggatgttttaattttagctcttcaagtggatctacagtggtatctcattcctgttttgaatgtgcactttcatgataaataatgatattgaacaccttttaatggacttattggcatttgaaaaaacatatatataaatatatttatttctttgggcactctgttgaaatatttcaccttttatgttgccttaaattgggttattatgaagcattttagaaatatatatacatatatacacacacatatgttctgcatacatgtcttttgtcagatatatatatttcaagtattttcctccagtctgtagcttgcctttttattttctcaactgggtcttttgataatcagaaggtttttattttaatgaagttcaatttattaacttattttttcttttatagctagtgctttttgtgtgctctttaagaaatctctgcctgagactgtaagatattttttctctaatttgttatagaacttctacagtttttgcatttatatttaagtgtgtaatacatctcaaaatagttctttttcttagtcttttttttcctgtttagataatttctattgatatggctcaaagttcactgaccttttagcatgcagagactagttggctgttaactccattcagtatatttcaatcatggcacttttcttttctctttgtttttttttcctgagaccgctcactctgtcacccaggctggagggcagtggcatgttcagaactcactgcagtgtcagcctcccaggctcaagcaatcctcccacctcagcctcctgagtagctcaaatcacaggtgtgcaccaacacgccttgctaatttttttattttttgtagagggggtctctcaccatgttgcccaggctggtcttgaattctaggatcaaacaatcctcccacctcagcctcacacagtgctggaattagaggcatgagccaccacacccagccatggcactttttgatcctagaatttctatttgatttttatagcagtttttaggtaagattcttcatctgttcttgaacagcatccatgttttcctttaagttctttaacaatattattatagctatggtaactctaatatcttggtcatcttccatctgtttccagtgactgcttgttttcttcattagttgtcttcttcacttgtataataattatgaatgatatatcccaaggtgtctggattatcttttcttcccttaacatattgagtatttttgtggcagttaaattattggcagattctcttgatcctttcacgcttgcttttatactctgttagagtgggcctatttggttttattcttcattttagattgtgattctcctaaggtaggtctccttctatagccccaactgagcttctaggctgttaagcaagaccttctacactggctgcgacaggactccaatatctctcagcattgtgtgaccttcagtgcctctgttaagcattcagttctgcagaaggcaccctctactgtgtcttacagagtcccactctgtgaatatacagcctagccactggccaatggcacacaaggaaccctcattaaaccaatacaaagacaagttcaacagtattttacagaaaatcttttaagccaaagagaaaaacagtcatgattaactatgttggcaataattttaaggtacataaaaaaagatatttgtaacatatctgtattatcctaatagacaaaagtatccgctataggagtacatgattcgctgcctatgtccgagagctttgaatctcaattcctcacacctggtgccattttactcataatatgtaaaaggaagagctgctagaaaaacttacgtcacctgtgttaagtttatagatatacacttgaattaacaatatttttggccaagattcataaatacactttatgttttatgaagcccaattcagttagaacttgaggtcaagcaaagaaatcaagtgtaagagctgacataaaaacaggtttccttttcaatacactttcagctatcttagaaattaactgttcggagtgtttttctattcatactccagaacctctcgcccaataaaattatctcctcccagggctttcactagtgtcaattcactaaagatgcccgtgtcaacatttcaaggtcgcgcctcctcaagagtttaaatattcatctagatatccaccttgaattcaaaaaccccacaacagaattccttctcttgttcccgcaaaaatctgtacctcttcctgaatctgcattctggctgcactatgtacctagtcaccgagaggtggacttatacccctcttctctttcaccctttcatctgtctgatgcatcactaagccccaagagcttcctcctttaattatatctgaagtttgtccctctgtttccatctctgctctaatgcaattttttaaaaatcactcactctattcccacagccttcaaactggtctcttccctcctatccattcacaacacagcttctaagtgctcttcttaaaatactcatttgataacatagtttcctgttttaaaatgtactaagtattcccacacatctctagaaaaaagttcacattgcttttgtgcctctcactgccttttaattcgcttctctaataatttacatcctagttgcccagctacaccaaaccagttgaaattgcttggacgtgtcatatggtttcagaacctaagccgtttgcacaaggcaaaccatccacatgctcatccttgggtctcagatcaaacatgaacacctgagacagaagactctggtttttctgaccgctgtgttgttccaatctgtttattttactggactctatttgaaatgatccatttgtcctctattagactgtaaattccctatgtggagggagcataacaaatatatctttattctcctgtgtctagcacaatgcttcaccatatttgcaataaatcagtgtaaatgtaattgggatatccaccaccttaaatattcatcttttttatgctacaaccattttaattattaaatattttcttctagcttttttttttaagagatggggtctgggctggagtgcagtggctattcacaggcgacatcataactcacggcaaacttgaactcctgggttcaagtgatcctcctgcctctgcctcccaagtagctgagaatacaagctcatgccactgaacctggctctcaagtagtcggtttttaactaaaaatatttacaggttactacaaggctcttctttttatttttcaatcttactggaatgaaaagcaataacttctaacattagagttatcattctgctctatgatgtaacttagaaaatataataaaactgcaaatctatttccaaagcacatttaaaaaatacccccagatagctgagcattcataaattgattttatggtcatttgcaaaggtagcaggacattggggaagtaaagagagagagcaatgattgattatttgagaagttaacctcattttagcagatttttgtggggttttttttttttttttagctcaaaatgtttatctaacagataaatcaaatggagctttctgtacatacctcattacaattctaatttattttcccaacagaatcttcacaattatgtaaaaattggcacggtcctgctagtgacacttcctattctttcataccataaagcctgagcttataaacaagctgcagagagaggcattttcattacatacatcactgcattgtggcggtatctccagaatggcttaaatgcatcatgtacttttacccaaatggtctctgaacaagagtgttggaagagatgtcagttcttgggccctgacaatgttgtttcctagcctaaaaagtctgagaaatgtggaatattcctacctccttctgtgagaagtcagaaaatgaagagacgtattcatctttaagccaaccttccaaatttacctgagcatagagcaccaccccttcaccaccaccctcttttctttcctttggaaattcttattaacattctataggacatcattggaaggttaatctgattgtggcacatccataatttggctatttagaacattatgtttaaaaacagagttaatgtcatgagtctgtctgcttatctctatctcattgtattttccgcttatcttcctggtttctttttcttcctgaatctccaacacatgcccacacttggattttaaattattggtccaagacaaaaagagtcatgagtacaagttcgggccgatctacttcaatgaacaaacaatcgaaagctctttacttcctgatggcaaaaatatataaaattagtgacatctacttcagtatgcattaacctctttttaaaaagctgcctcctttatcttccattctcaatttgctttaggatgtcttttatttcttccttatctatggctcctactttctcacagactttttttttaaaatgtatttggaggctgatatgatcagtgtacttcctctgaaattaaagtttcttttgatattgagttcagtatattcagagtggaaatcaaatgacttaggctggttacaaagatttaagttaatagagatgaatttaatccactggtggtgtgttcataatcaaatgaaggactcatttctgttctagagcctaccaaataaaaatgtcaaaataattggattaaaatcatatgaaatttatttatttattcaacaaatattaaatgtttttatgtgccagacaatattgggtgatggacatactgatgttaacactgagaccctaccttgccttcaacagcctctagtttagcagagaaggcacacattaattctgtatttgtgtgtgccatgatctgattgtaattgtgataaatgtcatgggagagatgatagggctgatacagcccagtccttgggtggggaggctgggtaaggatagggtcagagaaggatgacctgagaaagtgacgttgaagctaagatataaagaatttgaaaatggcttggtaaagttctagataaatgaaacagcatcaaatgcgaaggttgccacatttgagatgagagcaggtcagtgtggttgcagtacagagagcaaggcacgatagtgtgagactaggcagagaataagcagagccaccatcataggagctcagaggccatcttaggacatcagaactttctgttaaaaacaatgggaagccaagaaaggtttttaaagcaggaaatggacatgatcaggttgagtgtataagccgtctccctagctcagtggagaaagcagactcatcttggtggtagtagggagaccagcaattgtccccaaaatgtccagtcactactggcaaaagcacccctaaaaaacatacaattgaggaatgcaaggtgcaacttcattagaagcccctcggcttacaacgtctatctaaccagaatgccattcttaaatcgctcctattcctatttcaaacttctggttcaaacagctctagtagccatggaagaaaagattaaaggcagaaagactggtagcagaaaagccaataaggaggttttagcctaggcacttggttctggtggttcaggaagtagagaaaagtcaattaaaacaagctacacagaaggcggaatctctagtatgtggtgaatctggttattgcaattactacatgtatctttttaaaaaagtaatggttttggttcctcttgaaatttacatgacactggaatatcctcatttctctgaattatttttcttacatataacacatatatgacatttgaccttgtcagatgcttaaaacagaagaattaagccaagaaatatttctatcaatctcaagtcttttaggaacctaactaaaggagaattaatagtttaattataaacaattctttcctgatcattttaaaagacccactgagaatgtgtgccaggcaaaatagtctagttttagttactttttgcaacctaaagtaagaagtctctatttttttaaacaatatttgatgacttagggtgatccagaattaatttcctccgctgctaatgcaattctgtaagtttttactcaattctactctgcatcattaaacaggactaaaagctttacatttagggaagcatatcacttggaaaaaaaacacgttaatgtgaattataacaacaaactttggagactaaaggcatgactagtaggatcttccaccccagattttttatatgctaagaaaatgaagaaagaagcacacacacatactagattacctacaacacggcctcttaggcaaagcattgacatttatgtagaaggacttcaagcgtggagctagagaatatgcatattcaagtaataatttgattttaaaacctgtgcagcccgaagtcaagatcaaattgcatactcaatttttccaccaacatttagaatattttctcaacgttgagacgtgataatagttgtgtggctgtgtgttttttaaaaagtctattaagtagaagagactgctaatcactgaaccagcccttgcagttttctttgctgctctacagtcagttaacaggatattacaaaataaattaagaataagaaacaggccaagttaatgcacatgataaagagttgagtcagggaaggtttctgcaatatttggagcctgaaaggagagactctaagggtagcagtggtgtatgataatgagaagagggagagaaaaatggtaaaatactttatgctcttcaagaatcattccttttgctccttttgaaaaaaaaaaaacaaaaacaaaaaacaaaaaaaacactttcacggtagcaatttttaaatgcttttcaataattgtgagtgccagattcatgattctgtataggaacatcttaatgtaacatccttaagtagaaacccagtagaacttggttttgtatcattacatcaatattgaaagtatagcctgggtgtggtggctcacacctgtaatcctagcactttggaaggctgaggtgggaggatcacctgagttcaggagttcgagactaccctgggcaacaaggaaaaaccccatctctactttaaaaaaaaaaaaaaaaattagccagatgtggtggtgtacaccagtaaccccagctattcaggaggctgaggcacaagaatctcttgaacccaagaggcagaggttgcagtgagcagagatcacgccactgcactccagcctgggtgacacggtgagtgagactctgtctcaaaaaatatatattgaaagtataaatactactataccattttaaagtacacatacatagaggagtagcaataccattctgtgaagacaactggttagttgtagttactttcatattctggagctgtcttctgcctggactattctcccctcaatcacaaattttcactgggtcagtgcctgctcagatatcatatctaggcttaatcaactgttctgtagaaagaccttcccagatcctatagatgcaatgctgtcaaacagagctctctacaacgataaaaatgttccagatgtgtgttgcccaatatggtagtcatgagccacatgtgaccactgagcacctgaaatatggtagtgtgcctgaggaagtgaacatttaattttattcctttttaattaattcaaatttaaattaaatttaaatagctacacgtggttagtggtttccatgcagaagcagaagaagacagctcctgttcttctatttcattcatattctgtgtgtccccttgtaggacttggcatatttgcagttacatagtgtttaaaattatttgtttaatgtccatctttcccactaaattattgagattttaagtagagtaactaggtctgtcttgatcccacaaaagcccatgcttgacaccacaagcccccatgcttgacacatagtgtctattcaaagagctgctgacttaccatttaaataaagcttttaattatcttaaacatataatatcagatattaataagttggttaagtgaataccaaaggttcatgttagaagactggaatactgtttacaaggtgtgaactttctggaaaagtccagaaaatgccaccagaaattataaaaatcagtggtaaaatgtggttgccacagatttttcataaacacaaacatacatacacacacacattctcaaaacacagctgccttcagcaaaagagtcttctattttgctctaaaatctgttgtggttgtgaaaatgatgacacttctctgcaaaagaaaaatttcaatgcaaaacaaactcacaatttagctcaggatgtatgaaaaagttgacacaaagaagctgtcctttcctggtttaaatgacacattttatctttagattttggtagctaatttttaaaaaaatcctttaaaacgtattaccttttccagggacaaatgctctataatgttattctctgccatctttgaaaatgaaataaacatttattaaaataataccatacacgacatagatatttttaatacccccattggaaatggtggcatagagaagtggacagtgtgtataaagctacgaattccagagaacactggttataattcagtgggaaatacagttagtttgtcattgtttggctgatttgttcatccatccatttatctctctctccatatgtaatgtttatcctttcttactttactaaaataatatctttcatcatgaaactcacagtatgctaggaaagttgaaaaaatacacaggtgactgaaatataagcccctaaagaaagctgtgttcaggagaggcatagagttcatccttggaggagccatttatatgaaaacagttctgtttacatgcaacagagaaagccattaagcttttttttttttttttaatggagttttgctctgtcccaggccggagtgcagtggtgcgatctcggcgatgcctcagcctcctgaatagctgggactacaggcacgcaccaacacgcccagctaatttttgttttagtagagacggggtttcaccatattggccaggatggtctcaatctcttgaccttgtgatcctcccgcctcagcctcccaaagtgctgggattacaggcctgatccaccatgcccagccaagaattcttttttttttttttttttttttttttttgagacggagtctcgctctgtcgcccaggccggactgcggactgcagtggcgcaatctcggctcactgcaagctccgcttcccgggttcacgccattctcctgcctcagcctcccgagtagctgggactacaggcgcccgccaccgcgcccggctaattttttgtatttttagtagagacggggtttcaccttgttagccaggatggtctcgatctcctgacctcgtgatccacccgcctcggcctcccaaagtgctgggattacaggcgtgagccaccgcgcccggcccagccaagaattcttaagaaaatatcctagtgagagcctttctttttaatcctgaaatgcatctgattgaggacacagggtttagggagggggcacaaaggaaaactgaacagtacatatgtgttgcataaattcatggactaatgattaggacaattaatgaatggtttaaatatgttagacgaaagctcattttgtaatgttctgaaacacatgaagcaatgtgagagactattattttgtttgtttgtttgtttgttttttgagacagagtctcaccctgtctcccaggctggagtgcagtggcgcgatcacggctcactgcgagctccacctcctgggttcacgccattttcccgcctcagcctcccgagtagctgggactacagacgcctgccactatgcccggctaattttttgtatttttagtagagacggggtttcaccattcacaggatgatctcgatctcctgacctcgtgatccgcccgcctcagcctcccgagactattcttaaaaacgcccatagtttccacacaaacaggctgattatgaagagtgacagaaaagccaacaattgtaacgtttgcctaaattttcttcaggtatgttcctggtttttcaggaggcactctgccttgcagatagagcttacaaaccaagaccatcagggtacatgtggcactttcatttttcttctcagagtagatctagagacatttaaattaatcatttggaggttgaaataccaattccttggtatttcaaagataatgtgccaagtcctattatcatttagcaataatttaaggaaaggaagtatctttcaaaagtacagaacaacctacacagatttaacatgtcaaactaatatgataaaattattttgctactatggtaatttcaagatgggtgtgacattttgcttttttgtcttctaaaaaatgaaaaatgtctttgaatcttgttagcaatgcctgaccttcagacacactggccatgccagggatgcagagttcacagtgattactcctacatgtacctgggcccaaaggccaagcctaggaggttcatttcattatcataaagtaaggtgaaaaaagatcaaacgtggattcaaaaaaaataaagcactaacaaggaggagaatatagcccgttgcaagcactacaatcaagtaggtggtacacatccccagtccttgaagaattgctcatgtgccctgtctaaaactggttttgtagactctgacttttgtctttggttgcacaatgatgaagaatcaattttatcccagaccagtgaaaatgagagcacattactactatgaggagaaccgctaaaggttaattgggttttagatacttagccctaattgttcaagattttatcataatatcaatttctgcattaatgcaaggcaccctgaggccatatgaaatagatttcattctaaatttaaatacatccttccatccaaaaagagaagcattcttcccagataattcccacaatcagaatccaacttcctagatgaaataggtcaaattaaccaaacctcccccaaaatattgctttcagtcagtgatgactgacataattatctagttaatcctaatacttagatacttaatgtagataatctgaaacattaattaaatatgaaaatacgttacatgatttttcctgggaactatattttagtaacactaacacttctgtttaagaagttagagatagttttctttccataactggaacattgagtactgttggttcaacaggaacaagtttggtatgccatttatttcggtattcagagcaggtcattaccaaaatgaaaattaccttaagtattgttaagccattagggcacagttttgtataatcagacaacatcttaatagatactcctatttattgtcacaataaaccatctgttaagttttagagatccatttttgaaaaaaggagatacctagttttcagaacacctggtataggaaactcttaatttacaaaataaatgaaattgagggagactgatgtgcgttgcaaaagaatacctaggttgaagaaaaaacaaaacacctacctaaatattctttgaccagtagtatctctagggcttctgtgtttcaatttacaattttgtttaacatataacctttaaggtattcaaaaacaacagcatcaataataatagctaaaatttagacaggaggttatgtgatccattcactattctagaaactttacatttattatctcacttaagcctcacagcaatcctaaaaggtaagtgctgatatagtttggatgtttgtccctttcaaatttcatattaaaatgtgatccccaaagttggaggtggggcctggtaggaggttttaggtcatgggggtagatctgtaatgaatagcttggagccctccccatggtaatgagtgggttctcactgttagttcacacaagaggctggctgtttaaagaagcttgtcccttgtcactctcactgcctcttgccatgggatctcccagctccccttttgccttctgccatgatactaagtttcctctggcctctgcagaagctgaacagatgttggtgccatgcttgtacaccctgcagaaccatgaaccaaacaaacctcttttcattataaattacctagtttcagatattcctttatagcaacataattggtctaacacagtcagtgtcgttattttcattttacagcgaggatactgagactcacagtaacttctgaaggttgtacaaccttatgggaaaaagagggtacagattttaaaagcaatggattaaaatgagtactgctgtgaatatctacatgtctccgtacacgtccaagtttagttgtctcactgcatgagtattttccatcttttcagacctatattaaaaatgcaagccaaatatcgattattatcattaccagtttctaacacccctgagcattttgacccggtaaggcaaagatgaatatttcttagaccattttatccatcataggttattctaccagtgaatagctgtctgatatcttggtctcaacatgactagaggctttacaagcatttataaatcccagtaatagtacatcttcttgagtggctgcctggttccactatgcgaacatcatggcaaccgcgtaacaaaaaagccacacagagtgttcctagtacttactgatatgaccaagaccttgtagcctttgaaactccatgatttttaacataaccaaaaagttcatgaataagagcttggtgcttcatgtcacatataaatgattttatattacccatatattgtattcccgcgattagccccaaagatgcctccccaatttagcagaagtatattgcttaggagggaacatacaaacaaaacaggctgggcacggtggctcacacctgtaatcccagcactttgggaggctgaggtgggcagatcacctgaggtcaggagtttgagaccagcctcgccagcatgttgaaaccctatctctactaaaaatacaaaagttagctgggcatggtggtgggcacctgtaatcccagctacatggggggctaaggcaggagaattgcttgaacctgggaagtggagattgcaatgagccgagaccgtgccattgcactccagcctgggcaacaagagcaaaactccatctcaaaaaaaaaaagaaaagaaaagaaaagaaaagatcattagacataaaacaacaaaaaaaagcacatataaagctgttctattgctcagataatatttcaaagaacaggaaagagaacatatttaaaagtatatatctgcattgactgccaatctctctttcgatagtagagatgactatgtttgatattaagcttctgtaaatcaggctttcctactttaactttctagtatcaactggtatatacaatcattactctttctttccttttttgttttttttctcctatcctctacatggatagactagaggcttaatagtgtgatgataatggctctgtaactctgtaactctgggtatggcgtgttcagaacacccacagtaaacaatcccaaatccaaacatgtgtctcagaaaatgtgtctcaaaggcctagtgctgtgctgtccaatatggtaggtggtaactacaagtaggtatttacattaaaattaaataaattaaaaattccattccttagccacatttcaagtgttcagtagccacatatggcttaatagctactatactagcacaaatatggttccattggacagtggctagcctagagtaacattttctaacttaccaccttgaccagggtttaaatcaagaccagccaatggattgtgcctcacatgtacacctacttaattttaattggcatcctggagtagaaaaaaagtacagtgtttggaatagacatctcttgcggacatagaattgcggagtggtgcccacatacaccaaacatggctcataagaacttgcattagcagcagtataaaactacaaaatactaaaaatgcaacaagagtgccacatctcataaattacacgtgtctttccacgtgccatttcaaaataagccatgagcgaagtgtttttcttcaggcatacagagttaaataaagtcctgaatacgatccgtaatcacaatctgggtctaatctgagacaattcatcttcttattcattaaaccagaaaacttgtatgaattggtaatacaagtaacaccgataatttttttaaatgtccattttacctacatgtgaacctgatactctgaaaatcactgttgattcttgtcaagtaaacaactatgccactgataaagctccattcttgagtccatattattccctgatagaacccaataatctaatcagaggtttttttacccccacttaggaattgttttttggatactgtgactccaatagggctttcattaactaaaaagaactgtatacaacatatcaaatgcagcatctggtctagtctgaatttctaaatgacaagcacagcatgcatttggaattacatagagaacgagaaatcagacctctatcattagcaatctttttccccaaacactgcttccacttcatgcttcaacacctttaccttccacagacctcttggtaatgtcacgactagcttgtcaaatcaaattcagcagcacacaagcatctgtattaatacttttgcattttcattcactaggaaaaaacaaactctacttagtaggcagattagccattatctactgtaactctaaaccatctgagttacattactaaaatgaattggcattgaaaacagagcgacagaaatgtttaccgatagaaaaatatgtagggaatgggagtttcttttgcgcttacttgccagtgacttcctaaagctgtaatgaggtcaaaataagctggtttatttcatctgtgaccactgggtgagatctcattttataatggccttaataatttgccacttatgattacgataataacaatattttttaaaatcactggaaactttaattaggtatttccaaatcgctaggggttattaaccaagggtcaattttgctcccccaacccccacccagaaatatttggcaatgtctactgatatttttggttctcataattggaggtgagagtgctactggcatctagtgggtacagaacagggattctgctaaatatacttcaatgcactggaaaacttcctgcaacaaagaattatcccacccaaaatgtcaacaacgccaaggtgaaaaaaccatgccctaaagctacatatgatcactatcatttaaatgattattccaggacttctatggacatgagctactgaaaaaaaaaaatcattttgtctttcacagatgtcaagcttaaccaagtccatgtgaccatttagagagttaggaggtacatctactataaaaatagcatttttcaacagaggctattttgttatttgtttcatccttattcatcctgtctctctaaacaacagcaaaatttttaacccatcatcaacctttaaatactgttgggtcaagttctcactgtcaaaaaagacatattaattgcaaaaaagcaaaaacatgaccatctttacagtgctaaatcacttctggaaaatgtttatgtcaaaaatcagcttaaatttttggagataggacaggcgcaggtggcccatgcctgtaatcccagcactttgggaggccgaggtgggtggatcacgaggtcaggagatcaagaccatcttggccatcatggtgaaaccccgtcgctactaaaatacaaaaaattagacgagtgtggtgctgcgtgcctataatcccagctacttgggaggctgaggcaggggaatcacttgaacccgggaggcaaaggttgtggtgagctgagatcacaccactgcactccagcctggtgacagaccaagactccgtcttaaaaaaaaaaaaaaaaattggagataatttttaatagagactattactaatctaataataacttccataatatcttaagtttcacaacagagatgatgatataaagtagaattaagtggcagcctaattattaatgatgttctttgcctttgagataatccagttatacactttaaaggtttggtatctttagccccatgcgaggagagagtcgtatgtttttctttctctcacacacactccaggaaaggaaaagcaagcacagtagttaacccctgatagtttattagtcattcttgctttgtcgctttattaccacgaaactggtcagtcatggacataaacaaaacgtgcaaggataaggcaggctttcactcacataaaaactgccaagggccaaccccattgtgaatcactacagaaaatcattacaaaatcttaaaacaacaacaacaacaacaaaaacccagcactttgaatcatagtatctcttcaacagatacactacaaaactttatcagaaacactatgtgagagatgaacagagctaggaggtattttcacattagtaaaaaaaaaaaaaaaaaaatctcagaaatcatttatataaaaacctattgtgagaagtctaaatttacgttcaatgccttccctttctttcgctctatacagttttaaaatatgttcattttgttctaactgcacagtaataggcatggccttctaagcagaaaaaatatattatggcaaggaaaaatgaagagatacgttgctaacacaacagacttttgttaaacaattaagaggaaaaaaatgcatacaatatagcatttgctatataaccataacctctcccattcctggtgtcccactctgaattctacttgattcaacaacttaagatgcaatggaaataataatgtctattccagcagattaaaaaatacaaggcagcagtaaatgttatgaccaccagctaatgggctatggtggagaagcatccactgtggattaagctctcaagtactcaataacttttaaaaatgccttaaatcacccacaaaatgcagtatacatggctttgtgtatacaactgttaagtgtacaaatatacatcaggtgcaggaaatcaaaagcagcctttgtgaaaacttagttttatagtacttattactacaaactagacataaaggtgctgaataaaataattaagaaaaaggaaatagcaactttgaacaatcttataaatcattttatataagttagttatccttagagtatgtatactataattctgagttaaatatttatataatacaatttttgtaactgaaacaggatctcactttgtcatccagtctagagtgcagttgcacgatcatggcctactgcagccttgatctcccaggctcaaaggatcctcctgcctcatctacctgagtagctgggaataaaggcatgcaccgccatacccagtgaatttttttttctggtagagatggtgtcttactacattgcctagactggtcttgaactcctgaactcaatggatcctcctgcctcagcctccccaaatgctggaatgacatatgtgagccactgtgcctggtccatataagattttagagtattactctaagagattaaccctaccctggggaatcgatgtcaaaagttgggaatatctttcctaggtgaaataatagaaataacgaactctttagagctgactatgtagcaggtgcttctgagtgccatacccagggtaactgatccatgggttacattagaggaaattgaagcataaggcaagtaagtaacttggccagagctgcagagcaaccatgtggcagaaccaagatttcaagatttgagccccggcagtgtggttccatagacgctactcactggtctcttctgcctctggaagactctctccttccctgccttcttgtcacccctcctcccacccactgactaccactgtacagcgagggtcttaagccagagatcctatgagccgcaaccaccatctgtgagctgcacattttttgaggaattacctttccggcagcacatttgagggattcaaggacttagaacaacatgaaacaattcaacaataatgacaaggcaatgactatcgaagtgcagcttcacctcacaatatctataaaaacatccatggttattgcaccatccacttgttcctcttcctgtactcttgtcattgtttcaatagaaaccgctgactaccctgactgctctcatatatacccagaggacaaggtttgagcatcttctggtaaacagcaatctttcttcatgctggcatgacctcacactccacttcttgcctcttctctaaacaatttcttctgttgtatacactactataatcatagcacacatgggtcaaaatcactagtctaatctcagtactctacctgcaaaagagcagtacctaacaaagaaaccaacctacactctcatttgtgaagggcctactgtgtgtgcgttccagacgatatgtggtaggtgctgaccactttacatgcatcaactgacctttaaacagaactatgtccactatagcgtaaacacaatgagggctcagagtggacaagcaactggtggtccacaattccatagcctgttagggttaaagctgggattctaatctggtctgctcttgaaagtccccacttggtaatatttctctttctctgcctttgcctaaggaaattctatttattcttttttttttttggagtgcaacagcgctatctcagctcactgcaacctctacttcccaggttcaagcgattctcctgcctcagcctcctgagtagctgggattacaggtgcctgccaccacacctagctaatttttttgtatttttagttagagacagggtttcacaatgtcagctaggctggtctggaactcccgacctcaagtgatccacccaccttggcctcccaaagtgctgggattacaggtgtgagccaccgtgcccagccaacttattctttaatgtctcccacactaatctgcattctccctgcaggcagggaccatgctttgttcacctctgtttctattatacttcctaaggaatggacacttaaaacttcccgaactgatcaaaataaatgtgagaggacagtgcctagcatctaacaggctccttggtggttgcggtctaagtggacatgtacaggtgggattactcgaattctaagaatggctggatttaacacaagtcaaaagcatttggaaacaataatcatcatcctgaattcccaattctctcccccctcacctttctgcctctgctctaccccttcttctccaaccctatgtctcagtctgtctgtttctccactctcttgacttctctctctgtccctctcacaccattattgtcaccacaggcctttgaagcgactataccctcaaacacaccatacttatcttccacaatcacatctgaaatattttggctatagtttgcttatggtttgtttggccttgctgagtctcatgttgaaatctgatccctaatgttggagttaaggctcgatgacaggtgtttgggtcccaggggcggatcccacagagatggtttggtgctattctcaaaggagtgagccctccctcttagttccttcagaactggtggttaaaaggagcctgacacctcccacccttctctgtcttgccatgtgatctgcacataccagttctccttcccctcctgccatgagcagaagcttcctgaggccctaccagaagcagatattgttgctatgcttcttgtacagcttgcagaacaatgagccgaataaacccctttcttataaattacctagtctcaggtattcttttacagcacacaaatggactaagacaatttctaaccacatctgagataaaattaaccccctaaataagcacacaaatggtattgatatgatgaataactcacctcaaatgtacttcagatagccttctgcacaaggcacgtctcttgagttaacaaaccctagccaggcatggtggctcatgcccataatcccagcactttgggaagctgaggcaggcagactgcttgagtccaggagtacgagacctgtctgggcaacatggaaaaaccccatctctacagaaaaaatacaacaattagcagggcctggtggtcacatgcctgtagacccagctactcaggagactgaggtgacaggatcataagcccaggaggtggaggttgcaatgagcagcgatcatgccactacactccagcctgggtgatagagacccaatctccaaacaaaacgaaaccaccacacaagacctaaacctgatatccagatctgagaagacagaaaatattttcaaatctctcacatatatatgcattcatacattgctacttactttcctctttgtgtgttactgatgtcttcaagtaatcacacagctctctgcacatgccagctcttgtgttccaagtttccatgcagcatctcatggaattgcctcaacaactccagggctagggactactgtcatctgtatctaacagacaaggaggctgtggtacagagggctcgtaaagttagcacagtggagaaggcaggttgctactcagacatccattcctagagcccacattcttagaacacacagcctgtctgtccctccagcaccaccctgcctacttttagtcatcctggtgtcgtctggctgtaagttcctgagaattaccctagttgctaatgtactggaatggcatcttccttattaaaggcactcaatttagcaatgcatttgcattccctgattggttttccatataagtggttcacaaaatatggtccctctgcaccacttgggagtgtcttagaaatgtgtattctcaggctttatcccagacttgttatgttagaaactctggagcaagggcctacctgcctgtgatttcataagccctccaggtaattctgatgcatgctgaagtgtgaggcttactaccctgcatgatatttatggcaagttttaggtaacggtgcctttgaacactaactttcagaaatagaagatagaaaatgtgcagtaaggcatcttgcttcagtaacacccaagggcacattctgtctacagttcctcactctgtcatctgtcctcacacgtaggctttctgcttatacactccaaattacaactacctaacagcttctaaaatgagtgtctggcttggaagatttttaaatgctatcagagaatgtctgtttcaggatttaacttgtccagtgcaaagaagtgaggctgggccacaagtgacccatcacttcacctgtaagagcaaattaattacccctcaacataagtgttatatttatgtgccaagtatggtcgataatgaggtctttaccgtgtagccatatttcaagccattgttcacttaagtaaacacattttaatcactgtcattttattatttattcttgagtctactatacacctgtcagaacattttgtgtttgactaactgtcatctccttgtatctttcctgcatcatatataaaccactgtccacctccacatttttccctcttactgaagtcaagcactacacaagttcatggggacttagaggcaagtgtgacggctgaccaccccaatagtttgcaaagcctttcatctgctcctctgaaaacgcttttcacacattccttccatatatctctctgctgcaatctctctgttgcaaaactgttgttgatgaagtgacatttatctaagcattgtcactttgaataataccaaagaaagaaaatgaaaatcaatgtaattgcaagctatcaacctcaaattttattcacttgttttaaatttgtcaaatgaaaataatttgtttatctgagtaacaatatatgggtatcagtatatggataacaatttttaaagcttgatttcaaatttggatttttaatattaaaaagatgaaaaatttttagtccaattttccctagagaactctaacaatagtcatgtactgtataacatttcaataatgacagattacatagatgacagtggtcccttaagattgtaatggagctaaaaaaaaaaaaaaaaaaaaaaaaaaaaaaaacccgtaccctctagtatttattacaaggtacttttaacgattattttagagtctacttcttctatttataaaagagaaataaaaatgtaaaacggcctcaggcaagtccttcaggagttgctccagaagaaggcgttgttatcacagaagatgacagttccatgcctgttactgtccctaaagaccttccagtgggacaagatgtggaggtggaagacagtgatattgatgatcctgacctggcgcacgcctaggctaatgtgtgtgtttgtgtcttagtctataacaaaaaactttaaaaagaaaaaaaacaaaatctaatatttaaaaataaaaaaatacactaaagatataaagatagaaaatatttgtacatagctgtacaatgtgttttaagctaaatgttattacaagagtgtcagaaagctaaaaaaaaaatttaagtttataaagtaaaaaagctacaataagctgggcacagtggctcatgcctgtaatcccagcaatttgggaggctgaatcgggaggatcacttgaggccaggagtttgagaccagcctggccaacatggtgaaaccttgtgtgtatgtgtgtactacaaatataaaaattagccaggtgtggtgggacatgcctgtggtcccagcttctcatgaggctgaaggacgagaattgcttgaacccaggaggaagaggttgcagtgagctgagatcacaccactgcactccagcctgggcgacagagtgagaccgtctgacaaaacaaaacaaaaaacaaacaaacaaacaaacaaaaacaaaaaagaacaagctataataagctgagattattgaagaaagaaaaatatgtttaaaatttatttttgtttatttattttcttttttagagacaaggtcttgccctgcaagcccaggctggtcttaagctcccagcctcaagcaatcctccttcttcatcaatgtttttaaacaaatttagcatagcctaagtgtatcatgtttataaagtctacagaggcatacagtaatatcttagcccttcacatgcactcatcacttatgtactgactcatcctgagcaacttccagtctaagctccatccatggtaagtgccctgtacaggtctaccattttttacttcttatactgtattttaactgtaccttttctacgtttagatacacaaatacttaccattgtgttacagctgcatataatattcagtacaataacatgctgtgcaggtatgtatagcctacatgtgcagtaggttacacccatctagatttgtgtaagtaactatgatgttcatacaatgatgaaatcacctaaggacacacttagcacaatatatccccttcatcaagcgatggatgactgtattcataaaaatctggatattgaggggctgcctgataatgcattattatatgtattaaaatgtgtcttgagccaaatgctaattaactcttggctggtgcctttccttaatgtttctttcttctttttttctttttttaattctgattactctttgggacaaaaaggtggtgctgaaacaagatatcatttatgatcaactcaatacagagattacttaatatttatcacattatgcagaggcttcaataagttcatcaaaatatatgttccaaaatcctatgcatagatttcaaacttttcttccatcaaaataaattcatactaacttgttgtaacatgtctgagtaggatctagtttgaggcactaagaagattaagacatcagtttgaaaagatcccgtatcagagcaacatgaataacatgaattctgctaatgttgaggcaagaacatgcatcaaatttatggcgaagcttggatggaagaatggtaaagtcgctgatgctttacaagaagcttatgggggcaatgcccaaaataaaccagcaatttacaaatggataattcattataagaataaatgacaccatgtcgaatatgaagcctacagtggcagaccatcaacatcaatttccaaggaaaaaattcaccttgttcatgctttaactgaagaggaagaaggactgatgattaacagcagaaacaggcaacatcgtagacatctcaactggttcatcttgcaccattctgactgaaaaactaaagctgaacatactttccactcagtgggtgccaaaactgttgcacacagatcagctgcagacaagagctttctactgaaattttaaccaagtgagattaatgtcctgaagcattcctcagaagaattataacaggagatggaacctggttttacccgcatgatcctgaagataaagcataattatagcagtggctaccaagaggtggaaatgggtggggcccagtaaaaccaaaggtggactggtcacaagtaaaagtcatggaaacagttttttggtatgctcaagacattttgcttgttgactttctggagggccaaagaatgataacatcttattatgagagtctttcgggaaaggtggctgaagctttagcggagaaacagctagggaagcttcatcagaaagcacctctccaccatgacaatgctcctgttcattcttctcattaaatgaggacaattttgtgagagttttgatggaaaatcattagatatccactttacagtcccgatttggccccttctgacttttttcatttcctaattttaaaaagtctgtaaagggcactcatttttcttcagttaataatgtaatcaagattgcattgacccccaattctttagggatggactaaatggctggtattattgcttacaaaagcatcttaaacttcatggagtttatgttgaggaaataaagattttttttgagaaaaaatttatctttcaattctattttccacaaactttttgaagtcctcttgtactatcctcaaactttgtgcactaattgaaaaaatatatatatttttgtaaaattatttataatgttacatatataatatataattttacatataacttatgtatataattatatataaatttgcatgtaatttttacatatatacacttctacaaaggaaataagtgaggaccaattttttctaagtggcttaggaaaagctgaccaaataaaagatccttcctcacacactgtggagtccttccattgaagaatgtggacaacacactccatagcagaagtcaaaactggtggctgctctccatcatattttatttcttcctacgttttttttatttaaataaattgtcaactttaaaaattcaagatcttacatctaaatatctggatttccattacctcatggaaaaaatgaggcctctggcaaccatgaactcttatccccacatggcaacgattgcatggtactaaataataatgccacctatgccaggcttggattctcttcactccagtaagttctctgtctggctcctgtgggcctctgcatttgccaccctgctctgcgttcagtaataactgcaagagagttcttttgttcccagcttggattgatccaggaagatgtctaaagaaagctggaccaagagcaaactctggagaatggacgggaaagaaaatgagtaggaggggaaaagaagagtctctcaggataggcttatggtgtaagcaaagcctcaggggtgagggtcagggtatgggggaaggatgtgtaagatagagtaaaacactgaatgtactggtttgactgggtcagaggtgtaggaatgggaatagcaggtgaaaaacttcagaaaattcattgaagagagactgaggagagccttgagggctaatccaaggagtttctgagacattctctaaattacagttcttaactttctattgagaaacagatcaacccactctctatgcaatttcaggtaagctaaatgcccacttaaagcttaggcagcatgccctgcctctccttactttccattctttaaatcaaaaaacagtacctacaaatgttatgttaatctgggagcaacatgcccaaaatcaaaaggactgaacatgcccaaaatcaagaggactgaaagcaggaagaatgctttggcacagaaggggaaaggatgaagcggcagtggagagccatggttaaggacacaggtacctgcctgggttcacatcctgaactgagtatatgcaccatggtcttctgaaggttacttattatctctgagcctcagttttttcatctccaatggaggaaatactagtacctacattaaaggtctgctgtgagaattaagtgagttgatacatattatatatgtttagaatagttcctggcacaaagtaaggtctccacgaacattaactgtgctgctgtcagcatcactaccactgttaccactatcatcatcacttaaaaaactgcattaagtccagaaggatagtggctgagagttcatctgcagccgtggccataaaaatagaagtaaatacatgacaaagaagttgtgaaggaagactatataggacttggtaactgcagaaatgtggggaaaagagctatacagaagtatttaaagatcactgcatgaatctgaagctagatgatacaataaaataacatggacaaaggtcaaaaagaatgtggcttttggagaagtcacatttaagatgaaagcagaggactgcagtgggactattcagaagtagttgaaacggcagaaatagaattgagtagaaaggtcaggctagatgcagatttgacagctggtggtgctttgtgaagctgataatttctgcaaggcaaggggatgaggaacacagataagccatatcatcatgatcattgtttttagataccactgcctggacactttctatgttctaggagctgtcctgagcattttatatggactgtctcattaagccatgattatctccccattttatagatgcagacactgaggattagaaagtttaaaatccttgttcaaaggcacccagcttttaggcggtatgaattaaaaagtggaatccatagccttcactcttaatcatttactatattcctttccacagtaaaagaaaagtgagatgtaaggaaagggaataatctaagaagtcgagagacaaaagcgaatgagtcatgcctctgaggaagaaggtaacgagtttatgagctagatagagagtcttccaaaggctaatttgtgcttcatgaatagagaaaggtttttaaaaggaagaaagaaaggggcctaaaagggaaggagttacatttgatcagtcaaatactagacaagaaagtaattcccaagatcaaattccaatttcagtttgaatgcaggacaagtggcagggtttcatttgcttggcatcaccaaagaaatggataccagaattctgatttgacattcatttacaatagaattttgcaattatcaattgccatttttccagcttggacagggttattaactttttcttggaaggtgattagtgcttagattccatccttaaaaagacacagactacagaggtacctgtccggtggtggtaaataatgtcaactccacaacaatggctacaaacaccacatcacagatcaccacaccaacagctaacacaccaagccttctacctaccaggcaccacactagctggggctgataccgcacttgctacccagaactacccccatgtgacaggtattgtcactcgccagttcagtctacctctggtgcctactgtctggccctcttgttgatatttgggtaagtctcctagaatttgaaacttccatttactccctcaaaaaataaagaacggattatgttttgatagctactgcagctttatatagttgatgcacactctgtgtatgttctccgtcactcacatatagggatctagagaaaacagctatataacgttaggggaaggagtaaatccccttgttttctgataagtttatgagcgagtgacaaaaaggaaaatctttcttgtgcttcagaatgagacagcgatgaaaaacaaaaccacttctgtgcagggtgaaacaaacattattgccaaggccatttttgattgggaaatgaacagaagattaaatcatagtggctaagtgaaagaaaccagacacaaaaagttaatatattgtacgattccatttatatgaaatacctaaaatagataaacccatggagatagaacacagattaatgcttatcatgggctggagtggatgggagaatgaggagaaactgcttaataggtaagaggttttactttgggaatgttttggaactatataaaggtggtagctgcacaacattatcagtgtactaaatctaacagaattgttcacttaaaatgattaattttctattatgtgaattacatctcaataacttatttcaaaatgaaaaaatagaaagtttaaattcaaggatacatataaagaatttttttttgctttttccccagaacatttaaagaatcactataaaaaggaaactttatcctcctcatatctaagtttaatttgggaggatgtgggaaggggctttattattactgttacttctttgcttttcattgtccacaaaatcacatataggaatgcaccaggcaatcaagcattttctctacctgggctgtagccactgatgtaaactacatagaaaatgtattatacagataagcaaattcttcactgtgaaggtagtattctctctactcaaaagttttcaaagaataaactgcaactgtagaaaagaagggtaacttttaaattaatttagaagcagagctcagcttgccctttgcattagctcaggttctttgaccaaaagacacaaagtcagcattagacacctaggagattactgggggaggaaagcagggtaggaaggaagaacttccagaccatgatgctaatgcttgtgaagcagaggaagagataggaggtttgggaagaaggagtcttaggctccagggtacttccaagagaggtctggcaggccaactaggagtccttgagcccatgttccagtgagaaagtctcacatgtaaaaggaaggagtctatgctaacagctcattcactgactataggaagtttggacttgccatgagacagcagtggatcaaggatagcagtagctgagttcttcagccagttatgctcccacaacaagagacctcagtggcccatttttatggtgccacatcagcctactgatagcgacaggaggcggccaaatgcctaggcatataaaggcaggtccccagtgcaaccccacttccaagctgaaaacagtttaaagcctgaaaaccaagctacaggttaaatgcttggactggattgagaacttgtcttcctgtttggcacactttcctctgattgatcctcacctttcacctattttacatatacctaccctttcctaattagttgtctacactgccacgcccacctttgagtagcgtctttgctttaaccttttttgcatactcacagaccaatcagcacacactccctttactgagcccataaaagccacagcctcagccatattagagaattttcccactttcgggtaggggaaccgctccccacatcccctctttgctgagagctttcttttcacttaatgaattctactctactaactctccagtgtccacgagcctaattcctcctggttgtgagacaagaactcggacctagctgaactaaggagcaaaaaaccctgcatcactatttttcaaagtctctactatagatctggcagtacattaactctctttctcctgtagctatgaggaatgggaagctgtggttatcggaaacctgaaaataatacctacttttattttaagcaagagtttctgcaacttctctcctgaaaatctttgaggtataatgctagaaagggagaggaaataaaagactcataaaggacaatgccagtgtccatgctctaagaaaaatttcagccagcaagaaactaactagatgagaaagtaataatcgtgtgtgtaacccaaaaagggcaaatctgatcctgcctatcaagtgtgacagtttattaacattgattggaaatttaacaaatacacagggtcagtcacataggtattaatgccacacccaccctccacaatcagttataagcctgttctgttaaagcagtatgaatactttataatctgtattcatcagttttgcagaattgtaatgtttgtctgaaatctagggtgatacttagtaaattacacacttaatatgttagaaaatattaatgttaccatattacccaataatccaaattttgtggaaggaataaggtacctggaaggaatctatttgatttcataggagttaagaaaataatatatataccacataggtggaaaaaaaatctatgttttgggaaaaactgacaaactctggatgtgttacaagaaaatgttttaaaaataataaaaaaaatttatgtatgcatatacacatgtaatcttaaaaataaggaataaaaggtggaaagtctatacataagaatgaaattttattatatattgaaaagcaagtactgtgattaatagacttttttgaaagatgctaacataacctatttttgggccagataatcagtctcttttagaataaaatgtgctttctatcagctttttggtcactgtaacaataatttgctggccaagaactaaataagtggcttaaagtacatctgaaggtatttataacctataaaaagtttcctcttatcatcatatctgctttattaacttcaagggtttttctgcagaagttctctcattttctttttgcactgggattttgtccttcatagttctaaaagaaatatcccattttctccctttcttaaccctcaggatagaagaagtagtatcttctcacagtgtgtgaagactcattctcccaaaagatgagcacaaaggaatagatgctgagaatatcaatgcctgtgacatttgctgtctcccataatgactgccatgggaggacttgggaagcggactgcaatctgatctcaagtcttctgactcacactctattttggactgcttttgtcttggatctggagtatagaaacacctatttcgtggtcggtaggcagtttaacaatcacatacacaatgaagcaatcagaaaggtgagcaggtgaatattctctttcagaggataaattactttttctaggaaaatgattattggctgacaatgaggtggtaatttacttccctctagactataataaacaaaaatacaaagtaggacaccattttcaacagctgtgtgggtgattataatcaccttttagccttgaaactagtccctatctcattagctatgatacataattttttaaaaaatcatgccttcaaaaagaaaaggttttctgtggctgagttaggctagctgtccatagtgccacctattaccaaactttacagaggatgagatttcttttaagtaaaccctgcttctgaattcagagtatcctcttgctcccagcctccaggaactagtctgaggcagtcagttctattacaggaagaggacacaagaggtgcattatgtaagttagcaatgactaagccgggtgctctatggggatggcagtactctggatagtgaaataagtgctcttttaggtaggattgctttagttggtctttgagttacttaagagccaagcctagagcagaagaggttgcaacagaatgtgacatgagttggaatctgtagaacaggaattcaggagttgtccctagatactatagcagggtaagaaatggaagcggagagcacatcatggagacatggagaacagaggaggtgaaagaagccctgtaatgtgaagcacgggatggaggaccctggcagcagcctggggcctgcagaggaaaaagctccaagaggagctccatataagagggtggccaagttcgtggcatcagactttccactggaaatggattcctgctttgtcctataattaccctcttatctctatacctccaggaaaagaatgttctaacaatgttggtgttagaaacaccaaccttgggttagtagagcactggggcttgtagggatatgtaagaaacatctgctggtcaccaaggggaagagctgagcagaggtgctggcatgcacacagaagcaggaatccagagcaagagatggcagaagagcacaacagaaactcacacgtgtctgaaagtgctggggtagacagttggtctccccatggtaagcaggatcacaccatttgcacttagatcattagagaagctgaaaagactgaggaacttagggagtacgaaatctctctaagtgaaatctcagtgcgaaatctcagtgagaggattttgttagtctaaattcaaagtctctaaaaaacaaaattgaattagctgccaacatttaaaagtgagatcattttatttttcttaatccaaattctttggttaaaaaaaaaaattagacaacctgaaaatgttaggcttaaattccttagtgctgcatagaaattggtgcctttacagagaacagttcaaaacagacctaccacctagatcaatttaatcattgatacggctggcctgcccctggagacacccaattctgcagcccctggtagcacctgatttaaaggatctatccatgactaaagacattatctatgcatttgtaaaggttatttttgctttgcttgtagtgattgctcagaagatttttagtgaattccttagttatgtactttgaagtgaaatccaagtttcacctccatatacatgtgatctccaaagtggtttcatgctcatgaaagacagctgtgctggttattcctcattttccaccagatgcattctctttccttcctgatctgcatcctgggaagttatttcctgtgtacctgccagactcactgatcctctgacttactgttaggttcggccagtgagaattatctgcaacagaatggaggccaggagagaagagaagatgggtattgactcactgtcatggttctataaccctccacccccacaactcccattgtgaccccttggataaggtcagctcttatgtggctctgataacacatgatcccttctaggtttagaggtgatgccagcttccctccactgttagtccccggtgcttccccaccccatgtagtttccttaaccctatctataccttataagtaatcccattactaaaatacctcccattaaatctgattatacaatctgtttcctcctggacccctgactataagtcaaatttgaacattccaaattctggtacaaaagcagttggacagaaaagataaaaggaaatagagtaaatttcaaatgagtcttgaaaacaatttggacaagcataatcttgcagattggtccttacaagccctacttgccttaatcagatacctcaacagttgagtgttctgggtcatttcttctctgaagcctttcatttcatgcgtaattagaaacatgccagtctgtaatgatggcagcctttaaaatggtcagtctgtcacttccatggccctaactccagacacaaaatgcatgcttgattactaagagtcttattaaggggctattgtttcccccatccctgccagctcctcctacctcctgatctttatcatcttgcattctacttaaagaaggatttaaagagaaaaaaagaaaatctcatagacactcacatcagattgtattaataagcaaggtaaactacatctgggcttgtcactcacagtttttcttttcctctctaaatctaagaataacatgcagtcagttgcaaaacagggagcaagttttccaaagagcacgtgggtgggagaagccaaccatgaagtaaattccaacatcaacagtctggttggattccactgtggcccccactaattttcccaactttttgggccatgaaatttattattatcaactccaggtatagttataatccttggtaaaactcctctcagacctggcagatagtgtcctttaaagagtacactaattctaaaaactgcttatttctatattgactgagataggaaaaaatagccttcattttcacaagtgattcactctaatcatttaatacctattactgcaacaacatgcaccagatttctgacagacacctgtttgcaaattatctaagtttcagagcagaaagcctggtttagaaatacaataccatctgtaataaagtagcactagcactcatctggactattttggactaaaaatagtccaaaaatgaaacacaatagaattttagtttcttgaggattgggaatatcagtcactgtatagtcattgcttcaagaacagtacccagtacatagtagatgctcaatccacatttactgaaataaaaagaatgccttaatagcccactgtcttggcagactttacctactctcattccagcacttggaacaattacctactttcaaggaccacctttgtacagtcatgctcatgcccagaacaaaattcttatttcacagagataccaatagtgcaaaacaaaggttttgactggttctctgctttagcatatgaataatacactctagtctacagagaagataatggaagccaatagtccaagcgttcaagtggtacttacttcatttaaaagtaaaagcccgggatagacaaagacagaaaaagcagcattgaaataacctgtgtgagaaagcagaattttaacaacagagctgggcaaaggaaaaagcaattagtaggtttgtcttcatgcagcttcaagagtactggttgttaaaattatcttaggagctggtggtgcttggatttcctttcaacagaccctgaactatgcagtgcttaacctccttttctgagaactatccagggacaccaaataggaatggatgtgcacatcgctgctgtcagggctcagaaagataatacccaaaatgaaggcctcagaaacaaaagactcttggaccttctccagccctcctctctctagcctctaattttctccccataggccagccacaaaacctaaaaatattattctaatccctaccaccttcctgcataataactggccatgaagaaactatctgacctaccttgcttaattataggtcattagacccccattccagaaagcgtcctgccccatacccagaagcaaggaatgctgctgagaggcaaagatgaatgcagacacaccttgctgggttttctcagtctaccaggattagatcacattttttgtccaatcatatttctatatggctctctgtactttgttgagcccaagtacaaaattggacaatttcccctgtatctttgggtcatcattctgaaggctcccatgtcatgtaaaattatgatcaaataaatttgtatgccttttcttctattcatctgcctcttgtcagtgttttcagcaatccttcatagagtgaagggatcgtgtattaggattctctaaaaggacagaactttgcaaacccccagcttttctgcgtggcagataggaaattgaaagtacatctgcttggttgctgtccacaaccaatcagactgattgtgggccaagtctgcctttgcacagaagtgcaactttgtaaattcactttagcttctgattggttgctttccacaaccaatgagaatactttcgttttcaaaaaatccctactttttttgcgtcattctttccttgctttgtgtgttttgtctaattctttgttcaaaatgccaagaacctggacacactccaccagtaacaagaacaatggagaaggttcaaaatgtcagattttaaacaaaaatttcgaggctatttattacctagaaaaacaaacaaaaatgtgcagtttaaacaaacccaaaaagagacagagaatctattatttcaggtcactgagtatgtactactcagttgtctcgggatgtgacagtagctaagaccctctttctgacctagagaaaaatccttcattcttcaaaataaggtttgaagtcacttcctctaggtaggcttccataaacctagtcagatgctcattcacaggacttttacagatagctctttgatcctctctccaccatagaacttgtattacactgctcttacatttgattctaatgagactataggcttcaaaagaactaggaccacacctgtcttttgaattcccagccctgcaacagggcttggtttataggaacactgaaagaatagcctttggatttgttgaatgtaagtttttaaagtcagggaccaggctttacacagcccataatacaagctcagtattggagatgtttccagtattatgggtcctaactcaccaagacagaaggaaagacctcacttttccaagttcccattcagcaagggcaaggaaggagtaggaagcaatacaggaattcagtttctgaacgatcattaaaagaaggatgtccaggttgcagcagcagcagaaatcctataatatatttttgtttttcttctcaaatgagctagaaaattggttctcaaactggtgattttgtcctccactcccatcccactgatggccacaggaggcagccaaatgcctaggaagatgggataggggtaggtaccaggtggaaccccacttccaagccaaagacagtttaaagcctgaaagcctagctacaagttaaatcctcggactggactgagaatttgtcttcccatttggcacactttcctctgactgaacccacccttcacctatttaacatatagctaccctttcctaattggttttctaaattgtcatgcccacctttgagtggtgtcttcactttaaccttttttgcttactcacacaccactcagcatgcactccccattctgagtccataaaaggtcccagacccagatacatgggggactttcccgccttctggtagggggaccacccgcatgacccctctccactgaaagctgtttcaatgctcaatgaaattcttctctgacctcctcacccttcaatgttcagtgcatcctcattcttcttgggaataggacaagaacttgggaaccagtgtgcaagccagacttggcccaggtgggctgactgggcagggcgccccctgtggcaggtagagtgccccaagagaagcctcctacatcgctagccagaggtccccaactggcaaagagaccaagaaaaatcctgcataccaccaaacatctagcaaagttgggagacattttgggctatcacaactaggagggtgctacaggcatctactgagtagagggcagggattgtgctaagcattctgcaatgtacacagcagcccccaacgacatcaactgtgctatgcttgagaaaccctcagctagacaactctttgttgtctgcagctaaaaatgaccaatctcctttctaagctccaattttcccattggaatcatggcaacaataatcaaccacttcttatatgttaagtggtgaggcttaagataacaaatgtaaaattcatagagtatagcctggcacataactgctcaattattattagatatttgtagtaatcattattataataaaagccgcatgtctgcacataatatggaggtatcaggtactatgctaaacatcttttaaaaagctgatattatatatgctccaccactcaaaacatgcttggtaaaagaataaatgttgacatatgcttgcttattaaatgattatgtgcataaggcaaatataaaggacataaaagtgtttatcagggcacaatactaaaaacaataaattaaattccttttattccattaagaatgcttttctctaagaagttcctgatcctgagaaccaggcaatcttacatgcaaactcaaagctgttttatccctctcttcagacaaaatacaatcaaacaaggcgtggctgaaacctattactgctagcctggcagaccactggagccaatgctgccactaattctgtcctgctatatgcaggaaagcgaaagagacacacggcacttcagagaaatcaatttcctttattagcttcctttctttatcgtttgctttcactgtatgttttgtggatcaagttaatcattttcatgtaaagatcaatcttaatatggactttcatttgaaagttgttgtcagattttgtggagaagccaaattctagagaaggatggtggggggtggtgtggggtggggtggggtatacacctgacttttgttgtttccagcagcccaaccattccatgaatttttggtaatagtatcccaaaaccttcttccctaatgttggcaactgtttagttcagatgtgtcgtagccaaaattgggcacatttcccaattcaggccaattagatatttctccctaaattctgaatcttgactaaaataaacagaagactgaaaagaactgaaaattatttctttaaatcgtggtgtccttataagactgttcagtagcacttgctatgcataaaccccaatctactctgctttctgtcaattctcaagtctcattctcctatatcctttagtctatatagtgaactactcaaagcctgccaataatttttttttttttttttttttttttttgcttaagctaaatagaatctacttttgtttgcttataatcaaggcaatgctaactgttactggtaaaaacactgtaacacactactgacaatcatggatctggagccaggatatgatatttctgtttctcttttatttagtcatttatttaatccaccttgtgcttcggttgctaagtctgtgaaggaaaaaatgtcggaaaagcctaccaattacagatgcctagtaggtccagagggttgctattacagtttcttattcatcaattcaccccaaaagataagtaattgaatcttttttaatcccctgagatttatctagctcacccacttgttaaggaggatgcatgtaacttctgagttaagaaatataggcaagtttagataatattcaatgggaataggatatgcaaatgtacatactatattttttaaattttatttatttttatttattgttgcccaagctggagtgcagtggcatgatctcagctcactgcaacccccgcctccacagttcaagcgatcctcctatctcggcctcccaaatagctgggattacaagtgtgtgccaccaggcctggctaaattttttgtatttttagtcgagacagggtttcaccatgttgaccaggctggcctcaaattcctgacctcaaatgatctgcccaccttgggctcccaaagtgttgggattacaaatgtgagccactgcacctgacccaaatgtacatatttatgtgtaaataaacacacataaatttttcaaataggagcccctacatttctcttccctttgatgaactgttgaaccctaataaaatgaagagtatcacacaaccattactggaacctgttaaagccactaacagagaaagtcatatttcaagtatcagttgcatactaaacgaaggctctaccaatgacagcacatgcctcattttaaagctatctgagaaaattttcctcaagtcttttcaaccagcactcaccatgtaacttttgaaaacataggtcagtttatatgtgtgtaacacacaggcacattaattctataaacattcttttcaaggaagctgcctggacaagtgctaggttgtaacggcccactggactaaccaccctgcacgtgctgcccagtttcaacacacttcctcagccgagacttgagatgcaaattgagggtaaactcagcttccaggcatagacttgaacatttaatgccaacaaagtcccattgtcagacccctcctgcaactcctaatccacatatgtctatccggcatccactaggacaactacctgcgtccacaacattaacatgatgtggacaccccagaagtccactaaaacccagtggggcaaggaatgactgtactagaaatgtgtgaaaacaatgagatttgagggtctttactgatcaatgatagaggatgaggaaaaagaagaaaggaaaaagatcagtgaatgtctcaagaagacaaaaataaaggagattaggagagacaatcagggagagaaaagaaatgttgacggttaagaggagaaataattgacaacagaaaatgaaggtcagtcatctgggccaagtgtatcatttacttatcaacttggtatttcctaagatctaatgtgataggagatactacagaaattagaatgaaatatgactttaatattgattaagttctatcctggcacttgccctcaaaggaaagatcaattaccataatcagggaatagacttttttaaaaacaaaaaacaaaagccataattccagtggctttcctgagagaatttatgagtattgccatagattaaagaatggatatcctccagcagatgacagcaaaaaattctgtagcacagagtttagggactcgagtctggagtcagactcgggggctcaaacgccaactttgcagcttaagagttgggtgactcctgcaagttccttactatttatttgatcctcagtctccttctcagcaaaacaggagagtacagatttcattggattcttgtaaatactgaatatgatagtgtatgttacaaaagtaaatcataagcccaaagttcttttacttggccttgattaaaattataattaaagcattggctattaggttcagagcatttaggggtaaacttctaagcaaagaaactgttaacccaagcactactgaaaacataaatcctggagtaatcataaccctttgtttagagagaagaaagaaaaggtctaaagactatttaaagtaaagtgaaatttgagaccaatctgtggagttcgtgttcttgtaaagctgaatataggcatcatttggtttaccagagctggcaatgatctatcgcacaaattgaaagatttactttaactgtgaatctgtaaccttggactctggatatttatagctgtaatgagaaattacatttgttagaatgtttgtattaacttttttccccacaggaacttggtttgccaactaaccttgtaataaccatagactaagatgtcagtgatctagttacagtttactcaagccatttgaaaagctgaacattttcttgctgaaagtaatacatctaaagtcatacttccctgagagaataagtcattttggagttaatcaagaaagggacagattatcatcaaaatacaatgcaaaaatctcaatttttcacaacaatgcaattcattcagcaaatctcaatactcccatgctacacgaaccttctttagattttctcctgggtgtatctttgaaggagcatgaggaatatttgctatggctcaaaaaccagatatgcattccatctgtttaaaagcttatagggtattatagatgaagcaagcttctaaattcaaccttaaataatgggaaaatcgaacaaaaacaacaccctaacagatttattttaataattctggcaagaagtacaaatctaaggaaacagaagcaaaatacaggataattcagaatactaagaacctgctattgtttaactgaaagcataggtaaaagttacaaaaagtgatgccacgttttgatgctgcttactggctgcatctagagagaggcaaggaggtatcaggcatttctgccaaagctaggtgaggtattaaccactgagaagataataggaatagatgagcaagttatccagatggtacaagatggcaggtaatgtatggataattgcaagcctctccggagttaagggtactaaagaaaagaaagtctatgtctaaagaggagaaaagaagacagacaagctggttacattggagatttttatttataagactgacacaggttaatttcattcccatcaagcaattattaataaattctcacaaggttttatcgtggataaaagaattgtaatacgtgattttaaatattttaattgccaaaaataaatttccaaagtattcacagcatttttttactttgaaaagtaattagcataagcaaataacacctcctgggtgactacttaacatatatactggctactattcatgaaattgtatttaaaatgcagagtcaaatttccatatgtaagataaacagtatattcttcatttcatttttaaaaatataagagattaattagctaaataatttccctggaaaactattaagtaggacagaggattcaagaccctaaaattaatttttcaaatgttaagaggtttatacatccaagctcacttccattctcatattgcttatttaatgacttcctgcaaacacagacaccacagcccaagatctttctctttcctatatggagtaataagacagagaacttaaagttttggtctttgcaaaatatgtgtactttcttcttgaccattaattcttgagccctgaggcagatagaaaaattggagtagtgtgccaaatgtcaatgtaaaggagacaaatttgacaggagatggagaagcattaaccccttatacctatatatctaaaatggtatgttatatatgttaaatacacataaaggatttctgtctgcaccatcatagaacgatctaagattcaagcacccaaaattacatgatactgatgccagtattctttacatattagaaaaatcttgaactagttcttaaatctgatgacttgggtctccccagtctgttcaataagacattttgactcctattaagaagaaacactcttcttatttcaacttggaaattaacaaagaaaacagcattcattgtagggaaaaatggcacattattttttataacctcctcttacttgagtagaaaaataatccacttaatgtgtctagaagggcagtaaccctacattaggggagaacagactcccagggaaaaagccatttacaaaacattgaggaactgccaaacgttgtagggttcatacagccacagctaattactatgtatattgtatttctggacctactggcaatatattggctgatctttctggattgtgtcttctcagctgaacgttgtttatttcccacatcatgcaaatgacagggaggatgttggtctattttgtgattggcagggtaaaaacttaaaattgtgttttagattaggtcacaaaaaagtgtgccagatggttgttaacaaaaaagaaaatgctttcaacaaacctcacatgttgtataatcttggacaaaatacaaaagatgtaaatgtcctgccacaaatatattggagctggatccacctgacaatgctgaaatatctagtagaaacaattcccaaagaggtatgaatctgacttttctctctagaaaaactgctggatgacttcttagaaaagttaagtcagaacccatgtttttttaaaaaatcatttttcagtggtacctttgtatttattgtctactctagtattttctcttgcctggggtggggggaaacattttttcacctgtattatcttcagagaagataatacacctgcagtgttttagcttggaaagttttaaaaagtaaacaggacatggtggcacatacctgtagtctcaactacttaggaagctgaagcatgaggatggcttgagcctaggagtttcagtctagcgtgggcaacatagtgagactcccatctctaaaggtaagtagatacataggtaaataaaacaaaggcagtatattttcatttccttaataaaaatcttgaggaaggtgggggaaaaggcatgtactagcttgcgttcctcatagtccattagcagataattttctcaatagtgtatgaggacaaaaataaataaataagaccagtttcacatttaggtccctagagattcacaatcatcatctcccttctgtctgccaggatttaaattttatttttaatgtggcctctcttacgcatttccctctctctgcagatttcctagtctctcccaagataactggaattgtactcagtattagtcaagtgagagtgccatttattgaccaccgaagaaaagccaggtactctgcagatctcacttcattcctcatagccataccaggaggtagcccatttgcagatgggcaaactgtaactcaaggtttctcacctaggaagggactgagcagagtctcaaactgatatggtttggctctgtgtccccacctaaatctcattttgaattgtaatttccccatgtggagggagagacctgtaatccccatgtgtcaaaggagggaagtaattggattatgggggtgggtttcccccatgctgctcttgtgatcataagtaagttatcaggagatctggtggttttataagtggtagtttttcctgtttgcacatgctttctctcacctgccaccatgtaagatgtgcctgcttccccttccaccatgattgtaagttccctgaggcctccccagccatgcagaactgtgagtcaattaagccctttttctttacagattacacagtctcgggcagttcttcatagcagtgtgaaaatggactaacacacaaacctagatctaactctcagacatgttgttgatgttgacagaaggtaaaagagtccataccaaatgaacattcttttagctacatacagcaattaattttcaccagcccttgagaaaagatttgaagcactagtcagaaggaaaatttattaaatagaagggaaagacatcaaagagttaataaattcagaaactgtacaactgagccaggtgttgaacagaggactagacatggagttagggtgagtaagagggagagagagagggagagaaacactaagaaaagaaaggcagagaaccatgcaacgacttccctgattttaacaatgaaagtagctcagaacataggagttacttggccaatagagttaaaggtcttacttaagaagtaccatgcaaattccatttctggttgccagaccctgatataccacatgttcatttctcaataagtgcatgttaggtaaattgaccactgtctcttctgaaatggaaatgtctatagtggtaaaggcattgccattggatttgaaagctgcaaagcaagttgactgcagggaactctgtgtgtgtgtgtgtgtgtgtgtatgtgtatgtggcttgtaaattattcttttaaactgcttacaaattagctgtgaaactggtagtatgtagttgtccatgtcaataacaaaaaagcaaacacacaaaaaatgcagatcagaagaaacataacctcagtcacttcatattaacagaccattcactcatccatttgtttaaatatttatttaataactaccacatgctacgcactgtgctacatgttaggggatatattggtgaataaaatagttatggttttagcaattacaaagcttacaatctagtcagaaaaacagacaaaattcaagtacaacagaaataactatgtaactacaaattgtgatagaatatgaaggaaataaatgaggcacaatgataaagactggaatgataggcgggtggatgacagagaaatgcatttacatacagtggttaggaaacgcctttatgaatccaaattctaggatctagatggagctctaacttaaacatatattggaatcacatggagggcttgttaaactagattgctgagccccacccaccaaagtgtctgattcagtagttctggagtcaggcagataacttgcatttctagtaagttcccaggtgatgctgatgtcaccgaactaggaagcacactttgcagaattaccggactagagcatagtgcaggagacagaaaggggcctgagctgaggttggaagagtaggcagggaagctctagataccctgacacatgctcagtgacaatatcagtgccaaattcagaacctgtctaggacttggagtgagtctaatgatcaagacaactatgaccactactgttatctttgccaaaggaaggacctctattactccctcttctaagctaagaacctgaaagcaaatttatcaaggaatacaaagaaccaactctaaaatcaaacaatattttttacaaagcattgctatattaacacagtatctaccatccaaagaacctgatgttatcagagcatatttaatagagaagataaaagagatcaaaaggtggcatctgccttcaaacatagagcgttctgaggattacggcaaggaaggcatttctgttaatagtagaagatgtgagcatgcaattattgtaagaatgatctaaattataagtaaagaagatacccttgacctcatctggtttgaaacatttaactggcttccaaaggaagataatctttattagtatttgaaaagttagatagaaagctaccagaattttgatagtttcgtagctctcaactttagtcttcccccaaatcatttgggagcttgttaatggtgtagattaccagagccatcctcagagtttctgatggaatcagatgaagtgaggcccgggaatgtgcactttaataggcatcctcaggcattctgatgctggtagattaaggaccacagtttgagaaatacctagttaaggcatggtaccctgtaaatggcaaaacccagatggataatctcttatggattttgatagagataattgaagttttactatgtgccaggtactgctgggcacttcttaaaagtactccctttagtttttaacaatttaaaaaaataatactcaagtgatgagaaaatgggattcagcaaagcaacttgtctgtagttgatcatgtaccaaataatttatagagccagaatgtaaactgagggtttctgactccaataatacatttatttcaatgatactgagctcatgattgctaacctttgtgaagctacgacaatcattaaacgatttcctggcaaccacagcttctcctaaaagcattatgtgatttggccttttaaaataaagagaaacagagtgtaatcatatcttgagactctgaaaaatccttagatgtctaaaaatattcacaggtgctggacaaccaagtatatgaatcaataagagaatccctaacttaaagtcttgtccactgatattacactggacatatctatccaacatcaagctcagagacagaatgtttagcagtgaagggtagaaactgaagacaaacgcctgagttaaaaaaaaaaaaaaaagtctctatcatggattagctatgtgaaagtgggtaaatgatttgatttctctgagcctcactttcctcatctataaaataataataattactttgggatttttatataagatattattatataatactattatatattattattacatacaatataattatatataacatattaattccattaattataattatagtgtaaaatatattatatataatagcttacatatttttgaatcatttggcatagtacctaccacacagttgttcaatacatgttatcttaattcttattaaattattacttttaagaggcatgtgatgcagttaataaaatagtggaaaaaacataaaggcccaataaacataacaagatggccaatctaatcagaattttgaaaaggcaaataattaaataaataaatcagcaaaatatcacaaaattccccataagatcataaaaaagtcaatattcataggataaaaatattggtgaagaagaggagaaataggtattctctctcataaaccataaattgatacaaccaataaaagggcatttgacagtttgttaaaaaaattgttttaaatgctgtgatacagaaatcctattttttcctattgattctacactcagtagaacagatttcggtaaccttttcctgtaaagggacaaagagtaaatattttagagtttgtgaaactttttacagtctgtcatgataactcaagtctaccacaattgtgtgaaagcagtcccagacaatgcatacatgaattagcttggctgtgttttaataaaattttatttatggacactgaaagttgaattttatctaattttctggtgtcaaatattcatatcgtgattttttttcaaccacttaaaaatgtaaaaacatttcttagcttgcaggctgtaacaaaacagcagcaggcatgatttggcttagcagctagctgtagttattaactgctaccttagagtgatacctactcatgtgcacaaggaggcatggacaaagacatttactgtagcgttaaaaatctgagaacaggccgggtgcggcagctgatgcctgtaatcccagcactttgggaggccgaggcgggaggatcacgaggtcaggagagcgagaccatcctggctaacatggtaaaaccccgtctctactaaaaaaatacaaaaaaattagccgggcgtggtggcaggcgcctgtagtcccagctactcgggaggctgaggcaggagaatggcatgaacctgggaggcggagcttgcagtgagccgagatcgcaccactgcactccagcctggtcgacagagggagactccatctcagaaagaaaaaaaaaaaaaaaaatttgagaacaactattagatcatcaatagagaaatggctaaaaaagtgtggctacatccataatctggaatattatgttattctatgctaatactatgttagcaaaaagaataatttatcacatacaattgtaagagatactcaagaaacttcatggtgaaaaagcaagttgcaactgttcagtaaaaatgcaagctatgctcggacttagaggttttagtacttgcaccattatggcagtgaaaaaattcgttagagaatgaggtcggtcacttttggttcatcattctgtgatcacagaacacagtgggtccatttgctgagacggagccatttgctgttcataaatgtttggatttgtctttcaacaactagctgacaaaggcataggcttaaatgagaaaagaggcaaagaaaatataatagaaaaactcaaagaacacataattaaaagcacttgggggactcctgaacagattcctactgtgtttttatactgaatgtcatcattctcaatgatcaggaggcagatgacagcatcaagacaatatggtgtcaagtcacatttcagaatgttcccggggctctgatcagcattagcctgactaaccagatcagagaagaaagtggtcacagcaaataccctgtctcagttcattactcaacacctgttaactgtgattaacggccctggctaattatgtgttaagagcatctcaggctgtaatggatcccagaggtctgcaaacttgacttcatttacatgtttgtctcctttcagaaggtctcagccaaacatggccgaaatctcccgagcattttatgaactcccatgtcatcaactcagagtttcaaatacaccagggtcttcctagaaaggacaacgaatgtctgagatgtacatttgtttcacagataaagcaggcaaggtttagattttatggcacataaatgggcctcttgttgcaattaatattataaaaggctgctaatctgtgtgcattaaactaattgttacattttgtgatctcggctaaaagactaaactgtatttagatggcagaatgcactaaaacctcgctttatgtctcaaactaaaactgcaaaagtcagaaatcaaaaaggcttcagagaagctttttgtctactcatttttagttttaaaaatatgtattaacattaattttacataattatgtcatgctatattcatacattaaatattaatacatatacaaacctatatatatgtatctgaatgtgtgtatatatatatatatatatatatatatatatatatatatatatatatatacgtgtatacacacacaccacagacgattagacagcccttaccaaggtatttttcttgcttttcttaaatggtattgaacctaactcttcctacagttaactgaaagtcaactaattaacatccctcccaacttttttttttttttttttttttagtagaggagcagagctggcagcagacattaaatccttcttcattcttatttgcttagtctagcaaagtaatgagaaaaaagtaaatccactaacaattgtgtgtgatggaatattatgcaacatctagtattcatgctactgcactccagcatggggaacaaagtgagactgtcaaaaaaaaatatattgaatgtctacatgtactgatatggaaagacatctatgacatatgaagtggaaaaaatcaagctgctgaacattagatagcatattatgatgcaaataaatgtgctataatagcccaactccacatatgtgcatctttagattcctgtatacacaagaaaggatctgaaaacatatagaattacaaggtcttacaagcaatctggttctgccttttttagcccgaatgggaagtacctatcccaaatgaccttcatcatcttcacaactagaaagagattttcatggtcccttctacccagtaacagcagagcacagtggtttggaacatgtgccgtgcagtcaggcaagtgtgcctcaaatcatatctaccacttactggccaagtcatcttagacaagttactacattttccagtacttctgctgttttctcatttgcacaacagtgcccgtctcataaagtttcgtgagggttgtgatttaatagccgtatagcacatgccttagcaagtgtcgtcaacactcacctctctatcattcttagctagtactttcttcatcttgcctcagttattatttgaaatgtgcttgtttccttagtcattacattttctaatttgccaaatgttaaacaagggcaagagttggcactttctgtgtctctctgcttcctcccaccaccactgtaagccccaaataaaataattgttttttacatttctgaaagcttttcactctgttacaaatcaaggggctccaacatgcccttgtttctaacaattctcaatgcagtttaatgctaggggtgaggtgggctcattgacttttgctcttggctgacatttccattagcacatgtgtggtgtgtattttcctccagtattctttttgctaagagttccgtctttctctaatttcttacttttaattgtcttttcttattgatctataagttgctgtcactttgatgaaacctaagggcttcaagcacatctctgctatttactagctggaatctttaaaaaggtatcaattaggttcagtttcttaatgggtaaaatgggcataatatcatctatactttttcttcgttttgaaataaatttggcttttaccacttagagaattcatgtcaattttagaaaaacaaagaccaaaaaatgaaataaacaaagataaaaccattcataatcccactacagatgtcaaaagtctattctacatccttctagtccttataaatgtacataactaaaggttctgggtcaaggggtctagacaattctgaatcttgctttatttcttattctctcttcccagaccactcaaaatgttaagtctgatgtgttttaattgaatacctttcattgtgcgtaaatatacacctaaaatcacaaatataaaggcttttttactgaaggccatcatgctttgcatatttcctgtaacttgctttgctaactttacaatatatcatgtgcaatcatccatagcagatatacattctaattcttaatgacctaataatcatccatagcatgtataacacagttcattcaactagtctcaagtgatcaaaattctttgttttcatttttttgccactgtgaacaatgctgcaataaataattttgtatatatatttttatctatacagaataattcacaaagagattactgtgttaaaggctatgtgtattttttttatttaaaatgatacagccaaactgctaagcaatatatatagctcctagcatttctccacattctaacagcattggatgtcatatattattaagttgtgcctacatcccaggggaaaaaaatctatcttattttacttagcaattctctgagattaacttttcctttttactggctatttctctctggcaaactgctcattcataatcattgcccagttttcatgtggttcactttcaaaaaacttgcatggagtgtcttggtatttaaatggtttaagtattggtttgtcatgtgtgttataaatgctgcttcacctagctcagtgtttgcatttgcttactgtccaacacacataatgaaagtctgtttaggaaaatacatgctttcatacatctttgtttctggcttgccttccatctctccaccccacatcgtattaccatcatttctcttcctggcctctcttgctttcaaattctaactttctcgtctttatctcctcctcaccagttatcacaattacctctgtaaagaactaagatttctcccactactttttttttttttttttctaaagagagaataaagctttggccgaagacagttttgatgagatggctagaaaaactgcttttcttcattggcattttggaaatattgctcagtggtttgggacccatttatttctactgcctctatccatctttgctttatggcttgacttctgctgctttaactccacattctgttttgctccacttcaactgtttagctgccaggtttggtctggtttcactgatttactgtatctaatctcattccctccctggattctgaaccccatcctagaaaaggcacttccagctcacagactcgcatgtttatcgattgaaatttagttcaatcgataaacattttagcatacttgggttcaattccaatagcacagatgttttcagatcatttcagatggtgagacccagaaattttaattatttttccaaacactgctaaaaactgacattaaatttcatccatgaactgaaaacatttttactaggagaaaatcatgatgctgatatatgcaattatgctataaagtattattttattttgttaggtattccatttaatactatagaagtattatgatatttattacataaagcattattataataaaatctcagtaccacccagaaaaattaaaggtttgaccttaactttctccaatttttccctattaatatcaatttgcttttcttgttaagaaaatattaaggtggaaaacttgaaacaggacattctgttctattatttttatgttgagaattgggaaaatacagcttttgttgtatagaatgtggtatgtatgtgatgagtatggaaaatgcatacttccaacggaagcagagagacttgttcaggggccattgcaaaactccactggcaaggcgctatcagcctgcagcaaggttgtagaggcaaaggtaaaagattagagattgatttttagagggtgagctaaaaggacatattggagagctcttaggcagtgtgagggcatattctgacatcttaaatgcctctgcattttaaaatttctgaccagctgtcaattttgtccatcaaaatctcagcctggttatccttgcttataagcagcagattttttgagtgcccccatatgactccaggtttcaaatgtttgctttatcgtatgtcccaaagtccaaatactggagagtcatatggaaatattccaaagatttgcacacagaagtgtgacacataaggtgagaacagccaataaagctgttaggtataagcagttgtgcaaaagaatcagttgtatagccagccctgcaatgcttggaatcaagcagcatggacacaaagtgtctatgtgtacccaaacagggcatagacttcaatgctttttcctttcatgactagtctaaggtttttgaagctcttctcataccttatcacattttacatacctaaaaagaatcaatattttcttgttctttacaacattcttttttgttgttgttattgctattgttgaaggacaatcaattctgatttacataaactcaagggtaacttaaaaagacagttgcagtaactaagattgaagctggcatgcctttcccgagtgaggtgttagacataaaaatggctttcatttcgtaatggagaaaaaagacttaagtctctgggacacaccactcttctcccctaatctcttccacaaatagcagcctgggtgatctttttgtaatgaaaattctatcacaaactccaaatattaaaactttctcatggctttccatcatcttaagaatgagatccaaattcttcaacctagtttaaatggttctatgccagggctctccaactctggtagacccaaccctccttaatacaaatattttgtattaccctcttcactctcctgagatgaaatctactcttaagatactctacctacacttgtatttttaaaaatgttataatatcttaactttaatactaaaaagaaatattagaatgggacagaatatggttatagaagttctcattcccctagacatacccaacggaacaggcagcctcaattgccaccagcagcctctcatggcaaagcgagggaccagcctcaagtgaattaagcactatagatggtagagtagagagacagaattcaggtccttgagtagagtagagtatagatggtagagtagagagacaaagagaattcagatttcactgcactggtgaatcaaccaaccctgaagcccacattacattcagactttttaatgatccaaaacaaattcctttcacagttgaactttctacaatgggttttctgagtatgacataaaacattataaccaacatacccagtcaaaaacagagcgtgagaaacagtgctttctcaacagcttgtctaaagcatgcttatataattatcaggagaatatgtgaaaattagtgaggtttttttctgattgatatgaatgagatatcttagacttcatagagatgatgtgtttaaagaacagcctaaactaaatgtttagtaatgtttcccctaataattcttaaagtttaagaatgacattttctaatttcttatgtattaaggtctaacatacttctcaggcatttaaggcaatggcgcaataatattcaaaaattgttaaagctactcaccccaactccttctaccagtcctggtgcagctaagtaatgcagctgaccattagcacacctgaaactaccacactaatgtggcttttcagggcaggatgaggaaatacagtgcccctagctaacttcttgcagcaaatatttgtttcaattttttaagtgtagttttcctaataccataacaaaatcatttcccccaccttttctcttcattctttcccaaaagtaatacagctactaaaacactgatagtataacaatttatgttgtacttctttctgcttttatcctagattataattgtactacagtaactatagtgataaaggtaaacacttacatggaaccatttgtgtagcaggtctttattccaagcactttgaaaacattaactcctttaaccctataatatccctacaatggtgattactacttttattttactgatgagaacactgattttactgatgagaacgctgaagttcagagaggttaaatcacttggcccaaagttacacagctgtaagccaaggtttgaacagaaggtcagtgctcttagccactagactaccctgcgtctcaatacagagagcagtctggggaaaatactggctaatatcggagaacatgttttgagattattagaaaatgaactcacatacatctcaaagctcttagatacagggagataaagactgcttttcaaagagaaacaaaagtaaacaaaatgtatttcttgaagagcttacaaagctaaagtcagaaatgcatctccactctgtcctgtctggtcatctttaaacttctacatcctaaagctttggtttccaatcagtcacaatctcttgtgctctgatgcactccacacactcactcacacatgcattgtgcatttcacacccacacacacacaaacatgcccaaaatacatggaagaaagataaaattagctgtcttctctttgttgttgatcaaatgtagctgaagagtcagcaggggataaatatcttgatgcttacctcaggtacaagtgctttgaagaagaacatagaagagcaacttttaatgtagcattgtgaaaagaaaaaaaaatgctataaaatccaacccccattgtggggtgtcatttctaacaatgaggtttgttttctttatctgtagtgcatatagatgatcaaacaaaaataactgatccacaggctctgaagtttttatcagtagtcaccttctgcatggattaataaatcaaaaagggattttaatcctatcttccctttaacattatggcacatacttttgcaataagcgtggggcaaattgggagcctttctgagacacaggtaggcaagtaaaaaccacattagctgaacgtgccttcctaggtggtagaaacacatggatcaagggaggatggttgcaacacatccctatcaggaacccactgcaactatctgaagcaccctcctacaggaggggatgggaaatgtcatcctgcagtggaagtgaatacagggctgactattcagatggaaatggccacttggctcaattatgaactgtggttggcactaatagagaagcaatgattttgtttaattctttacaaagacaaaaattaaaaaccagaaggagataaagccaagaccactgccaaagatgatctttctctccaatgttcagtaaattctactcaactccatgattctctcccaccctgggcctccatcattcaaatgtgaaatcattacctggatggtgaagtaatctgtacactaaacccttatgatacacaatttaactatatagccaacctgcacatgtacccctgaacctagcagttaaaaaaagaaaatgaagattttaacacaacccaaagggccaacagggaagcatcccttttttccttatagaaaatagttctcagaactatgatgtattcatccactttttaaaagtgaaaaattttataaagcaagaaactcctcaaaaaggtcacagatttatcatgatgttaaaagtcataaaaattatagttacaggctaagtagttaaatcagaattacacaccacccaattaattttataatcaatagagattaaaggaaatgaggaagtaaagtaaatgataggatcccagcttaaatcaaatcaatatatatttattgatagccatcccatataagatgccatgaagaaggaaaagtgttatggaaatatgtccttgtctctgagcagctcaccacctggctggggaattgatatgtaatatgcagagaatttatgtgcacagcaataacaatacaaggggtgtcacaaggcctcacacaagtcatgaccaacagaaccatgtagaaaagagcatttgtattaatgcaatggtcaagagcctgggctccagagccagacttcctggatttgaatctcaactctaccacttataagctcattgaccttggactagttatgagtctttcagcaggaataaaatagaacctgactcacatgatgattgtaaaaattaagtgagtgaatacttgccaagtgcttgcaaataaggcctggcatacaataattgccatggaagtattaaatgggcaaaatacaattgaaagaagagaaagatctccattgctctaaagtctcccaaagtcctaggacggtttaagcagtgacggatgatatcatgttcattttccccttcccacgaattccctccctactgctacaaacattcttaggtctagaccatactaaagattaaaaatgataaatagtctctactttgtaaactccctgtaaaaaatgttagactcttctacatatgcatctatttatcactgctcacattcattcattcccttatagctcaaaacctgactccaacccctaccattctacagaaagcactacaaaaaccctaaaatctaaatccaactcccatttctccttagtcaacaccctctctagaacattacaaattattcaccgtttgatcatcacaattttctacttcctaggctctgtcattgccatcagaattttggcttcgagaagtaaggactgctcttcctcatacctacatctcttggcatgcagtagcatgttcaattaaattgctttactagacagtgctctctacgacttttggtcagcagacttctgagatgtccctcaagattcttgcctctggtatatgtaacccatataattcctccctcttaagtatgggcaacacttgggtaagacggagtacacttctgtgactaggttatgttatacaacaaaggtaaggggatttctcggatgtaattaggatgccaaaatcaattgactttgagttaatcaaaagggaaattatcttgggtgggcctgacctattcaggtgagccattttaaggggctgaggcttttttttcttcctaaaggaagaaataattcaaagcctaaaagaaattctactgctggccatgaaggagaaagctctcaagttgtgagagggcttcaagagatagccatgtggcggagacctgagagcagcttctaggagctgagaatgaacgctgcgcagtagccgaaagataatgggtgccccagtcctacaatcacaaggaaacagattctgccaacaggagacagctcggaactgggtatttccctagtcaagcaagcctccagataagagcacagtcaactgacaccttgatttcagccttccaggacctttagctgaggaccccagctaaaatatgccatgttccagcctaaatattccagcccatgaaaatggtgagacaataaatttctgtggctttaagccactacatttgtggtaatgtattacacagcaatagcaatctcccgtaccctctgccttccctctgtcttttcctctggctgttttttcttgatccaacacctaaatgtgggttaatttttcctggaatttcttctttctcaacactctccaaagtgattatgcctaattgagttactttaataaccatctatatgtgattattgctagatttttagactgctcttctctcttaagtcatgtcctatttttcctactgcctgctggtcaattccatgtgggcactaccaaactcctcatttgatatctcccaaatctaccttattattgccccatctacctcttgctcaatatctctccctcctagctgggccagtcctgttaatgtcttctccatcctcccaatcatttagtttgtaaacatcactaggacattcttcctctcctgtttccattagaaccaataattggccaactcctgttttaacaagtttatattcaaggcttcttttctattcccaataggtactaggttggcctttttcttcctaatttattaaaaccttagttcaaaatctctaagtatttacaagtaggtcttccaaagttaatgaaattggcacaaccccaagagggctctcaaagtccaatacatgtaagtttccaatctcagctctgccacttaattgcaatgacctaatcatatttttaatatctttgggtctcagtttcctcattcaattattggagaaggtaacatctatctcacagggctattgtattacatgtaaaggaatccaatcaatgataactgttcgaattattacctggaatcgtggcaataggacccatttccctgtcaatcggacttgaaagcttaacaaggccttcaattcttcttcctatatccctttactgaaccatcagggtaaactgaatcaatgtcctacttggtagcttcatcagagcacgttttgagtctgcatccagattgttaactcttggaaaacattagcaatattgcttgtttatccttctttctgtgaacactgactaccacattcagcaataaacattgataaagaaactgaagagttgttaaaatggaaacttgacagcataaaggaaaaaggacaaagaagcaagtgacaggggtaaatgcaattggtaggctgcatcttagctaaactcaaagtgaagcaatgatgccccagcaggctaaggttactcttaatgagaaagtcccttgggacataaatgtcatcactgagatctgatcttcttctaggacagttagaattttcttacgggagagaggcagatactagtgttgttcacctcatcacatgcaacccaaagaaaatacccaatatgaatgggattcttttgaacaaagggaaagaataaaaataattggatatgcttgacaactttcagttactctgcttggccttaaggtgttaagagttgaaaatctagcttttacctagtgcagctgaaaatctctctatataatgcaaaacttcaaaccaccttaccaaagagaggacagcactgagacctagttatctcttaggaaacttcgcaggctattactttgagtacaaaacaatgacacaactttatttcctgccaaacactgagggtacgacattcataaaaattttggtctagtttatgaaaaataaaccaggaggcatcagttaaaactcttataaataccttctttaagtgattttaaaagatttcactgatttcttccacttatcaatagtaatgaaataaaaaaaagtcctagaaatggttacgctttggacaagatttgagtaagacattaaaaaattctattggaagactgtcccagaaaggagcaagagctaaatatggagacaaaattcaaagaaacccaagcaaaaagaaggaaggaagtcaggaggaatttcctgaacaggcacaacaacttcagacccatgagggatgggaaaacaaaagaagttctagatggccttaccagctagagaacaagcaaaccctggcaagagcctccccaggcagcaggtttaacatggcccggccctgtttaagggtatctatcacacagtgatagatgatgctctaataaggctctgcagggtgatggagggaacccataaacccaatgtggttgggatgaggatggaacaataaagaagagagaataaaaggttactagttgttgagaaccctacatgtaattttatgtataatagttgactttatccccacaacaactttctaaaatatcaatatactcactgtataggtgtggaagcataggtactaagaggctaagtgaggaggtggaagaagtcattggtgagcaagcatttccattctttcctaaacacctatggaagaagcatacctccctgccttcactgttggacttggtcatgtgactcgcatgaaaaggcaacagaagaccatgtaccagcttaagcccgtgccttaagaagtttctgcttgtacctctgggagatactgactgactggagaagaacatacactttccaggcaaacacaaagccatgatcatggcaccaaaatgagacatatggggcagagccgtcttctgacctgcagatttgcagtattaaaaagatgccctcagctgctctgtggagctgtgaggatacaatgagactgttgcattccactggagaatagagcgagtaaccagtttactcaagtgtctaaaagtgattttttcactaagtacctcttactagcacttaacactgtgtctaaaacacagtagccattttctgaacaaacattaccttttttcttccacagagaggaagaaccacagaagtataatacagaaacccacttctgacttccacctcaaaattctaaatatagtacctttatgaggtgtcttacttctgagccaacttgattcttacacagcctatcccattttgttctggttcattgtgggtctaagggcaatatttttttttctgccataaactgctttcttgcactgttacttttacaaatcacattagctaaaaatactgcattttattctcttatatcattctctctctaaggcaggatacttcactcttcactgtatttttataactctcatctggtatttttttatgtctgttttctgcacttatctccatcaagtttagataacagtcaccaacttcttgatgactctaagcttttactgaactttgggagattacatctatgtaaggttcgatgtactctactaattaaagatctctttctattgcttccagcagttttcattccttgagattaagccaatagttgcaagggtggtgagattcagggcagtgataattctcaactactctaaagcaagattgctcctttttctcagtcctggttttgggccaggtgcggtggctcacacctgcaaccccagcactttgggaggccaaagtgggcagattacttgaggtcaacagttcaagaccagcctggacaacatggtgaaaccctgtctctactaaaaatacaaaaattagccagccattgtggtgcgcacctatggtctaaactacttgggagctgagacagaagaatagcttgaactctggaggcagaggctgcagtgagctgagatcgcaccactgcactctagcctggatgacaaagcaagattccatctcaaaagaaaaaaaaaaaaaagaatgaccattaacttcattctatcccttacatgcaacattcttgctccatcatttctttttatgatgttggcctaatgatttagtatttaagttttctttacaaactggataacaattaacaattttatagcaaagcaggggctctcccaactcagaaccactgctcgctcactcttatccgtagaatcaattcaggatgcttagtgtagctgtcgctggctgtttcactgacctatctcttgccgacagctccctcaaaactatctccccacctcccacacatacttgaaagggaactaatgtttatgctttcaatattatttaagtatatattttaattatttcaaatcatttagtattttactggtgaaggacgaaggctcaagttctatcttgtcctcggctacacatgcagtaaatgacaaagccatcttaccaaagtcgggagtctgcatttcctaagcacctcactgacatcctgcaacttggcttacaaacttccctcagctcaaaacgcctctcaaacacccccttctggtgagcacttacagactctctcatgtccagctcagagtcttctcttagtagctttttatggccaccctgagacaaaattaactgttgccccatgtgtgtatccgtggtctcctgcatagttttattagaggaaacatgcaaatacactattcctctgctcaccccactgacctacagctccttggcagtagggcttttatttttgtttgcttgggtttttgttctgagacagggtcttactctgtcacccaggctagagtgcagtagcgcaatcttggctcactgcaacctccgcctcccagactcaagtaatcctcccacctcagcctcctgagtagctgggactacaggtacatgccaccatgcccagctaatttttgtattttttgtagagataaggtttcatcatgttgcccaggctggtcttgaactcctgagctcaagcgatgcacctgccttggcctcccaaagtactgggattagaggcatgagccaccatgcctagtctgggcctttatttttaattctcaggactgactatagtttttgacacattgtaggcactcaacattcaacatccaataaatgagtgttggacctaatctagatagctactacaattattaatgaaaaggaaagagctctgagggaacatgcttccatccatatgcgtcatctataatatactgatagtgataaaaactgagtgtatagtgaaaccgtggtaaatatatcactatatagcatttttatcttaacacagaggttcttttaaaagcttctgaggatggcttatcagtacttcataagcaagagactactagcatgcaggcaatttacaaataaacataattctaattttcacagctaaacaattgagaagggtcataggatccttaaaaactgtttatgaaaaatagctcctgcctcaaatagctcacatggatctactgggggaagcattggtgacaggagtaaaattaacatgttgccaacctaccaatgtgcttttcttggatgttgtcacctattaacatcaaatcacctatacttgtttatatttgattatggtttttgaaaacacatttttgtgtttgttttttacttataagattaaaacacatcaaaacatttgctagaagaattgtcttttttttttttactgtgataacacttaagatacatactcttaagaaaattttaagtgcactagataatattgttaactgtacacacattacacagatcatctctagaactaatagttcatcttccataacaaactttatatctgtcagacagaaactctctattcatccctgcccccatcactatcccctggtaatgaccattctacttttttgaatttgactgttttagatttctcatataagtggaatcatgcacttctgtgactggttaatatcatctgacatgatgaccttcaggttcatctacattatctcctatgacaaggtgaataatgttcatatatatatatgtggggggtgtactatacatgtatatcacattttctttatatatccatctgtggaaggacatttaggttgtttatgtattttaactattatgaataatgctgcaatgaacatgagagtgctaatatcctttgagatactgattttaattctttaaaatactcagaagtggtattgctagatcatggggtaaatctattttcaaaattttagaaatctccatacagttttctataatcattgcatcgttttattttcccaccaactgtttagaaggattccaatttcttcatacacttaccagcacttgggttttgggtttgcttttgtgacaacagcccatcctaacaggtgtgaggtgtcctctcactgcggttctgattcacagttccctgatgattagtaatggtgaacatcatttcatatacctgttggctattagcatgtttctttggagaaatttctatttaagtccttttgctcattttgtaaccaagttgagtggatttttttggctattgagttataggaattccttacatattttgcatattagatgcatcagatgtatggttcattttttctcctattccataggtggcttttccactctgttgactgtttcctttgctgtgcagaagcatttcagtgtgaggtagtttcaattgtctatttttggtgcctgtgatttcggtgtcctatccaagaaattattgcctagacaaatgttaaggagatttccccatttccttctacagacgttatagattcaggttttacttctaaatctttgtttcactttgagcttatttttatgtaccacagaatacattaaaattggacccttttattataccatattcaaccaattactttaatgacagtgggtggttactgtataccttgtctgtaccgtttctctcaaaatttgcatttccctttgggaatcttttgcagttacatcccactatctacctctcagcatttagaaaataaatattttctcttccaaatcactattgacagcaaaatctcaaagtaaatccatatgtgaatagtcacttttaaagaataggcaagttaaatactcagcaggaataaaaagtacaactctgtctttctctttctgacacattttcttccctgctttcctccttcatcctgtgagatgagggatggcagggttgcataggggatacatttgaggtttacatcaatctcacacagcagggtgagaatgatcacactatcctagtcccccaccaggacctctggagtaatgtcacatttccttgccactgaaaatgctacctgatgtacattaccttgtctctatttcaggttttaataacaaattcaaactgtcttttcaaaccattttcttaaatgtcttgacagactggtactagtgttaccgtagataaatgcctgctttataccaaagagatatcagaataatttctcttcaatttcctcctgcattttgcctaattattttgaaacattttacagtatattccttggtcccattaaattaaaatatctctttcattctttacccattgctgcccacccaccaaatcatagtttctactctttgggttgtcattttggaaataacatcttactaactacaacattcatagttaaaccaaagaaaacaggtatcatttgtaacagtgttttttctccactgtggcatgtatcaaagatcttcttttttggtttattttacattgtctccaaacaaataaatctaaagttaaaatacaaagtatccttatcagaccaccccttatcagccacttcacagcaaagatgactgtgtgctgggccagcagcaggccattagcatgcacagccttttctctttgatttgtgctgaaatgtaggctatccagttcatactagccttcagccaaagccctgtgggaagtaactgcaaaccataaacttccagtcctttacagacatttgtaatagaaaaagtatgcaaatagagccaccaacattactagggagtctaacttttaaatgacttagtgttattggacttgatttgtaaatgaaaaattcagatatgatggcaaggctgtttttaacaactctcctgatgtgattgaggagttgatgtactattggggaattatatactttataacgtaataaaaatgatttttttttttaccagcaacttgatttatgaagaatggtgcacacgtctgctgaaatatcaaagtaaactttggttacattggcgaggaagctaaaaggctaatacctccagggcacataaaagcttaggccttcttttggtttcttttcagggtgaagataaatgccagattgagttactttgttttttaatacttaaatctaagactttaataacttttatattgtaagttaaggggtacatgtgcaggtttcttacacaggtaaacatgtgtcatgggggtttgttgtacagattatttcatcacccaggtattaagcctagtactcattagttacttttcctgatcgtctccctcctctcacactccgtgttctgacaacaggccccagtgtgtgttgttcccctctatgtgtccatgtgttctcatcatttagctcccacttacaggtgaaaacgtatagtatttggttttctgttcctgcattcgtttgctaaggataatggcctccagctccatccttatccctgcaaaggacatgatcttgttctcttttatggctgcatagtattccatgtgtatatgtaccacattttttcttttttcttttctttttgagatggagtttcgctctgtcatccagactggaatgcagtagcacgatcttggctcagctcactgcaacctctgcctcctgggctcaagcaattcttctgcctcagcttcccaagtagctggaattacaggtatgcgccaccacatccagctaatttttgtaattttagtagagatgggagatttcaccatgttggccaggatggtctcagactcctgacctcaagtgatccacccacctcggcctcccaaagcactagaattacaggtgtgagccaccacacccagccagtaccacattttctttatccagtttatcaatgataggcattcagattgagtaacttttattcaacaatttttcacaagtatatgcagtgtgcccatcatgccagccactgtcctaggtgctgaggacacagcagtgaataaaacagaccaacagaagctctaggcttttatatgtcctagacatattagccttttagtttcttcaccaatgtaaaggaaatgtttactttgatatttcagcagatgtgtacaccattcttcataaatcaagttgttggtttaaaaaatcattttttattaaatcatgaatgtaatgtctgtggccatacagacaaaaaacgctgccttcatggagtctatattctaagcaacatacgctgctcatcttcacagatctgagccaaaagaggtttctttttatttctaaggcattaatattaactcaggtcaaattttattcattttttacaaagtatggatttttaaaatgaatcatcattagaaaatgtttacctaatgtctaggaaaaacattattggtctgaggttcttttaactacccatctacttcacaaaatgttttgctgtgaattaaactacacagcctacaggaaaagataaaatccaagtataaataaagtaaagaacagcacctaacaagcacctcgtattttgtactttcctatttgatttgattatgttttcaatctcttccccctgttcacaggagaggccaactaaaacctaaagtttagtacaactttctggaaattctgcaaagtggcaaacaaactgagaaaatcgtatgccttaaaaacccatcactgatgttcttgatcaatagttggcataaataaatcgtagacatgtgggcaagactgctggagccaggcaaggatttttcttaatgtggacagtgatgtcactgaggcagagagaaggaaggcatatttacaataaaagggagtgattatacaatacattaaaaccataaataaatactccattaagttataaaattctctctatatgttcttaggaggccttcctgtcaggcacttaacttagagaaaagcaagtaaagctccatttatcattcatttagccaaaacttgctgaatcctgctctatgcccgccatgacacatcatcatcactactgtgtattaagagtttactacatcctatgcactgtgctcagagattacatgcatcatctcattccagcaatgatcaaccctataagctgggtgttctttttaataatcattatatagattaggtaaacgatactcaggttgtgttatttatctgtggtcacatggcaattaaataatcagatgtcatatgagggtatgtagttctaagatataaattcatatttatgttactaaataaaggccttctcatgcaaaacaatcaacatctaaattcaggggaaatccagacctatattctaaaaatatggagttaataggtgtttggctgacatactttaagatattctctaccccatgcaccaaaatcatgactagtcacttgaattaatagatatctacacacttcaacaacagctacctagaataatgtatcatggtaatttacattttttaaaattaagatacagtatgattgtataaacatatgtaaactttcatatagtcatattatataaaaagattctatataattacatgaggcaggataagtagtcaaggaagtaatcatgtccttgggatatggcaactgtggcaaccgtacagtcaaaacaataagccccagcatttgcaccgtagtccagctcactcaagcaaagctatctccagtagggaacttcccctggagggagcatgcacatgtgatttcacctgtcctcagactgaccctgtgctgatgataatagtgaaaaacacaccgatgggtggagatttaagatgctaatgagacatgtggcacatggacaagcatgtacagctactgcacatgtgcgtccagacgaccacccagaacatgcttactagtaacactgctttccacctccttatgaataatcatgtaaaactccccaaaactccctattgccagtctttgctgtctcatccttacaagcagcccaccctgaattctctgtctctcagggtgtactgtctattccgcacttaactttcaaaatatgcttttcttttgcagtaaatgactctgtgctgcatatcctttgctgtgtcttgtttaatttcttttaaactaagaagaactgaggtctcacaacagccttcaaaaattacacactgttaacttaaataacaacttgacagttcaaatttaaagagaactattcctgtttaataatcaatcccctttttactaagacaatgggaaaataacattcatgctgatcaccaactaaccacattgttgggttaaatcaaacctctgcaattcctttgagaacataatgatgtccgtggtacccagaacaccaaaattgcctagactaccttctagaacactgtacaatctagttccatcacctcagttgtatgtttaccaggaaaatatcaattcccaaacccatcatacttttagtgtatttacatgatttaagaatataagagactgatgaaatatgcggaagaaaatagagccattgcttccattacttttttcgaaagatgagataaatcgaattggtgagagtgattggctttatattagatggagaaatctttacaaggtgagaaagatgattacaaaagcccagaagaactgtgccttagactgctttgcaggcatccaagtttttactccactttgaaggaatcatcactggtgcacagtgggtaacatttatttgagaaagtagaggtgagactccaaccagtcaattcatatttaaggaggtctagaaccaagaattaccaaacagatgcacattataatgtcctaaaaacatttaaatagcatttttatttcttggtaaagcaacatttgttgctctagccaagagtttcaatcaactgacaaactagaagtcctaactgatttgaataaagggcttctactgtgctctgtgcaaagccttgggtagctagaggcaagattctctagcaacacaagctctacccaccccggttacccacttcagaaccctgcttttagttttgggtacggcctcgaaggattacaggtgatcagatggatgacatcctgagtcatcagtcagtgattcctggtctcagtcagtgattcctccaggcacatctcccttctgatactcctaaataccagaacagcagcctgggaaaagagcaagtaacactcacttctctctgggcatcatgtgtctcccaacccttgagtgtcaagaatcactcttttctaaactcccaggctcctcaaagagcagaagtgcaggcatatatcattttagaacggaaggaatattccagacttgctgctcaagaaacaaaagatgcaagtgtctttgggcttgttcaaaagtacaccccttctttctttgtgctgtgggcaagagatgcacatgccagtctaaatgaaccactgctgtgtttatgttcatgctgcgttccatcatgtttccaatcctttactctttctcaccatttactgaggtactctcacccctacttcacatcgacagccccacagctggtcatcctcagtcacagtcttgccagttctaagccaacctagcccccagagtctcattttatatgcacaacagaggtaggcgcattgtccattagcaagtcaaagacttcttaaatcactgaatggttcctaggcttcttggaatgatttcaggaacaacttgctgcccttggtccacttctcttccctatccaaatttcaaacaagtaactggtatcttcccagtcatcagttcccaagactagacttttctcccaatcagggaaattgggcttgttacatttccatgacatgtcattctgagtgccctgttacccgtctctatctggaagatggtatataaatgaaatcatttacacagtgccattctaattttgaaaggaattgtaggcatgtcaaatagggctcataccaaataataacattctaaataataagagaggccaccaattgaggtataatatgtaccaggtcctacgcctgtaactttacctgcactatcatttaattcgctcagcaatcctataaagtactattgatatcttaccatgaggaacctcagcgttaaaaacttgcccaaagtcacaggtcatgtaaactcatttatgtcaaatttccaatccaaactatataacccaaagactccccaaaggtaaccaaacagataaaatttatataaatccaaagtttttttcttgcctgtctttctgcaatattcagtggggcaataaatctctggaatctgtcatttcagtatatttttaataaagtagactctttcacacactctcctggaacctctctccagttgctcagcttggaggaactcaaccaaagtacaaataacatagggcaataagtgatacttagaatttaagatgctttgggttttatgttggcatacgattctgatactctaccaaattacaacccagcaagagaaatgtattatgaacttgtgtgatataataacaagttaaaaagagtcatcctttcttggaaatcagcatgttcaccccttttgtttttgcttttgttcttagaacttgctgctgtacctcttgcaaagtcccataaggtagaaccaggtgatatcactatctttacctgatacaggagacagaaaagaatttaaaaaaaaggccattttacacagaagggacctaattctgaatgattcaccaatattcgatgaatcactgatgagctatacctttgccctcttcagattccttcttggctgtactaccagtaagtttgaccatgtcaatgcagggagtttactcacataactgtacaagtttctaaaaatgtctagcaataaatatattattcttggaagttatgttctcgggaaaaagaggtgtctccacttacttaacaatgaagtagctcactgaatcatttaaatagtgggctgaagaaaacaacaaaatctttaaaaaacaatttatcatctcaaacttctccttgaacaactgtttcttttttatttaccttagagaataggcaaaggaaaataaaatcacttaacacatagagaactcaagatagagacacacctttagaaagagtcacatacaaactggttagtaaattaggctattgtcttataaaagttgttgtaaatcttaggccaatacattcttgaagaattgatatttgatgcatctgtaggtatttatatatatatatatatatatttgtatttatatatatatatttatatatataaaaatatatatatatttatatgtataaaaatatatatatatatatatatatatatatatatcaggtcatttttcctcccgctcattctttttttagttgtgtttttttttttttaattttaagagacaaggactcgctctgtcacccaggctggagtacagtggcatgatcatggctcactgcagcctcaaactcctgggctcaagtaatcctcctgccttagtctttcatatacctgggactacaggtgcatgctaccatgcctgactaatttttttaacttattgtagaaatgggatctcactgtgttccctgtgatggtcttgaacttctgggctcaagcgatcctcctgcctcagcctcccaaagcactgggattgcaggcataagccaccatgcccagccctggtcactctgaaaggaatgtcattctcttttttgaaaagagatgtgatttcattataatgcctaattgttttgccacatacctaaggttcctgattcatcctcctaagtgacaaagactttttacatagaatcaaaagaacttctggtggtgggaagatggtctatagaaaagaaaaactccccccatgcctatgtcctgaatggtattgcctaggttttcttctagggtttttatggtttaagatctaacatttaagtctttaatccatcttgaattaatttttgtataaggtgtaaggaagggatccagtttcagctttctacatatggctagccagttttcccagcaccatttgttaaatagggaatcctttccccatttcttgtttatgtcaggtttgcctaagatcagatagttgtagatgtgtggtattatttctgagggctctgtcctgtcccattggtctatatctctgttttggtaacagtaccatgctgttttggttactgtagccttgtagtatagtttgaagtcaggtagtgtgatgcctctagctttgttcttttggctcaggattgacttggcaatgcgggctcttttttggtcccataagaactttaaagtaattttttccaattctgtgaagaaagtcattggtagcttgatggggatggcattgaatctgtaaattaccttgggcagtatggccattttcatgatattgattcttcctacccatgagcatggaatgttcttccatttgtttgtatcctcttttatttcattgagcagtggtgtgtagttctccttgaagaggtccttcacatcccttgtaagttggattcctaggtattttattctctttgaagcaattgtgaatgggagttcactcatgatttggctctctgtttatctgttactggtgtataagaatgcttgtgatttttgtacattgattttgtatcctgagactttgctgaagttgcctatcagcttaaggagattttgggctgagacgatggggttttctagatatacaatcatgtcatctgcaaacagtgacaatttgacttcctcttttcctaactgaataccctttacttctttctcctgctgattgccctggccagaacttccaacactatgttgaataggagtggtgagagaggacatctctgtcttgtgccagttttcaaagggaatgcttccagtttttgcccattcagtatgatattggctgtgggtttgtcataaacagcttttattattttgagatacatcccatcaatacctaatttattgagagtttttagcatgaagggctgttgaattttatcaaaggccttttctgcatgtattgagataattatgtggtttttgtctttggttctcttcatatgatggattacatttattgatttgcatatgttgaaccagccttgcatcccagggatgaagcccacttgatcatggtggataagctttttgatgtgctgctggattcagtttgccagtattttattgaggatttttgcatcgatgttcatcagggatactggtctaaaattctctttttttgttgtgtctctgccaggctttggtatcaggatgatgccggcctcatacttcatgtctaaaacaccaaaagcaatggcaacaaaagccaaaattgacaaatgggatccaattaaactaaagagcttctgcacagcaaaagaaactaccatcagagtgaacaggcaacctacagaatgggagaaaatttttgcaatctactcatctgacaaagggctaatatccagaatctacaatgaactcaaacaaatttacaagaaaaaaacaaagaatcccatcaaaaactgggtgaaggatatgaacagacacttctcaaaagaagacatttatgcagccaaaagacacatgaaaaaaatgcttatcatcacttgccatcagagaaatgcaaatcaaaaccacagtgagataccatctcacaccagttagaatggtgatcattaaaaagtcaggaaacaacaggtgctggagaggatgtggagaaataggaacacttttacattgttggtgggaatgtaaactacttcaaccactgtggaagtcagtgtggcggttcctcagggatctagaactagaaataccatttgacccagccatcccattactgggtatatatccaaaggattataaatcatgctgctataaagacacgtgcacacgtatgtttattgcggcactactcacaatagcaaagacttggaaccaacccaaatgtccatcaatgatagactggattaagaaaatgtggcatatatataccatggaatactatgcagccataaaaaaatgatgagttcatgtcctttgtagggatgtggatgaaactagaaaccatcattctcagcaaactatcacaaggacaaaaaaccaaacaccgcatgttctcactcatagctgggaattgaacaatgagaacacctggacacaggaaagggaacatcacacaccggggtctgttgttgggtggggggagtgggagagatagcattaggagatatacctaatgctgaatgacgagttaatgggtgcagcacaccaacatggcacatgtatacatatgtaacaaacccgcacattgtgcacatgtaccctagaacttaaagtataataaaaaaaaattttaaaaaaaaagaaagaaaagaaaaactctgactccattgtcttgaaactttgtttttgccatctaattccttaggcacaattttctggctgaggagaaactgcccaaagaccctagttccgttagattgaaaagcgatgaaaggaacagtgcaatgttttcttgatggggcactatggcctcaccacagatgtggcttagttacctgagccctacctggtaactccatgtggattaccataagtactctaaaatatggtaatcaaatactaatgcacgtaagtattgcttggaaaacagagtaagacagtttccccggccctatctccagagattctgattcactaggtctgggtggggctcatgaatttgcatttcaaataaactcacagatgatgccaaatgctagcctgaggaccacattttgagaatcactctagaggactgggattccaaagcactcagggtaacctgtatcacagactgtatctaaaatgttgttcttggattacagtggtctgtagctttaagaagcaattatgatacgtttcttaccaaaggtcatcaaagaaagcacactgctgtgatggcaagctatccacttttataaaaagaagaagaagaagaaaaaaaaaagaaacaaagtaatggctcttctcttggaactgagagaaagctgactctggtttacgaaggcctatctcattcctgatcgtttatcatttgagagaggtgtgaacagtctatgtcaaaaatgctcattcaacattcccaggaagccactcacagggctgaatgtaattttacttaagcctgtctgaacttgcttttcttatttttccccctgtagacacacgattttctttctttgtaagaaagaattcaaagacaaagacacagatgtgatttcaccaaactagcaaactttaaagcaaaaaaaaaaaaatcatccatttctgtttatagcaagactccctgttatccctctactcatcttcctatgcagagagaaaatgtgaaactgtaatagccactcttcaagactgattaaataaaaatcattcaaaagcctgtgttgataacatattcctatcttttgtgtgcaaatccatattgtgtttcttggaagacctaatatcctagaaaaaatagacctgcttcttactgaaaagcagcagttggaaactgaaatgcctacagtacaagtagtaacaaaattaatggaccaagccaggagtgaagcaagggagggtaggagggacaatggagttcttgagagtcctggcattactgggagaactgcaactaattagcttcagaaaaaaatccaattctgataatgccaattggggcatcattgagattctttccattttttgtttgtttctcttggtcctctttcttgatgtgtctgaggattttaagtagaattacagaagctgtgaatgcagaattatagagactctgcatgatggtatctcccaccaaagaaggttcatcctactctctggcagccagtctgaaatggggcgttactttcatccaatttggaattgagttgactcaaagctggttagtgttttgaaagatgtggtccacctctggtttacacacactccataggtgtggtttaaggcctgtggggtacactagtacacctgtcattcgtggatgtgcaactctacttattttaacctcagccctaggagactatcaaaaacacacacagtggctcacacctgtgatcccaacactttgcaccaaggtaggaaaatggcttgaagccaggagttcaagaccagtctggtcaacatagcaagaccctgtctccacaaaatacttaaaatattagccaggtatgctcatgcacacttatagtacaagctattcaggaggctgaggtgggaggactgcttgagcccaggagtttgaggttgcagtgagctatgatcattctactgcaatccagcctgggcagcagagcaagaccctatctcattaaaataataataataataataataataataataataataataataaaaagccttcaggtataaatctacccaaggcacccatcttctctcttaggtcttggttcctctgaatcctggctgctttggcagacccaaacttctatgcttgtctcttcagccttatgagatcaccaaaaattatgttgcccacaaggtatgattttctagctgcctgttttctcaactgctccttgagccaaaacccagcaaattccctgaagggaaaagcagcctgtggactcccggctcagcactctatagttccctgatttctgggtctcttggttgtcttggcagttctttgttatcttcaaattaggtttacatgtggcttttctattgttttcaaagaaacatcagtttgtcacaagccactctaatttagccaaaagcagaagtcctcaggttaatttaatagagtaataatataattacttccccaagaaataatgtttttattctgaatatgaggttaaattcaaatttaaacttaatccatatgttacataggaattattttgttaagaattagcttcaaatatgataatacacatattctattccaaacaacatgacaactcattcttagttcaatgatctcttttaagacagatatatcaagcaatttttgtaatctgtcagcaggcctcaaagaaacttcaaataaccataaatcagtgttatcatttggagtacttgagatgctctagataaatatttgatggtagatggacactaggcagaggaatagtttcatctaatacaataataaaaaaaatcacaagacacccactagtaagtttatcagggagcaagatggagaatgttgctgacagaataccactcctgcagctgccagtaataattcacccttgaagcaaagagatggagatttaaatggggacactatccaacttaagcctttctgtagaatatagtgtcctagatgaagacgtatgtagtaaagatgggggaaatgaccaaattattcgattaccatgtgttacctccaactgggacttccaatattcctgaaaattcacctgcagaagaaagtaaaagagaaacaacaaattctcaccatgaaatgattttgaatgctatttcagaatattaccctgttagatcatctcatcaatgaattcaggggccctctattatgtaggtagctcaagaacgtagcagaagccttggaagggactgtccatggtggatactgacctcaattgctctcggattataacggactatagcagtggatctcttgagagggctttagtctcttccttaacatgcttttatcccagggtgggattactaagatcaaatgcccaggcattcaaatgatggagatgtagaatggtatcaagtttggcacacatcctaaccaattaattggttttcataattatcaagtgttaagatggagtcaaaaaaaatcacacaaaaaaacttaggtctaaaagcaaacaaaaaataattttagctatgtgtgcagtatcaagtggtatcaactgatgtccaaaaaataaaaagaagagcattttctgtatgtggtaggcactgtgccaaggatattacataaaatctgctcatcttcacagtaactctgaattaaataccgtcataatcctcattcttacggataaggaaaatgaagcagagagtgggtaagtaatttagtcaaggtagtaagcagagagagacaacctgaactagctctctggatgcaacattgaaagctcttaaccgcattgctttactggcctcctggacagcattgatcattttccctgcactttaagaatgtaactacggattatggacacgtgcctttcctagctattcttaaattctgagcttaatataaaattaatgacatcctgggagccatgattcttccctactacatctcactaagaacatggtttatgaaatctttatagctagttgaaatgtgtttactaagtcttgccaggaagctcattttatagggatatcacacacaggcaatataaattcctatggggctaagaagccttcattccaaccagtgcttttcctccaagtaattcggtaggtttggaaaatgaagcatctggtctgctcttttccacaagtttctaagcttgaataaagatcactcacttgatacagaaagggttggaaaaattccagatctggcctctgaaggttacttcccagaatgcggctgttaactacctattactgtttagaccaagtatctttgagagggaaaaactcgctttgattgcctaggtacttcaagctgcaaatctgcatttcagtgaacaactactaagtaagcagacaggaaagagaaccagtgccccggtctgtatgcaacatcttgttctagccttttgtgccgaaaagctatgcaactgtgagaaagtcacactgtaagcctcagcttccttctcaataaactgaagatgatgatgatgttcttataaaggtagcgtaagtgaaagcacttagaagttattcaaatatgacatcatatgcgcatacacacacacacacacacacatatgcagtaatgtggcacttaataatggagctatgttctgggaaatgcattgttaggctattttattgtgccaacatcacaaactgtacttacacaaacctagatggtgcagcctactacatacccaggctatatggtatagcctattgctcctcctagatacaaacatgtatagcatgttattgtactgaatactgtaggtaattgtaacacactggcaagtatttgtgtatcaaaacataaaaaagatactataaaaatatggcacaaaaggtagctggcgtggtgactcaggcctgtaatcccagcactttgggaggccgaggtgggtgcatcacaaggtcaagagatcaagaccatcctggccaatatggtgaaaccccatctctactaaaaatacgaaaattagctaggtctggtggcacacgcctgtagtcccagctactcaggaggctgaggcaggagaatcacttgaaactgggaggcagaggttgcaataaaccgagatcggggcactgcactccagcctggcgacagagctagactctgtcaaaaaaaaaaaaaaaaaaaaaaaggcataaaaggtagaaaatgaaaatggtagacctatatagagcacttaacatgaatgaagcttacgggactagaaattgttctgggtgagccagtgagggagtggtgagtgaatgtgaagatctaggatattattgtaaactactgtagactttaataagcactgtacccttaaggttacactaaatttattaaaaaataaagtattaataattgcactatgacattacaatgtctacgtcaacactgggcaataggaatttttcaactccattataatcttatggggccactgtcatatatgtggttcactgttgactgaaatgttttatggtacataaatatatatatatgtgtatatatccccaagatataaatatgtatatatatctctaagagctgagctgtgcatattatccaggtcctgtatagaactgtatagaactatgcaagtgacaaagcagaaaagaataaacagaaaaagtccattaagccactccagaggaagtgagtttgagaggggatgctggattttcataatgagagaaagataatgcagagcaggaagagagattttaaaaaatgaggagctgcaggtcagctacagaagtgggttccagagagttccagtaatgccagcactgggttaagtggggaatttggggatgaaataacagcagacaatgcctcacttattaatggaaaatcatttgatatagaaaagttgtgtgcaaggagccataaaccaaaaacaccaacaaaaaccatgttttcaagaaggaacctgcttgtaacgagccagtgaaggtatataccaatttaagaattaggtactagtgacttcgaattatttaacagccaggtccatatagagaataaatagtagactatttttctcatatgggctatttaagtgagagatataagcagataaaacttcttaattaattgctttcaatagtttagagttagaataggtattttcaatttgtataatgaaaacttgtttttaggagttcttgggccaacgaagaaggcaatcgcaacattaacatagtttgaattaaacatcggtaaaacaacaactaatgaaaagcccaatatgtttttcttactacttgaaaaaatatttttactttattttttttaaccattttatcaaatggttatcaggggcccagtgctcctgaagtcaataaccaaggttcagaaatctttacccttttgctttttgggaaacgtcctaagccacgaaaaccaacttgccgttgcatatcataaggcccacctccagccttcctggttccctgtgttataaatcttcaccttttctccctcttctttcagaccttcttcatttctgaacatccccccacttcaataacccgaataaactcatctccttaatggactggtacatcttgtctttgacatatttaactgttacaagaattccagaaaactgatactagaaaaaaatgaaaccatatagtacatacacttttggtgctattttccagaagttgtatgaatgcaaaatctcaggtaaacaaaatttcataaaggatattaaatatcagttgattatactagtgccacaatcccaagaaagaatataagtatctacggaaaatctcattttgcacaaagataacttagtacaactaaaactagttcaacttttttagaaaaaacattaagcaagtaaacctgactctccaactatgagaagcattccaaactgagcatgaccccataggtagcactgggagattgcataaggaccagaaggtttctagcaatatgggaaaaaaagaaaatcacagctttagcaaaggaacaaagtcctaactatgaagatgacttaaagatacaatccttaggcccacatgggaccctgaggccacccacttccaaatttgagactcccttaatctcaaatccgagccacaattcagtgggcctaactccaattgatgtctcaagacttgtaattttctacaagtttattgctttccctctgagcaaataaacataccacactttatttctatacttctgtgagatttctcatataaataaatgcccaaatcttgggaggagaaatactgtaaccacatatcttcatttcaggccctgcataaatcaatttacagtgcaactctaaggtaaaaaaatgcagcaatagcagccacactcaataataaaatcacactaatttggactaataattagtaacctacttcctgagcactgcaccaagcgattcatatgctttatctcatttcagtatcaggaaaaccctatgaagtggtttaaagtggccccatttgacagatgtgaaaggttaggaccagagaggctttactgtgtacccaagatgactaaattattggaaagtaagtggtaacatagtaattattaagaaaggattcaacatgcatcaccgttatagtcaaaagacattggaatttacatgagaccaatagaatgtgaccaaataaagatatttaaatgaccagtttaatgaattcaaaacaatgattagtaattaacacatcaatctttgaatgtcaatggataattctaaagtgctgcagcttgcttgaaaagtgccttctctcaagctgattaaatattctctccaaaaatcttgtttacattattaatttgctcaataacccctgtcttcagagaagtgtaaacctctagctggtccctgaagagttagcacatatttttaattaaaatggtcttgaatcaattgagttattatttttccaggttatattactaacaatattaactccaaataagatagattaaaaaacaaggtacattgaaagtatgcaaatgtaagtgtcttcaacaatgaaatatctaaagttcatataaagacctgactccaaattatgaaaaatggaaaattagtcatttctgtagtgtacacgaatgatttgcaacagcaaagaatgtaaggatgtgtcaaaagtttacaagttcaaagtacaaaatgaacacttcctttaggaaatgctaaaacaaaattaaataccattagaaagattttgacactttgctcttttatgagccaaattacagtaacagagttgggaatataatgatgcaattatacgctgtcatgaacagtttaattattttatgcctgagcagattttttttttttttaactcaagtgccctatacaacttccacacctgaatgcttctaacttggctttgccattttctgactctatttaattttctggggacacagaaggatggtccttactttaaaaaatggttctatcaaaattcattctcttcacttttaagctcttaaaggcgaggtaacagtttttcagcatacactctccagagggctaaactcattcattcattctttccaatgctccaatgcctccgccaggccaggcaccaggctaggatgcaacatagatagatgtgggaagtcaagggagatgactgacaaacgaggaaaatgaaaatcaacaggaagttgtaaaacataaaggcagctatgggtcatgtctatgccttcaggtttcaccatcagtcctgttttaaatcctagccctgactctatgtaagtatttcagctctaagttaatctcttcaccacctggaaaatgggggccatgaagatctctccctcacaagttgtgaggttcaaatgagatgacgatgcaaatctggcacatagtatatgcccagtgaatatcagcagctaccgaatgataataattgtatttttattactttttgtattatcataagtgtcacaataagctatataaagcatgctaataagaacactgaggaaaagcaataaatcttcctggagtagctcattccgaacagacaaaagtttcaggggagagagggagataatgctgagtaatgggtcttcaatctctatgagaaaaaaaaataacctaagcattgttcaagagaagatgccatgttcatttaaatgactatttcatcttaagaaagcagtctgagctactaatcaaaccagaaccctagccatgctgatgatgatcattaatgtcatcatccataaattcatttgctgtgtcacatcttggtgtaggaatactcatttgttacagttatgtcttcagtttgatgtgaagagaaagcaaccataaagcaacttcaaggaagctcctccaaataattaaaattctgaagcattcctcaagccaaaagcagatcagaccctcactgagggcactttctattaaataagcaggctgctatttgttgttcttgcagcacaagtccttgagctcacaaatcccacagcaccaaaagtcattattttttaaccaaactttttttttttttttcttgagacagagcctcactctgtcacccaggctggagtgcactcgcatgatctcggctcactgcaacctccacctcctgggttcaagcaattctcctgcctcagcctctcgagtagctgggactacaggcacctgccaccacacccggctaatttttggtatttttagtagagatggggtttcaccgtgttagccaggatggtctcaatctcctgacctcgtgatccacttgccttagcctctcaaagtgctgggattataggtgtgagccaccacgctcagccttaacctaacttttaaagtcctaaatatatcttcttaataaaagggccaccatttcttgtgcacatctggagccctttctgggcactagtcactgtgcaaaagttgttacacacataacctcatttcccacaatccttcccaggagacactacttatccagggttgtaaagataaggaaactgaggcacagagatttttaagtcacttacgcaagttttaccataacaaacttgggtattacccaagtttaatattaccataataaacccaagtttactatcaaacagcagagctctgatatgaacccaactttgaactcaatgtctttagtgactatattatagtatgagtaccttgagaatatatatattttaaatttccttatttttaaaaaacaatactcaaattcaaaatacaaattaagatggggtgggtgaggtagggtgaggggagtgaatggatgaaagaagggaaaggaaggcaaattatccagccactacagtcagatgttaaagtagaattcagatatcaaccccaatcgggttgggttttcattatgatcagacaagactcttcttgaccaaagactgaactcaatttctagtcaatgtcttagataacaagggccctcatccattattagactttgaggtcttttccctccatcattgagcttcagctcagcaatcttacggccatttacaaggtgactgatgagccttcatcataaaacaagatgaaagcaacttgcctacatgcacgtcttcaaaaccaaccaaatgaaccaattacagaacaaaaccagtttagtgtgaggatcaaaatgtgataatgttttgttgagcacagagataggcacatagtgggttgcttgtttatttgctttagtatgaataataattattatggatattatcaggattcctaaaaagagtcatttaactattatgggaacaatataatatactagatgccctttcctcaaggttatgcaacctacatgggaaaataactaaaacaaatgagtagcttctgcaattaaggatcctgagaatgacttccctgcttgatttgtggtagtagctgcatgcccaaatggaggaaaattatttgaataaacattggtcagtggggagaagtgagttttaggactaggctgctttcagagaaattcatcaagaggaaaaaaatacataattttaagaagtcaaagcctattattagaaaaatatgttcaccaaatgcagctctaatacctttagcaatgagataaactgagtctagcaagtggttggactcataatgattcgatttctttaactagcccattaatccaaaagatggccaatccacgttcatgaagacactgccagtgagctagaatatctgaaagagttggcataaaaagctccaccacatgcaattaatccacatctgatcacatgcccctgaataatgtcagcccacagatgggtttgtacacacaagatacagtgttgcctttaaatattcacaaatatttttaaagtataactttttaaaaaacatatatgactcagaaagaacagaagggttgcacaactcccagatatctgaaatgatggttaccgacaaatcttcactgatgctaaagaacatttatttcacacctactctgccacattcactcccacacacttccccaaaccagaattgaattgttacttcactttcatgctgacttcagacataattgtcacttctgcaaggtcacactttggggaacactatgtaccttcttaaatacaacattaattatggaactaacctatttagtctcttgccctaaagacttcagcatttaactcgacttccccatagtttactgtatcatagcaattaagttaatggcagcagcagcagcagagaatcttttaacccctaatgggcttgttcctctgattagactagatcaaagaagctgcagctatttggaggcagattagagaggcttcttttttactgatatcagcactgaagagtggaagatcatgtgtgtgttgacatcttacccaaatccatccatgacagtttacactgaagttattcttaatgaagacttttaatacatcaagactatatggatcaggaggcatgaaagcacccttacattcaaagagaataaaatacctaggaatccaatttacaagagaggtgaaggacctcttcaaggagaactacaaaccactgctcaatgaaataaaagaggatacaaacaaatggaagaacattccatgctcatgggtaggaagaatcaatatcatgaaaatggccatactgcccaaggtaatttatagattcaatgccatccccatcaagatactaaggactttcttcacagaattggaaaaaactactttaaagttcatatggaaccaaaacagagcccgtattgccaagtcaatcctaagccaaaagaacaaagctggaggcatcacactacctgacttcaaacaatactacaaggctacagtaaccaaaacagcatggtactggtaccaaaacagagatatagaccaatggaacagaacagagccctcagaaataatgtcacatatctacaaccacctgatctttgacaaacctgacaaaaacaagaaatggggaaaggattccctatttaataaatggtgctgggaaaaccggctagccatgtgtagaaagctgaaactggatcccttccttacaccttatacaaaaatgaattcaagatggattaaagacttaaatgttagacctaaaaccataaaaaccctagaagaaaacctaggcaataccattcaggacataggcatgggcaaggacttcatgtctaaagcaccaaaagcaatggcaacaaaagccaaaattgacaaatgggatccaattaaactaaagagcttctgcacagcaaaagaatctaccatcagagtgaacaggcaacctacagaatgggagaaaatttttgcaatctactcatctgacaaagggctaatatccagaatctacaatgaactcaaacaaatttacaagaaaaaaaacaaagaatcccatcaaaaactgggcgaaggatatgaacagacacttctcaaaagaagacatttatgcagccaaaagacacgtgaaaaaacgctcatcatcactggccatcagagaaatgcaaatcaaaaccacaatgagataccatctcacaccagttagaatggtgatcattaaaaagtcaggaaacaacaggtgctggagaggatgtggagaaataggaacacttttacactgttggtaggaatgtaaactacttcaaccattgtggaagtcagtgtggcggttcctcagggatccagaactagaaataccatttgacccagccatcccattactgggtatatacccaaaggattataaatcatgctgctataaagacacatgcacacgtatgtttattgcggcactactcacactagcaaagacttggaaccaacccaaatgtccatcaatgatagactggattaagaaaatgtggcacatatacaccatggaatactatgcagccataaaaatgatgagttcatgtcctttgtagggacatggatgaaggtggaaacatcattctcagcaaactatggcaaggacaaaaaaccaaacaccgcatgttctcactcataggtgggaattgaactatgagaacacattgacacaggaaagggaacatcacacaccacacacaggggcttgttgtggggtggggggaggggggagggatagcattaggagatatacctaatgttaaatgatgagttaatgggtgcagcacaccaacatggcacatgtatacatatgtaactaacctgcatgttgtgcacatgtaccctaaaacttaaagtgtaataataataataataataaaagaaatcaccgttatatatttcaggcaaaggtacccagtagctttaggtttttatgcccatctgctttctcaacacaccttgaccgccaactctagatgtcaaaagctgatacaggagtcatacatcattcaattacgttcttcatgatatgggggctatgtgcattctactatatatatttttaaagacatggtctcactctgtcgcccaggctggagtgcagtggcacaaatcacggctcactgcagccttgaactcctaggctcaagggatcctcccaccttagcctcccaagcaagctgggactacaaatgtacaccaccacacctggctaatttgtcttatttttttttttttagaaacaaagtctcactatgctgctagggctggtttcgagctcctgggctcaagcgatcctcctaccttgttctcccaaagtgctgggattacaagcatgagccacagtgcccagcccatttttatcgttggtggaaagaaaagcattttttataatgtgtttagatgtcatactcaattctagcttcatcaaaatcacttggagcttttacattaatgtttaaaatacaagctacatcccagagctagtgaattagtatattttaagggttgagccagaaatttatagtttaccaaagtttccaaggtgattctaataatgacctagttccagaaatcactggtatatgccataatgcaaaggtataaagatagtatacaccaagtaaataaatgtcaaagatcaattaactaaaacaaagagtgggttgggaaaaatgagactgcctgagactaaaatctcattctccatcagctattaaggtagataaattacagcacctctttgagtttcaatgccctcactttcaaaatggggcagtaatagctaccacagatacataggtacaacgcgcttagcagtggtttgaaaccacaataagctgccaaaaagcatggctcattttgctttttaaccagattctagatcttctaaacaataaagctgattataaagacattttccacaaaatagcctttttcctctccttcaatgcttttcacttaatactgtacttcttgcaaagtcagtaggctgagcatgaacaaattaaaattaaaagctgaattacttaattaattttaaggcactctcagttcattaacagcattcctgcaagttaaaaaacaagaaaacacatggaatgattgtaaaccgcatcccaatttcagaaatgttcaaatatattggggttggggaggtgagcagggcaatctactgccatatcaaacccaaaagcttctcttaaaaaggctatgtacatgtatatgcccaccagacaagatgtccttctctcatgttgcaatcagcaacccaaaagtcctgtaaaatagccaaaggtcaaaatagttcagaaaacactacttcttatagtcctcctctccacaaccctcttttcagaagttcgtaactggcatattcacatatcaaaaaatctgaaattaagaaatgtcttcaacaaatatgtctatcaaacttgtcttgaactttcctcacttacctttcggggggcaaatctgatgaggacttattttgggaaacattaaaattagggaaagtcttttggttatacttattaggaaaatcattgtccaagtgtcctgtcttgccagaatgagaggtttataaggaaagaagttccacggctttggactaataaccaaccatgggaatcacagcttccttccaagggaaataacacctttttttaaaatttgcttttatattggttaaaaaaaaaagaaccatgaggaaacatcaagaaccaatattacttctttggaaaaactttttggggatattgctaaggatttatattgcataattcaactaaacgaattttttagttttaaaaaatcccaataatattataaacctagaaactgtttattcagatccaccttggtaaaataaatacattcaataaacacagaatacagacagctttaattttttacatgtgggtcaggaggatccatctctcccaaaacatgtatcaccccacatgtgctgtgatttacaatcctcaaagcattaaagtttaatttgtgaatctactgtttcagattcattggaattctgatccaatagtcactctaaaatagatgcaggctggaagacaattctctacattttaaagccagatggcccataacagctaaatattttttctttccttgttcagaatataattcatgttggaagtagtgaatcaacttaagtacgtacaaatttaagggaaccttagtcatcagtcccaaacttaggaatctatttaaaggaaatatattttaaggttaagtttaaaaaataacaaaagagaataccatatgtaacaaccctggcacagaacactttctttaagaaaactcccttaacgttaacggcaaaaaaatactcttcccatttcactatggtaactaataaaaattttttcttcacactgaaaaataaaatctttatttaatctaattctgtaagtgccaaaaactctgattattttatcaagttattaaatatgttattcagtagtgagccttattgattttccttttgattagaaaaattaccaaaaaaatccagctctacagttcataacctgagaatggtagaaacccaagacgtagagcacattatgcaacactcttaaacaaatctgcctcttgggatctctctccttttatagaaagagactctccagcagcccctagagacattcccatactaagtgagtcagctaaataaaattaagcaactaataaaacaatatgtcatcttgttctcattgtcataattaaaatcctttttctttaagatgaaaggtggcagctatagagtagccttcaaaatcataggctatgccgaagcaggatcttctctccaacgctgtacagacaacgcagctgtccctgacatcaccacttgaaattattccctatttgatatttttgacattaaaaggctgaagtcttttttcttctgcaagttacttccatgcttgcttattaagcattccaagttggtctctcacccaatagccttagaaagcagaccatcattatttagggcaaaggtttccagaggcagtcagaggcaggataaggatgggggatcccaaacaagccatgctctttcctaagcaaagcacctctattttgaatgtgtttgatacactgagcttccaaataagattgaaattgattttaaaaaaagggaacccccgcccccctttaagccaggtaaaaactataaccatccctgtcaagagcgttacatgaatctgtaaatcctatgacagactaccggttgaaaccgaggttgaagtcttcagttcgcctgactcagtgctggtacacagtaaaaactaacactgaatgggtgccccacagtgagtgaggcatttcagcaggaccggggggatgttatgcaacaaaaacagttatagcccttgtctgcctggagttcacaatctaatggaaggatgatcattacatcaaatattaaagagagctaccatgcagtaagcccattctagacatcagctgccgttctaatatcaactcatttactctccaccacacctttaagaatgaggtacagtgatcactccccttttacagaggagccactgaggcacagagttggcaaggttgctaagtggccaagtttggtttgaagccaacggtatggcttgagtgcccatggctcaaccactcaaccctacctcctctcccaaacactgtaagaacccaaatgtcaaatgcacctagggcaagtcctcgacagaaaggcatggggtgtgaaaagaatgtataattagaggatctgaccaaggcagggagaacaccactgaggaattaatgcaggagctgagagcggaaagcagggtagtgaagagaggagggaagagcatcgaggtaggagcaaaagcaagagatccgccaggataaagggcttggagagcaggaggactagaattcagcccatcaggacagagaacataggagggtggcaaacaggaggttatggccccaggcggacaaggaaagacaggaaggtgccaaccatgctggaccgggctaagacagctggggagccactgagggcatgctgcagggagatcactgggctaatacttgtgagtccaaaagacttttctggctgtatctacacagtcatggcacagtcctcccaataggcaggccgacacaaaaccaaccctgctctgtatcactccatgtattcctggtcatattgtcacagcctgatgtgcactgaccacctctgtgctgtgccacactgagggagcagctgctccagctaatttctacccaacattcaccacctggaggcaatgcattggctcctcaggctttagcatggcaagggaacttcacaaataagaaagtttaaaaatgatgttactctcttcaaaatcttttcttcatttgtaggtggcagaaggcaacagatatatcacatcattgagtaccatgggacatgtgttcacactttaaagtacttaggtgttatttcatgtaaatgttgagaaggaaaaaaaaatcctgtttttcttgtctcttgggaatcagctttggttttctgaagaaatagttcacaaatctaaggaaaatgatatatctatacttatttccctaaagagaacataatttttcttcttttggttgataaggatttaattgcatttagaaggatttaatcacataaggctaaccaatgaaacactaactgtgggcagaactctgtttcagttggccctattggccctaaaatgtcattgatagtgactaaatatacacattactcctctcccccgccatcctttctcctccttccatttctccttctcagaacagagaaataaaacgtctaggaaacccatcatttactggggaaaggaaggggacgtgtaacatttcaaactgtaataaggcatgaacttgccaagctgtccatgtgggaggttatagcatgcccagagaagttgcccagaaaatagacatggtttccaatcaaaaaaacttagaccagttgaaactctggctttgggcaatttacttaacttctctgggcatcagtgttaacttatgtaaaatggagacaatcacaatatgtaccttaccctgttgtggtaagattaaataattggcacagggcctgacacaataaaggttaatgatagcagctgttaattattatccacgaatcagtttaactttaagaaaataacaactactttggccattctagcaagtgtgtggcaaagagggataacagaagctccttttgtggaagaacatgtaatttgccctttatttgcacagtttggaatcatcatcataacatcctaatatgccttgaaatcctgtgaaaaaacagaagtaaacaagtaaaaccaccatagcaacactatggcagaactgagttcactaaaagatcttgtctcttgctcaaaaggcttgactcaaggaaaagaactaggtatttctaggttcccctgcattcatttttttaaaaaattgttgtgggtacatataagatatgttgtaggtacatttatggggtacaagggatattttgatgcaggaatacaatacataataatcacgtagggtaaatgggatatacatcatctcaagcatttatcctttgtgttacaaacaatcctatcatatttttaagctattttaaaatgtacaacaaattactgttgactgtagtcaccctgttatgctatcaaatactagatcttatacatcatatgtaacaacatctgtgtatgcattaaccatctccccctccccaactacccttcccagcttctggtaacaatccttctactctctctttccgtgagctcagttgttttaaatttttagttctcacaaagaagtgagaacatgtgatgtttgtctttctgtgcctggcttatttcacttaacacaatgacctccagttccatccaggttgttgcaaatgacaagatatcattcttttttatagctgaatagtactccattgtgtatatgtatcatattttctttatccattcctctgttagggacacttaggttgcttccaaatcttggctagtgtgaacaatgctgcaataaacacgggggtacagatagctcttcaatacactgatttcctttcttttgggtatatacctagcagcgagtttgctggatcatatggtagctctttagtcttttgagtaacctccaaactgtcctccacagtggttgtactaatttacattcccaccaacaatgtatgagagttcacttttctcaacgtcctctccagcacttgttattgcctgtcttttgcatatcttttcattattttgtgtcctcttcaataagccattttaactgggatattactgtagttttgatttgcatttctctgatgatcagttatgttgagaaccttttcatatatttgccatttgtatgtttcttttgagaaatgtctatccagatctctgctcattttttaatcagattattagattttttttcctatggaattgtttgagctccttatatattttggttattaaccccttgtcagatgaatagtttgcaaatattttctcccattctgtgagttgtctcttcaaattgctttcaaatttgctcttcaaatttgtttactttgctatgcagaagctttttaacttaagctatcccatttgtccatttttgctttggttaactgtgtttgtagggtattactcaagaaatctttgccaagaccaatgtcctggagagttcccccagtgtcttcttgtagaagtttcatagtttgaggtcttatatttaagtctttaatccattttgatttgatttttgtatatggcaagagataggggtctagttttattcttctgcatatagatattcagttttcccagcaccacttactgaagagattgtgttttcctcaatgcatattcttggcaactttgttgaaaatgagtttgctgtagatgtatggatttatttctgggtcctctatagtgttccattggtctatgtgtctgtttttatgccagtaccatgctgttttggttactatatctctgtagtataatttgaagtcagataatgtgattcctccagtactttttgctcaggatagctttagctattctgggtcttttgtggtattatgtaaatgctaagattatttttttctattttcatgaagaatgtcattggtatttttatatggattgcattgaatctgcagattgctttggatagaatgggcattttaacagtattgattcttccaaaccatgaacatggaatatctttccatttatcttgtgtcctcttcaattttttacatcaatgttttatagatttcactgtggacatctttcacttctctggttaagtttattcctaggtagttgatttgtagttattgtaaatggaattactttcttgaattatttttcagattgtccactgttggcatataaaaatgctactgatttttgtatgttgatttttatatcttgcaactgtactcaatttgtttatcagttctaatagttttttggtagagtctttagatttttccaaatataagatcgtatcatctgcaaacaaggataatttgacatccaacttggataccctttatatctttctcttgtctgatttctctagctatgacttccagtactatgttgaataacagtggtgaaagtgagcatgtttgtctcatttcagattgtagggagaaaaccttcaggtgtttccccttcactatattagctgtgggtctgtcatatatggcttttattgtgtcaaggtatgttccttctatacacagtttctgtgggtttttaatcatgaaaggatgttgaattttatgaaatgctttttcagcaaaaattgaaataatcatatcgtttttgtccttgtgttcatatgatgtatcattgattgatttgcatatgttgaaccatccttgcgtaactggaataaatcccgcttggtcatgataaatgctttttttaatgtgttgctgaattcagtttgttagtattttgttgaggatttttgcatctatattcatcagggttacttgcctgcagttttttttttttttttttaatgtgcctttgtctggtttttgtatcagggtgatactagcctcctagaatgaatctgcaagtattccttcctcatcagttttatgaaacagtttgagtagcattggtattagtggttctttacgcatttgctaaaattcagcagttaagccatcaaatctagcgcttttctttgctgagcgacttcattatggcattgatctcattacttcgtctgttcaggttttgcatttcttagtggttcaatcttggtaggttgtgtgtgtctagaaacatatccatttcttctaggttttccaatttattggtatatagtagctcacagtatcttctaatgatctttgaatttctatgatatcaattgtaatgtctcctttttcatctctaattttatttgggtcttctctttttttctgaagatttgtcaatttgatttcttttttcaaaaaaacaactttttgtttcatttaccttttgtattttttcatttcaatttcatttatttctgctctgatctttatttttccttctactaattttgggtctggttttcacttgcttttctagttgtttaaaatgtatcattagtttttctactttttgatgtaggcaattactactataaactttcctctgaatactgctttcaccatatctcataggttttgatacattgcgtttccattttcatttgtttcaatatatttttaaaattttcttaattttttcattgacccactggtcattcagaagcatattgtttaatttccatgtgtttgtataatttccaaaatttcagctgttattgatttctaattttattccatggtggtcagagaagatatttgacataatttttaaaaaaatgttttaagatttgttttgtggcctgaaatatggtctttcctcgagaatgatccatgagctgaagaatgtgtactctgcagccattggataaaatgttctgtaaatgtctattaggtccatttggtctgtactgcagattaagtaagatgtttgctgactttctgtctggatgatatttccaatgctgacagtgggtgaagtctccagctattattgtattggggtcttatctaataataactttacataacatatatgagtgctccagtgttgggtgcatatatatttacaattgttatatctcttgctgaattgacccctttgtcatataatgaccttctttgtctcttaccatagtttttgtcttgaaggctattttgtctgatataagcatagctcctcctgctctttttggtttctattttcatgcaacatcttcttccatatctctttatttttagtctatgtgtgtctttatattataggcgaagtgtgttcttgcaggcaacagatcattgcagctagttttatttatccattcagccactctacatctttcgattagagtttagtccatttacattcaatgttattattgatgaataggatttactcctgctattttgttatttgttttctggttgttttgtagtcttctctttcttctttcattccttcctgtcttccttttaatgaaggtgattttctcaagtgatatgtttttattgcttgcttttttattttttctagatctgttttaagtttttgctttgagtgtactgtgaggcttgcaaataacatcttgtaacccattatattaaacagatgacaacactgattgcataaacaattaaactaataaaaacactatacttttcatacccctgctttttaactttttgttgtttctgtttatatcatactatctatgtcttgaaaagttgtggttattatttttgatagattcattgtttagtctttccactcaagatatgagtagtttacatactacaatagtgttatgatattctttatttttctgtgtacttactattaccagtaagttttctactttcagatagttttttattactcattaacatccttttctttcagattgaagaaagaatcctttagcatttcttgcaggatagttctggtgttttgtttgtctgggaaagtctttatttctcctaaatatacatgtttgaaggatattttcactggatatactattgtaggttagaagattttttttccttgagtactttaaatatgtaatatcactctctcctggcttgtaagatttccactgaaacatctgctgccatacattttggagatctttgttatttcttttctcttgctgcttttaggatcctttctttatctttgacctttgggagttcattaaatgccatgagatagtcttatttgggttaaatctgcttagtgttctattaccttcctgtacttaaatattgatatctttctctaggttttggaagttttctgttatccctttgaattaacttttctctctctctctctgcctcctctttaaggccaataactcttagattgcccttttgaggctattttgtagattctgcaggcatgcttcattgttttgtattcttttctcttttgtctcctctgactgtgtattttcaaacagcttgtcttcaagctcactaattctttgttttgcttatttctgctattaacagactctgatgcattcttcagtaggccagctgcatttttcagctccagaatctctgcttgattctttatatctccctctcttcattagatttgtctaatacaactctgaactccttctctgtgttatcttggattccactgagcttcttcaaaacagctattttgaattccctttctgaaagctcacatatctctctctctctccaggattggctacaggtgacttagtttggtgaggtcatgtttttctggaaggtcttgatgctttgggtgtttgtcagtgtctgggttttgaagagttaggtattcactgtagtcttttcagtctgggcttgtttctgcctatccttgggaaggctttccaggtatttgaagggacatgggtgtagtcatctaagtttttggtcactttacccgtttctactttaggggtgccccaagcccaataacactgtggctattgcaggcttgtacagataccaccgtggtggtcttgggtaacttccagaagaattccctggattaccaggcagagactcttgttctcatcccttacttccctccaaacagatgaaatctgtctctgtctctctgtctctctcccctctcctctctctttctttctctctctctctctctctctccagagctgcctgaagctgtgggaggggtgacacaagcactcctgtggccaccgccactgggactatattgggtcagaaatgaagccagcctaacactgggtctcacccaaggcctacaacaattactgcctggctaccacctatgttaactcaagtcccaagggttctgcaataagtatatgggaaatcctgccaggcttgtgtccttcccttcagggcagtaagttctctctggctctggtcaggtccagagatgttttctgggagtcacggcctggagttgggaaatttagaaatctacttggtgctctattctaccgcagctaagctggcacccaaaccataagacaaagtcctttctgcccttccctctcctttcctcaagcagaggaatctctctgaccaccactgctccgggcacatggagagtattgcctggctaccaatgacattcactcgaggtccaagggctcttcagtgagcttgtggtgaatgctgccagtcctgagtctctctcctcagggaagttgtctttcctctggcccaggacaggtccaggaatgtcattcaggagccaaatcctgaaatcagagatcctaggagcccacttgatcctctgccatactgtggccaaactggtacccaagcggcaagataaagtcctctttacttttccctctcttttcctcaagcagaagggatctctccctgtagccaccacagctgggaatgtgctgttcacaactgaagccagcagggctctgagtctcactcaaggcctgcagcaagtactgcttggctatcactgctgattattcagggcccagtgctcttcggttagcaggtgatgcactctgcaagaactgagtccctcccttcattcaaggcagcaggttctcttccagctcagggtatgtttagaaacgctgtctggaagccaaggcctagaacagaggcctcaggactctgcctggtgccctatgctactatggctgaactagtatccaagttgcaaaacaatatcctctttactctctcctctcctcttctgaaacaaagggaagaaggagctgcctggagctgtgagctgtgttgcctagagttagtggggagcagctcaagcactcccttcaccagctgatatcttcttaggtcatgtgtaccccaggtccactggttctgagctcagtacaggaccaggactttccttgcagtccttgtggcctagactgcctttcaagtttatttagaacttcagagcactttagcctgtggtggtggagcttgccggaactcaggttctgaccattggcatggacaatttgcctctggctagggctggtctaaatgctccctccttgggaacctgctgagttcttcctggtgttgctttctactgtgacagggcaacactgagttacaatacaaagtcccacaatcactgcactctccttcccccaagcacaaagattctttctccacgtctcatggactgtgcaggagaatggcggaatggtgacatcaaccattcaagactgtcttttctaccctcttcagtgcctctttccttaatatactgttaaaaccagatactgcaatcacccacctggtcttttgttcttatgaaggtacttttttgtatgtacagttgttcaatttggtgtttctgccggggaacaaccactgcaggcttcaatttggccatcttgctctgtcttccccctgccaccccacccctctcacattcttgaaatgagtaaaaagccttcacgctaagcatggccatggaatcttcccatgttgaactgtaagatgaacagagtcatatttcaaataaagagattaggctgacatgaatgatcatatttttaataacttattaacctaattgcatgccacaattacatagtgagttttcatcttttaaatcaattttggggtgagggatgaaatactacctattgggtacaatgttcactattcaagtgatgggtacacttaaagcccagacatcaccactacacaatatatccacgtaacgtaactgcactagtagctctcagtctacttttttgttaaaaaaaaaaaagagcaaaaacaacagcaagaggaaagatatatatttaagaaaaaagcatttcaatgaggcaaaaacaactggttcatccttaggtccttaggcccatttattacttcgaactgtatgcccacttttttattttataaaggtttgcatgtcttcaaactacatgcccaccttcattttgcaaagtattgtacaatgctgtatttttttttttttttttgagacgaagtcttgctttgttgcccaggctggagtgcagtggcgtgatctcggctcactgcaagctccacttcccaggttcacgccattctcctgcctcagcctaccgagtagctgggactacaggcacctgccacctcgccgggctaatttttttgtgtttgtagtagagacagggtttcatcatgttagccaggatggtctcgatctcctgacctcatgatccgcccgtctcggcctcccaaagggctgggattacaggcatgagccatgtacaatgctgttttaaaagcagcgctcgtctttgctgcctttcaactttacatgctttggtttctcatagagaaaataaaaattgtttttaatccttaaagaacttctgacaggagagaaaaatgacttgtgtgtcccaaagcccccaatcccaaagacatctaagcaaaaccaagttgggggtgggggtggagaatttaaatagcagtaattatcgtatctcaatttgcaagaaaaacaaatgcctcaaataccattattcatttaagttttctgacaacctgacatttatctcctttagtgctatattatagaaatgtttcttattatattcattttccagagactgagaacttttaaaaccaatgaaatgcatgtcccagagttgatcctttgctttaaaaaaaagtttgaaaaaggaaaagctattatgttgattacaaaccgaagtgagttacagtaaatgatgcaaagaaattttgacaaataggtatatgcacttgaaagtggtactactctgctctcaaggtgttgctgttaagatatgaaccaacgctgaaaactccatatccacagatagctggcttcttcgataaaattcaattcaaatcaaagagtaattaaagcacttaatttgcatgagcactgttccaagattaactaaagggctgaggggagctggaggtggggagctcaattaagaacctattcaacatatttcaagagagagggacaatctgaatttaggatatggatgtggaaatagaaaggggaatgtgagagacattatcaagagagaataaatacaatgtgaagagacaacctgggagaagggagaaaaatattgccaggcttaaaatacatgacaatgaaaaggccattaaccaatagggctaactacaaaggtggtgctttggtggcaaaaaattttctttggaaatactgatttgaggtacttgcacatgaaaacttaacctcagctgggcgcagtggctcacgcctgtaatcctagcactttgggaggcaaaggttggtagattgcctcagctcaggagttcgagaccagcctgggcaacacagtgaaaccccgtctctactaaaatacaataaaaattagccaggcgtggcagcatgcacctgtatagtcccagctactcaggaggccgaggcaggagaattacttgaacccgggaggaggaggttgcagtgagctgagatcacgccattgcactctggcctgggtgacagagcgagactccatttccaaaaaaaaaagaaaaaaagaaaacctaacctcacagagaattgtacctggagatgtatgggggaaagacacattattttggaaacatttaaagaacctcatactcagaactagaaaaaaagacatcttcataaattctgatgcatttttcatcctaataccagcagtgacacaatcaggacagggaatgtgtctgcttacccagcaatcaaggaagatgaaggagatgaagcagacagagggcagggagggtcaaccctgactgcaccagcaccaaaggctagagtttcttctggtatagcaaagcctaaataattttcttcattaagcttattttttcatccatgggaaaaggaacatgtgttcatattacattaacttgaaaaattcagaattaatgaaaaaataagcctcagaatcttaaatcaactgaatatagcaacagagaatagatgaagccccaaagggcttctgtcacactcatatataataaaaacaccagtcatgtttacagttcaattttatagagctaaattgatgagtagttttggagtgttctagaaattctacaatattcattttttattgcagtttttgaatttattaataattaggcaagaaatcattaactacattttcaaaacagtagaagtaaagcttaggaggctcattttcacaaatgtattattttcaacacaatacaattttttttttttttgagatggagtttcgctcttatcacccaggctggagtgcagtggcacaatctcggctcaccacaacctctgcctcccgggttcaagagattctcctgcctcagcctcccgagtagctgggattacaggcgcctgccaccacacccagctacttttgtatttttagtagagacgaggtttctccatgttgctcaggctgttctcaaactcctgacctaacctgatctgcccacctcagcctctcagagtgctgggattacaggcgtgagccaccgcacctggccaacacaatacaattccaatttttaaatagtactacttaaatcacaaatacaactgactgttattaatacaatgaaccaggttgagttatctgccattacttactttagaacttagctcatgtcagaaatatacaaaatactcctttgatataaacagatagcttgggggaaaacgaaaaactcttattagaattactactagttgctgtagcaactgtcgaagtgttttactatgtgccaggcactgggccagagactctttgttcatctctttaatcttcactacatttctataaagtaggtatcttgagatgtccattgtactgaaaaggagacaaagcaaaggttaggggagttaagtaactcagtaacttaaatgtttttctcccttagctgaaatgatgcatgccacaggtttgaaaaacattctttccctattcaatcatttatttaagtgataaacattaatctcaacataaacagaaaatagattgaatactgtgattattactttgaaaccaaagctccatctttagagaaactcatactggcaaagcaaacaaggactgatgaattggaggtgcacttgtgcgcttaaaactgcagcagctgatgtaggcactggaggggctacaacccagggacccaggtagtttgcagaaattcacaaggtgcagggtatcagttttgtcatcactttgatacctgtcaacttcatgggcctgggccaatcagccaacttgctcaaacctcacgtttctttcatgtaaatacaggttaagcacccctacaccaaatacccaatatctgaaatgctcccaaatctgacacttcttgagtgctgagctgacgccacaagtggaaaattccacccctgacctcatgtgatgggtcataatcaaaatgcagttgcataacacagtttattaagagtctccaaggggaaaaaggcccttccagtccccttcagcgtatcttttccactcatgcccagatttccctacacaagcatgccacaaagtattgtgtattatgtgggaaataacacacagggaacttggcacaagaactggcatacaattcccgaaatagtagagctgtcatcatcattactggtttttatagtaactgtgaccccaaagagttaatagaagtgagatagtagaaaaactgatggctgtgcagtcacagaaatcttccaagtctacatctctcattgaggagatatgcaccatttgcaaagttatttaacgtacctgagcctcagtgtccctgagtgtaaaatataaataaaaatatttccctggtatgagacagaaaaatagagctaatgtgtcaaaagtaccacatggagagactggaacacaggaagttcctattactgttagtatgaaggcgctttaagaactcaaactaggcaacaggtacaggccacagggggaataaacgcaaacgtccagttaaaaccaaatccagacataagagaaactttatttgaaaaagtaactgctataaggggagtgagactactgcaatagggagagctctggtcatgagatgtgcaagtagctcaacgattgggcagaaaggaattttcttttatagggaggggtaagcaaggctagaaagatcagctgggagcactgactagggaaagcttctcctgaaggtcagctggttctcaggaggggtattcaaggagaggctgctctgcatcccaatgctgaaggcatggtcaaagttcaagggcctagggagcgagacacacctgactgaagtttggttgattatttgggcactgggtataaacaaatcagctgaccatttataaggcgcagaacgggaatgtgaaaactcagcttctggccttgtcggaggtacttaagtgagcatcatttggtctcgtcctggacacccggggaaggattttttttttttttaagaagccttttccagaagacaaagggtgggggatttcttcacctagtgctattttccaaaatacttggctcaggtaaagctcaacattaccataaacagaacaaactatatatatatatatgtatggtttgtatatgtttaagtacgtatatacagtttcgtttacatgcatatgctgaatatagttcagtacttttaagcaaagtattataatatcatattcaaacaatcaccacctttttttcctacaaaaataagcaatgaattaaaagcaagtctgtcattaacccacggtgaggaaggaggaacaattttaactacctgaggtcttcaaaatggatttttttttttcagttcttattctaatgcaatttcctggtcagaatctttttatacataaccttgaatataacaaaaaccaggaaaatggcttgtacacaaaatgaaggctactaagagcatgagaaaatatttcattcttttcctttgatcatctacttttcttttgagagagatgcagagagaggatttgagtgtttatgcctgcctttggatttcttttgctgggttttctattaagtcttctctgacatcattactagcttatgcatactgaatgtgtactctcttgccaggcatcacactaaccacactatgtaataatttctatagatctccacacagctcagtgagaacagtgctactgttaaaaagtttcatattaatgtctgcattttagatctactgcaaataatcacatattatttttctggtagatgaatttcatgccaaaagattaacttaaccttttatatacatatgtaaacaatcggtataggcatgtagatataaacatgtatagaacacaaacttgcatttgtctcaggaatcaggtagagaccatagtaaacatttttatcttggaaggagggcagagagctcatcatcatcaattcagaacctataatgattttacccaaacttctctaatatgatagggagcaacactttttcaccctgttcatagtacgaatgaaaggtgaattatcttggtctagtttgagttctgcttgctcacccctggaaggagaaagtgcataccatagagaagcgtggagattctttgctgggtaataggaaattggtcttcacagcagaaaataataattgcaacaaaagtactaacaaaaataataacaacaattagagcaacaataaaaactacagcattgacatactgattgctcataatatgccaggcactggataagcgccctatttcactaccaaacataattcttccaataatcagcagtaaccttatgcatcccacttacagatgaagaaatgagacaaaggaagttcacacagctaccaaaattgggaaccaggaattaacctcaggcagtgtgactgcacagccagggcccttccaaacaattggttaactaacctgggtcttttgctggccaatgtatcggggaataatcctagccaacaaattcaagggaaacggaatcaagcaaatatgaatgaacttcatttactgaaaacaaagtaggctttgataggactgtgttaccatctctagacctaactatgattatgtcatttcttagtgcctcttgcggcaaagaaagtgcactttacataaaaaaacaatagaatgcatctggcagaagtatgagaagagtaacgatcatggtgatggtggtgatgatgatgatgatgacagcttcaagagcagcagggtaaggatgccactaaaatcaccaccatttatgtgccaggcattatgatacagtcattacatataacctttttctcccactatattgcatgctgcttcacttaccttgtaaaacattttagacataaaaggtgctccatttttttgcacaaatgaacaaatacatgaaataaaagtatgttgaaggcacagaaaaagtattcataaaagacaaactcaaaattcccaatgacacagagagtataatcacaccacatatcaaatccaagccacatagcacagagtgtgctattgaaatgaaacgcaatataactattgctctgggaattacagatgggatccagtaaaagacactgtattaattatattgttttccatggaacttttctaaggttgcccaggacagcaacactgtagaacattcatgatgaaactgtcaaagaggactagacttgaggggccttagggagaaaagagatttgaaaataatgtactgcttgcccatggttcagacgtgcctttctctgcaagtatgatcacattattgattctcaaaggaagaaagaaaatatgactttgtcccttaactgacatcaaagttacagtgttatgcagtgatgcccaaaagcatttgcaaatattcagaaacaaagttttgagtgtcctaggagatgactatcataccaattgatccaaaacacaatggtcaagaggcatggaaaacctatggttggggagggagaggaagggtcataaatatatacagtcatgcaccacgtaatgacattttagtcaatttactggatatatgatggtggtcctataagattataatgtatctggaaaattcctattgcttagtgacatcctagctgtcttaatgacatagcacaagacattacttatgtgtttgcagtgatgctggtataaatgaacctgtgctgccagtcatataaaagtattgcatattaggtacagcaggggtccccaaccccctggctgcagatcagtgcccatctgtggcctgttagtacagtgggaggtgagcagtgggtgagtgagcattactgcctgagctctacctcctgtcagatcagagtcggtattagattctgatagaagcatgaaccctattgtgaattgcacatgcgagggatctaggttgcatgctccttatgagaatctaactaatgcctgaatatctgaggtaaaacagtttcattccaaaactgtccatcccccatgacccctgtctgttgaataattgtcttccatgaaaccagtccctggtgccaaaaaggttgggggctactgacgtaaagtacataatacttgataatgataatacgtggctatactggttgatgttgtattagtccattttcacaatgcaataaagatattaccagagactgggtactttatgaagagaagaggcttaattgactcacagttccacatggttggggaggcctcaggaaacttacaatcacggcagaaggcaaagagaaagcaaggtatgtctcccacagtggcaggagagaaagagagagaaaaccagcaggggagagtccggagacttatcaaataaccacatctcatgagaactccctcactatcatgagaacagcatgggggaaactgatccaatcacctctctccaggtctctccctcaacatctggggattacaattcaagaggagatttgaatggcaagacagccaaaccaaatcattccagtgctggtccctctcaaatctcatgtcctttgcacatttcaaaaggcaatcatgccttcccaacagttccccaaagtcttaactcattctagcattaacacaaaagttcacatccaaaatctcatctaagacaaggcaagtcccttccacttaggaacctgtaaactcaaaaacaagttagttacttacaagatacaatggggatatacaggcattgggtaaatgttcccattacaaatgagagaaattggccaaaactaaggggacacaggtcccatgcaaatccgaaacccagtgaggcagtcattaaatcttaaagctccaaaatgatctcctctgactccatggatcaaatccagggcatgctcatgcaggaagagggatcccagggccttgggcagctctacctctctgactctgcagggtacacccctctcccccaactccccaacggctgctttcacagctgtcgttgagtgtctttggcttttccaggtgcacagtgcaagctgttggtggatctaccattctggggtctagaggatggtggccctcttctcacagctccactaggcagtgccccagtggggactctgtgtggggactctgtttgggggtgccaaccccacatttcccctttgtactgccctagcagaggttttccatgagggctctgcccctgcagtagaattccgcctggacatccaggcatttccatacatccttttatatctaggtggaaattcccaaagagttccacaagactagagaaaaaagaatgaagaggagtgaacaaaacctccaagaaatatgggacttcataaaaagactgaatctacaactgattggagtacctgaaggggatgggaagaacggaaacaagctggaaaacacacttcaggatattatccaggagagcttccccaacctagcaagacagaccaacatgcaaattcagaaaattcagagaacaccactaagatactccagaagaagagcaaccccaagacacataatcatcagattctccaaggttgaaatgaaggaaagaatgttaagggcagccagagagaaaggccaggtcaccaacaaagggaatcccatgagactaacagtggacctctcagcagaaactctacatgccagaagagactgggggccaatattcagcattcttaaagagaagaattttcaacccagaatttcatatccagccaaactaaacttcataagcataagagaaataaaatcctttccagacaagcaaatgctgagggatttcatcaccaccaggcctgccttgcatgagattctgaaagaagcactaaataaggaaaggagaaacaagtaccagctgctgcaaaaacacaccaaaatataaagaacaatggcactatgaagaaattgcatcaaatagtatgcaaaataactagatagcatcatcatgacaggatcaaattcacacataacaatacgaaccttaaatgtaaatgggttaaatgcgccaattaaaagacacagactggcaaattggataaagagtcaagacccatcagtgtgctgtgttcaggagacccatctcacacacaaagacacaaatagactcaaaataaaggaatggaggaaaatttaccaagcaaatagaaagcaaaagaaagcagagcttgcagtcctagtctctgacaaaacaaactttaaaccaacaaagatcaaaaaagacaaagaaggttattacataatggtaaagggaacaattgaacaaggagagctaagtattctaaatatgtatgcaaccaatacagaagcactgagattcataaaacaagttcttacagacctacaaagagacttagactcccacacaataatagtgggagactttaacaccatactgttaatattagatcaacaagacagaaaattaatgaggatattcaggacataaactcagctctggagggctctggatcaagcggacctaatagacagctacagaactccctaccccaacgcaacagaatacacattcttctcagttccacgtggcattattctaaaatcgaccacataatttgaagtaaaacactcctcagcaaatgcaaaagaactgaaatcataacagtctctaggaccacagtgcaatcaaattagaactcatgattaagaaactcactcaaaaccacacaattacatggaaattgaacaacatgatcctgagtgaatcctgggtaaataatggaattaaggcggaaatcaagaagttctttgaaaccaatgagaacaaagagacaacatatcagaatctccgggacacagagtgtcccagtgttaagaggaaaatttgtagcactaaatgctcacatcagaaagctagaaagatctcaaatcaacaccctaacatcacaattaaaagagctagagaggcaagagaaaaaaatccaaaagccagcagaagacaagaaataactaagatcagagcagaactgaaggagatagagacacaaaaaaccctccaaaaataaaataaatgaagacaagagctggttttcttgaaaaaaataaaaaatagacagcaagctagattaataaagaagaaaagagagaagaatcaaatacacacaataaaaaaatgataatagggatatcaccactgacaccacagaaatacaaactaccataagtgaatactataaacacctctatgcaaacaaactagaaaatctagaagaaatggataaattctgggacacataccccctcccaagactaaaccaggaaggagttgaatccttgaacagaccaataataagttctgaaattgaggcagtaattaacagtctactgaccaaaaaaagcccaaggccacatggattcacagccaaattctaccagaggtacaaagaggaactggtgtcattccttctgaaactattccaaacagttgaaaagcagggactcctccctaagtcattttatgaagccagcatcaccctgatgccaaaaccaggaggagacacagtgaaaaaagaaactgtaggccaatatccctgatgagcatcaatgcgaaaatcctctgtaaaatactggcaaaccaaatctagcagcacatcaaaaaacttatccaccacgatcaagtcagcttcattcctgggattcaatggtggttcaacatacgcaactcaataaacgtaatctatcacataaacagaaccaaagacaaaaaccacatgattatctcaatagatgcagaaaaagcctttgataatattcaacatcccttcgtgttaaaaactgtcaataaagtaggttttgatgggacatatctcaaaataataagagctacttatgaaaaacccatagctaatatcatattgaatgggtaaaacctggaagcattctctttaaaaactgatacaaacaaggacaccctctctcaccactcctattcaacatagtattgaaagttctggccagggcaatcaggcaagagaaagaaataaagagtattcgcataggaagagaggaagttaaattgtctctgtttagagattacatgattttatttttagaaaaccccatcatctcagcccccaaactccttaaactgataagcaatttcagtaaagtctcaggatacaaaatcaatgtgcaaaaatcacaagcattcctttacaccaacaatagacaagcagagagccaaatcatgaatgaactcccattcacaattgctacaaagagaataaatacctaggaaaacagctaacaggggatgtgaaggacctcttcaaggagaactacaaaccactgctcaaggaaataagagaaaacaaattggacaaccttccatcctcatggatagaaggaatcagtatcatgaaaatggccatactgcccaaagtaatttacagattcaatgttattctcaaactactattgacatccctcacaaaattagaaaacactactttaaatttcatatggaatctatgaagacctctgtatagccaagacaatcctaagcaaaaagaataaagctggaggtatcaggctacctggcttcaaactatactacaaggctacagtaaccaaaacagcatggtactggtatcaaaacagagatatagaccaatggaacagaacagaggcctcagaaataaaaccactcatctataaccatctgatcttcaacaaacctgacaaaaacaagcaatggggaaaggatttcttattcaataaatggttctgggaaaactggctagccatatgcagaaaactgaaactggaccccttccttacaccttatacaaaaattaactcaagatggattaaagacttaaatgtaaaacccaaaactataaaaaccgtagaacaaaacctaggcaataccattgggcaaagacttcatgacgaaaatgccaaaagcaattgcaacaaaggtcaaaattgacaaatgggatctaactaaactaaagagcttctgtacagctaaagaaactatcatcagagtgaacaggcaatctacagaatgggagaaaatttttgcaatctacgcatctgacaaatgtctaatatccagaacttacaaggaacttaaacaaatttacaagaaaaaaacaaccccatcaaaaagtgggcaaaggatatgaacagacatttcttaaaaggagacatttacataaccaacaaacatatgaaaaaaagctcaacatcactgatcatcagagaaatgcaaatcaaaaccataatgagataccatctgaagtcagtcagaatggtgagtactgaaaaaccaagaaacaacagatgctggtgaggctgtggagaaattagaatgcttttacactgttggtgggaatgtaaattaattcaacctctgtgggaagacagtatagtgattcctcaaggatctagaacagaaataccacttgacccagcaatcccattaccaggtatatgcccaaaagaatataaatcattctactataaagacacatgcacacttatgtttagtgcagcgtcatttacaatagcaaagactcagaaccaactcaaatgcccatcaatgatagactggataaagaaaacgtggtgcatatacaccatggaatactatgcagacatataaaggaatgagatcatgtcctttgcagggacatggaagaagctggaagccatcatcctcagcaaactaacaaagaacagaaaaccaaacaccacatgttctcactcataagtgggagctgaacaatgagaatacatggacacagggaggggaacaacacacaccaaggcctgttgggggtggggggcaaggggagggaacttagacaacaggtcaataggtgcagcaaaccaccatggcacacgtatacctatgtaacaaacctgcatgttctgcacgtgtatcctggaatctaaagtaaaattttttttaaataaagaaatggacaactctctagaatcaaacaccttgaaattccttgaataattaaggacccacggattgttcatcttttcatatacagaccccaacctataattactaattactaattgcagtgagatcagagaaaaaataaatgaaaagtctactttggagtcaaagatatggttatttcaaagaacagtttccctatcaatagtcatttgtctaagactatattgatcagcatgaagtggcacattatagaagacacttctgcacacctgttacagaaaagcctcctcacaatgcctatttctactaactaatctatgctgtccactctaataggaactgaaaaagacaccatttcctcaatttgatagaggatacagtaaatatttacacaacacttaaaatgagagagtatataaacaataatagaaaacaggtaattcagggctagaatttccaataaaaaattttattttgtttttgttttttaattagaggaagagaaagatcaagccatatgtcagatgtacttcattcttttttcacaaaagcattatctagtcataaaatagaggatcacaaaaagagctgaactgatcataaaaagtctgtatttcctgtgcactacaaacaaccataatcccttgaacaattccccaaagctcctaacatcaaacattaatcagtcagtttaggatccatcagcaaatttaggatacctccaaaggggcctgacaggttaggcaaagaaagcattgcataccatcagttctttcactgatagctaaagatctataggtcagagaagggcaggctctgatgtctcctccattaattattgaaggtaatattccagatgctagtaaatcttaataacttcaaatatcagcttcaaagatgtacttttgatgaacaaagccaaaacacttctccttatcaaaaagacatgttataatgcatattttatctttcaacggatatcctctcaccaataaacgtgatctttgatccaaaaattcttagtaatgccactaaaatttctcaaaacaaagtcagtttaaacgtgcttcagttaaaaccactgccctattgctctaaaagaaacattacaaaatgcaactacagactgtcaatttttcaacaactttgggagtgactgtttagacactgtcaaatgatttctaagcaaccctgccacaagcagactggcttgctataaacacaaggtgtaggatacataagaactaatatttgttaaggaatttctgtgtgccagactcttggctgatctctttgggtttgattgaatcgaatagtcatcacaatctgcagaaaggtttggtgacttgatcgcaagaacctggctagtaagggactgagtaagagacttcactaggcaagttaaagtgctgctctacactcccattgctgtctctgtacccagcacgtgggcacaaatgtaagagcctcgtgaaggaaagcataagcaagaacacactgagcagctctaggaagctccttaaggtagaatgagaaacttactcaggcaggctcctgcagttgcacaattatcattcttcttaagtgtgattactgctcaaagtcagaaacatcaaatgtggaaatattatccaagtaggggatccatccatgaaagcaacaattgagagacttctacattctgctctacgacacctggaaggctcatctccgaagtcacattctttcaagatggtttgaacaaaatgcagatctttggtgcagcaattaataggtacagttatgtatacttcaacaggctgaatgtaatctatcttgaacttgcctttcaattactccgtgcttggagcttcctgcagtgcctgactatctcaaagttgctaacgcagggaaataagcctatcagaaattcaaaacacttcatcatcacattttaatcatacaaaatagtaagtcctgagtttagctcattccttgacaagtcagagatgatgaagtctttaatgctcacctatttatacagcaatctttcctcctaattccgtctatcctattctgttatctcaaagatataaccaggtgacagagttcaagttcattaccaagagaatgtatttctccagccaaagcaaatagaatttcgatgaaacttctaagtacctgttataaatgccaagtattaaaggttctttattcagctatttacaagaccatctgtgaagccaacattctgtgatccaaatgcagatgttctatgaaggaaggcaaggctaaaaaagaaaatcctgacaaggcccgtgcagctacttaaagcataaagggaagtgcaatggtcttacgatttaaatataaacctttgttaaatgatgaggaaaccacagcagcagggacctgctaaacaatcactcgactcctgtgattgagctaaaagattatatttgagatgctcggtccatcgacatatttactgagcccctgttatgttcctagtgtgttccaggcaccatagcattattgtaggcctggctcatgtatgctgtgatttggtgtttaccttcgattctgaagtttagaaaacctcttaacagggcttcaagatacttttctcttgtatctgattccaagtaaccctgtatttactcaaccaacagtcactgtaggactattcagaagtcatgttaagtaaaaggtgggttacctagaagctgacagtgtcactggagcggggtcttgaggatctagacattggttctgtggttgcttagaaaggtctgggggccatgagggagggcctatgacagcagggtaggggatattctcagagcaatagctatgtacaatagaaatatttcaatcttttaattaccagtgtgactaaacagaacctcagcagtcctatgttgcctagtatacataaatatttaagtccaagccctatattcaggcagctctccagctaaataatatgctatagaattatctaactttctctatcaagttcaatagattgagagaaagaccagttatctaacagccagaaggaaaatcaagataaaaacttggtgttaagtttttatgtaaaacatgaaactataatattttgctgaataatttcaatgactgcaaatgaacaaaatctattccaccttttggaatcccttttcagttttaattcatatattccacactttctgctacagagatttccatcatgggtcaaggattgaaccagatgatgtccaatgagttgggatttccaagagagaccatgagcagtgctaaaaagtagacattttgtcacaatatttaataaatagcattcattagaaaaatattatccccctttaagcaaatactattattatttctctctataatagaaacagagttctaacataatagtacctattcgttttactcagaggcatcaatcctaattggaaatttttaaaaatccagctcaagttgcaattcacagaggtggcaaatctcctttagagggcacagaaatgtacatatgatctcattttaaaatgtgtgtgtatactttttatttctgagaaagcaacaaaatcctggcttccaataatgtccaacttaatggagcataacttaaactccttttaacaaagtttaaatttttaaaagcccactgaattaaagacatcatgactaagaccaagctggagtgctctagaatctagcttacaactgtttggcctaaggagcctatagcattgaccctgcatacattaaagccacctgtgctcaagtccacttatcactcacacctgcttacaccatgctactgctcactacaataccaataagaacatctgcctgctttagataaagattctctgcacatctaaattagaataacaagtttttgaactattattgcaaaagaaacagcagtcaatgtggtaatttttggggatctctgcctaggtttcattaggctcaccctaatgtctttttcagttttggcaggagggcctgtgcctgttttcatagccaaaagactgccatactcacaaatggccaaaaagtatgaagaaatccttcaagtttcccaggcactgaacaggaggctccaaaccaagtcatctgcttggagtttttattactccaagttctgttataaactgtacctcagtgctcttcatgtacgacatgacaggcaggaaatcatccttacagctttcacatttaacaaggctacttttgaccaaaatgagcaatgaatttcaaaatacagggacatggcaaagtgctgtaactcggaattaaacaaatcaacaccaagaaacaatattctactagcaattcggtaatcacaggcaaagatgataaatatccataatgtttttataagccacaaacatggtttaatctaatcttacactgtttgtgtttataaagccaagacaagggtgatcatctaatattttcataacatctagtagaaggtagttaaaaagatgttacattagacatcgttactgcttcaaaataaactctcaccttagttaacaaaatgtgttatgggttctgtgcacatctgttataggtaccacagagacactatagctactgaactcgtatgtgtgctagacattccattttgctttttaaaaaatatataacaacctattatttatttaccataattatctccattttacaaaagtgagaaggcttaaatttattttccccaatccaaaactgtaactactccagcccaggtgtctcttttaaacctcttgctccgtctccacagacttcaacatggaggaaattcaggggataaactatatccaaagcagcctcaaagattcaggcagtaatttcattatcatgtcttacttgatttgtaccaaaaaaaaaaaaaaaagattagatttcagtttcacgtcttctgtctcttactaattcaggtactaaaaacagttggtatttactgagtgcttattttgctctaagcccttcacatgatttaacaaattcccaaaacaaccctacagggtagatagtagcatcatgctactttgcaggtgaggatacaggtataaagatgttaagtaacttgcacaggtagccaatttgggcccctaactaaggcagtctggtcgatgctttgacctttgtgctacctttcctctacctctgaagacaaaaggtaattgcaaaataaaagtatgatatgctgagaagcaaataaactagatctggtaacccaaaaagtatatgttgcactcaagccctccttgcagtaccaaacccacaaaaccaaatggtgctgagttgtgcattagaaacaggttaaaagacctattaaataagctcagatctgaaaggtaaacaataagctactgaaatatgatttttattaagcaatagcaaacaagtctatttacatttcaagaaagaaatggcaataattcattagcaagacaaaatagagtcaaccaaaccgatgtagtttctctctccacacacccactcccttacacacatactagcagccctatgaaaaacagggttataatagaaatgctgacacaaccaaccttataatgtttcatacgaaaagctacaattatattttctaattgtaaactgggtgaaaaaaaaaaggccaaccagaacaaaaacataataactacctagaaacagtccatcagaattcttggattatgaaaaatgcatataaaacactattatcttcagccacagccagaagatgtcagacaatcaattcatataacatgccagcttaataaaatctgcatacaaaatttatgaatgcagtaatattcctttatatcacaagttattaatggtcaatttaatgaacatctacagctggagtgctttcgttctgtatgatattttaatcatttttagccatggatttaaacgcatttcattttataaccatcagctagtgaagataagaaaacctttacacaaataactgaaatatttggggtaggccaccaattttgtctttatgttgttatttatttccttaaatttttttttacaacagaaacacaatgaaatgttccattataacaatatttgatttaatatttgtatttagaatatgaaaagtttgcttaaagtagcattacatgtttggctagcataaaatcttccatttcatttcaaataaagaactttctaacctcgtttatgtgaaacaatctcgctcagagctattatcctccaaaaactatcctggtggaatgttgacatctcggacataaatattcttgaaaattaatgtgttgtatttcttaagtatcctatttccactcacttgttcacataatctttaaaaatcctattgtgttcaagtctacttttcccacagattctttactaaaactaaattttactatatgatgcttatgtggaaggaacaggcaacataactgcaagacaacagtagctatctgaaaatacaaacattcagcatttaaaatattgatgtctttctgtggtcacaaagtcaaataattgtttctcacatttgagcattagaatttggtatttaaaattacactcatccttcagagttaattgaaagatttggatatataggaaaaaggttaagaaatctaggtcataaatacttcttaaggtgcaagaattggcttcataaactagtaaatgtgcaataatcactattaaagaatgaaagatggcattttttttttttttttgagatggagtctcactctgttgcccaggctggagtgcaatggtgtgatctcggctcactgcaaccgccacctcccaggttcaagcgattcgcctgcctcagtctcccaagtaattgagattacaggcgcccaccatcatgcctggctaatttttgtatttttagtagagacggggtttctccatgttggtcaggctggtcttgaactcctgacctcaggtgatccacccgcctctctcccaatgacagcaattttttagtttgactgtctatagccttataggacattacaggtgaaaatcagtaaaagccatgtgcacaaaagatttagtgcattcatgtgtctttattcattcactctatcttctgttgcttcactggttccttttgggcttcctactatgtgccagttaatctttatttgctctgggcgagtaactcccattcttaaagacctaataaaacaggacacagtacatgtatacccactaattataaaacagcgtagaattgatggataagtgccaaggagaaatacaaatcaagaattcagagaaaatggttcttacttgtcgagaaaagggcaagggaagactttataaaggtcaactggaatttagaggagtaaaagaaataagggtatttttgggtaaagggcacaacatgaaattgacttaaggacaatacacacaaggacaaaaagtgcctatgacgtgagttttaagtttaaaatacagactttcaacaatgcttaaatctgtagatggtaggcattttccaaattcctctaataagtagaatcagcctatatccaaggaagatcataactcattaaatttcattttaaccttcctgaatctgcctaaattttctcatcttatcaggcaagccaatatatgcttacactgtgaggttaaagaaatgaacctgtgaagagaacctgtcaaatcaaattatcaacaagcaatagtcccactattggggaatatataagctgcaatgtcaattttaaagaagtgtgcttacatttgcattttaattaggtcacaccttcaacatcatgatattaatttcagtttaatgctctattttattgccatttccaaaatgacatttttagacatggacataaagaaaaaaatctctacttttgttttgacaacccataaatattgcaaattgaaacaatgttgaacaaagttcaatatttggaatattcaaacgagagatacgactgtgtctaaaattctaaatacttagaattggatttcaaaaatattccaagggaaaattattagattctcatttaagagcataatggagtgttgaatggaacataaaattcaggttcctgtgagtcaccagaagctaaatatgaatagctcagaaaaaatcattttggttaagactttgcattagaattgagacatgctttgtagttttttcagatcaagagggaggtagacaaattacagaatgtatctttgtccattaataaatgacatatactcaaatacataaagttgtaataacattcacataacaaaattcatcaatcattttaaagtgtaaaattcagtggcattttgtacattcacaatgtcatgcaactttcaccatatctgtttccagaatgttttcatcatcccaaaagaaaactctgtggccattacagccattctacattccccactacccactcctaacccctggtaccactaatctgctacctctatgactttgccaattctggatatttcacataaattgtatcacataatatgcgacttttagtgtatagttttaatttttatttttgtaggtacatagttgtatatatttatggggtacatgacatgttttgatacagacatgcaatgtgtaataatcacatcatgtaaaatggggtatccatcccctcaagcatttatcctttgtgttacaaacaatcaaattatactcttagttatttcaaaatgtacaattaaatcattattgactacagtcactccgttgcgctatcaaatactaggtcttattcatgttttctatttttttgtactcattaaccatacccacacctccctgcccaccacctgtcaactatccttcccagcttctggtaatactccttctacttactacctctattagttgaattgtttcgatttttagatcctacaaataagtgagaacatacagtatttgtctttctaggcctgacttatttcacttcgcagaatgacctccagttccattcatgttgttgcaaatgacatgatctcattcttttttgtggataaatagtactccattgtgattaagtaccacattttttaaatccattcctctgccgatggacacttaggttgcttccaaatcttgactattgtgaacagtgctgcaacaaacacgggagcgcagatcgctctgtgatatactgacttcctttgggtatatatccaacagtgggatgtctggactgtgtgttagctctacttttagttttctgagtaacctccaaactgttctccttagtggctgtactaatttacattcccaccaacagggtacaagggttcccttttctctacatccccgccagcatttgttactgtctgtcttttggatataagccattttaactggagtgagatgatatctcgttgtagttctgatttgcatttctttgatgatgaaggatgttgagcaccttttcatatgcctgttagctatttttagtgtatggtttctttcataagcaaatgcttcaagtacattctaacaaatacattctctaattcttctttaagggaatactcttaaagaagaaatggtcaagtacttcatttcccaactgttttctatttttcttttcccaaaactattccaaaaagtttatggggctttgtgtttattgtttatgaggtaaacaaatatgagtttttactcccagatttttccaaattaaaaaggcagtgacaaatatccatttaaattaaaaatccaagccattattgacattggaacttgattctacatatgcattaaaaaaaagacctaacagggggaaacctacattgtgttcataactggggatatccaacagcatcagtatgtcaaatttccataaatgaatccatgtattcaatgccattcctttaaaaaatttcacggccttttcccacagaatttgacaagacggaaaaaaatcatttgaaagagtcaaggtaaagaacagccaaaatgtgattaaaagaaaggaatgcttgtctttctagacataaagatactctttaatcatagtaatcaaaggactgtatcattaaagctcaaagagaccaactgaactcagtggacaggcaagaaacagattcacacatttatgtcaagaccatggggaaagaatagaatggaacactgtttttccataggaagaaaagtagattcataatttatatcacatataaaagatatccagatgatatcaaggcacatatggaaaagaaaacattaatacattagaaaaatatgaaagtactgttatgatattaacactgggaatatattcttaaggtacagccaaaatgcatagaccaaaaggaaattattaaatttcattatactaaacattttagtatcaaaggcactatcccctgtcccgaccccatcacacatatggaaacccactaagattccaagcgagaaataaaaaaaagtcctgtgatggatatgatcacaaaggatttaaatctagaatatataaaaatactaattattgcaaaagaaaacaatgacccaatggaaaaaattggcaaagaatacacacaagcaattgacaaaaagggacacctgtttgcatccaggagcaaacgttttactccactggataattggagaaatgagaattaatccaataatgtggtaccatcttttacccaccagagtggcaaacacttaaaaagtgtgccaatgcaaacatcatgggaaacagatgttttcacccaatgctatggagtatcaactgacacaagcacttaattaggactatagaactgctctccaatgttggagaaatgtgtaccttacaacatggtgattccactgctaggtaaatattctacagagagactcaccagtacactaggaaacacatacaaagatattggttttacatcgtcttaactgagaaaaattagaaacaacctttaaaaaggaataggaaattaatttgtcttccactcagggactagaatacaatacaggaggtaaaaatgaaagaatgagggcttcatttattcatgtagctgtatctcaaaaacaatgccgagtaaaagaaactgattatgtacagcaggacacagtcaagaaaatattaaatacatcaaacaacatgatttcctttttagggatacagatgcacattaaaaacaaataaaaacaaaaaacaaaaaaaaacatgcaaacctaagcaggtagaaaacctaccaacttcaggtcagtaaacgcctctaaagcagttctcaaaagggggtaactttgcctcccacatgtggcaatatgtggagatattctttgttattcacaactaggagggggcatggtattgtatctggtcggtacaggtagagttgctgctaaacacttacagtgcacaggacagcccccacaagaaagtagttatctggtccaaaatggcaatggttacaaggttgagaaaggcagccctaaaaacagaggaaggagaataagatgacaggtggggaagatgaagtgtatctataacttttcattctaagaaaagatctgaagcatgtatgaaaatatgttaaattttttaagaaggactgccacattattctttgtacattcttatatttgaaatatctctttaatcagttcaaaaatataaaaatcattctgcaaacaaacacagttaatttctaaatttgatgaaaattacataattcttttattagcctatttctataaatatatctttggaaaaacaatattctcacactcacgatcaaacgtatttgcactttttttcagtgtttgttctacacagagctataaaaggaagactgtggaagaacccaggattcatccaggatcacaggatcatttcattattacagtttcaggcaagaacattctaaaaccagctcagagaaagctaattccgtcctttcctggttatatagcagatcataataattccaggcaattctctgaagaagctgatgatctagaacagtgggcttgcatcacacaccccatcatgcttccttaagtacatggcttaggatgctgatttctcccaacctcatgggtttcagtagttcctacaaacaactttgagatcaaccagtgcataattttattttttcctttagttccttagtgcagaggatggcaaactttttctgtaaagggcaagatagtaaatattttgggctttgcaggccatatggtctctgtcacagctactcatctgtgtcactgtaacacaaaaacagccatagaggatacataaaggaacaaatgtggctgtgttccaataaacctttagttacagaaacaggcagggagctagacttggctccaagccatagtttcgccaacaccaagatggacagcaaaaatgcaaccagtttaaatactattttaaatttaaggcatttcctccaatctttgaaagtaaagttttatgtatgttttaatcagtgtaaaaattttgtactaccaaaaatgaatttatataaatgaaacaattcaataaatgatgaaaatgttcatttgttacatttatagcatactaacttctttctggaagtatgttataccccctgatttactaaattattaattataattttactagtttaaattatgctattaatgattccttataagaaaataaacacacatattgtatcttcaactaagggttgggaacgacaaggacagtgaaattatactcccaacacaaataatagctttctattaggtttgctatttcacctgaataattccttataatcatgaataatgatgttattcgacaacctaatgatatcatggtgtgtagcttcaatccatctgtctttgtcaagaaggtcaaatatttgtactccactgcactaggcaaagttgaacaaacagttaaacaacatcacacaccttaattactccttcaaatgaaaccagcaactaccattttacctgattctaggacctgtgaaataaaaacctacttcaaagatatttaatctgtatacacttttacaccaaatttaagctcaacttaaaaaaaaaataaaagtggttaaactcaagaaaaagccccaagattttctaagggtattgttaattggttgttgctgtaaaatgttttgtgaataacaaaatattccaggaacttttaacaaagatctggaatacttcatgtgttatcttgacattggcttaaaggtaagaataaagcaatagcgtgatagatgtgaactatagttcctataaatgcttcatagtgtttgctttgcttcgagattccatgagtgaccaaggagttgaaggggataaaaactccccattcactgtttctacagagcctctacaagacctggacccttggggctgggggatggtgaatatagcaaggtatgatgtgggcatacttaaatgatttgcagcaaaataatgtttatattaaaaatcctgttttccttccttccacccttctgctttttcttaaatctcaccaaagctttattgctgcacaaaaatgaagtccttagaaggccttattaatctggttccagactcctagcatcttcccacttcctcaccatgcttcacccccacaggtcttcgtgtttttgaaacggagtctcgctctgtcgcccaggctggagggcagtggcgagatctcggctcactttaagctcctcctcccgggttcacgcgactctcctgcctcagcctcccgagtagctgggactataagtgcccgccaccgcacccggctaatattttgtatctttagtagagacggggtttcaccgtggccttgatctcctgacctcgtgatccgcccgcctcggcctcccaaagtcctgggattacaggcatgagccaccgcgcccggcctctctgtgtttttttaaacattattgagcatgcaaacttgtttctgcccctgagcctttgttcttgtttccttctacctggacttggctgcccattgtcccacaatgggctggtccctcctcgttagttcttacagcacgtgtcaccggcaaagagaagacttccctaccactctgtctcaagcagtccctcactctcaatcatactcttctttttattttattcagaatagaaaatcatgttgtttgtgatttatgggtttacatttatgggtttcatcttttatggtaaacctctgcacacaagaataaaagtaggatcgttatctgactattcattattgtatacctggggtctggcacatagcagaaactaattaaatgataaatttacatattcattcatttacaatagacaactctgtgtctaatttgaggtcagcaaatgacggccctagagccaaacctgcctgatacctatttttgtaaataaagttttattggaacacagccctgtttgcccgtttaccaattgatgatgttgctttcacactagaatggcctagtggtgtagttacaacagagaccacatggcccagaaaagatttacagaaaaagtttgctagctcctggtctactacacagtatatgttctcaaataaataaaataaagtacagtcattgcttttaaaggagttctggtccattgtgtgtttttattcaaacacttttagattaaaattctatggcccaaaagaaagctcctttaaaactgtaagcatcacctagcaagagttgtattggtgctgtggctgggcacggtggctcacgcctgtaatcccagcactttaggaggccaaggtgggtggatcatttgaggtcaggagtttgagaccagcctggtcaacatggtaaaaccccatctctactaaaaatacaaaaaaaattagtagggtgtggtggtgcacccctgtaatcctagctactagggaggctgaggcaggagaattgcttgaacccgggaggcagaggttgcagtgagccaagatcaccccactgcactccagcctgggtgacagagtgagcatccatctaaaaaaaaaaaaaaaaaaaaaaaaaattgtattggtgctctattcattaggtcagctggctgaaatcataaagaactaacacagtgcctggcccctggtaagtactatacaagccttgattggcttctttttggaagaaaacattatatccggtggctaacacagggcttggcacatattcggttggtgcaaaagtaactgcagttttcacaataaaagtaatggcaaaaacctcaattgcttttccatcccaacctaatagcaagtaacagtcaagatctgttgaactgaattgaagtgaacttgactctttcagccagagggactaacaggctaatctgtgaaattagtgggcaaaaaactgattcactcacctgagaacaagccattctgtaaaataggctgagaaaccatttctcaccaacatttttcagggatgacttgaagtaatatgatccaaggagccagatttcaatatacgtttaatgttttttgataactcgttgtaggtagccactatttatcttatttgagttacaaagatacataaacacaaaatttaaacagtaatttgagtcacagactcccagagttgcaatactatcccctgtaatactcagttctatagatattttttcttttaaaagatccaaactaacccacatttacgccagctcttccaattatgactaaccgatgcatattatttctccaaatcttgacggtctaagctaatgcctctcacagttgactcacagatggaagtcacaattatttgggagtggctggctttttgttttgagttccacttcctggctcctacgctcaacttttgaattcagaatccttagagtgagaaatcatggcagagtccggaatctccattttaacaaacaccctaggtgatgctcggtcctttagaaatctgttattttagatcaagagatcatatatccacattaagaaataccaagtagctatcaacttttggaaccactactttcctctattggaaatgtaacgaagtgatactgtgtgttttacttggagttattcatattactgtatattacgtgcatacacatgcatattacgcactcagtacttgtaggagtgaagtactcaaagaaaagctaaaatgtggcatctttgccatccaggcggttctttgataagcagcatacgcataaatgatgtaaacaaatgatacaatgacccatgactgagagaccgacgagtagacatgcaacaagatttcagagaaagaagcaatcaagggggtctaggttgtcagtgatgtgaaaaattgccttctttggatccagtagaggaggcaggaagtacaaaaagtgatagtagttatcacactctagaggtgtcccaggaccttgttcttctctcagttaagacctaagatcttagaacacaggaagagtaaagcaagaactatggccttctaagttattaatcccagcagcctgggaaagattactaaggctttgaaagctggccaaaagtcattgcatctcagtggtcatagaggaagacctgggccaccatgaactgaaccagtaagaagcccctgtctccaaggagctgtcctgaatgaccttgcacggcacagcattctctttatcttcctgtggcatcagtaataaaaatcattggctggtctcctcatttgacatctaatcaaacacttcactcggaagttacttttcttgcgggtttaggtcttaaccctccaaggatcctgcaaagttctagaggacagagtgtcagcaactcccccagtgcttagcacaataatgtcaggcatcataaaaagatcttgtttaatcatttgataattttttatttattgcctaccatgtaccagacattgtgttaagcactcaatagaacagacagctagatcctaaacccaatggcagtgacaaaaccgtctgtagtcatgagggctgacgacaacactatgactatagtaaaagccattaaaatcactttaaattggtgaattgcacggtgtgtgaagtatatatcaaaaatgctattataaaaaaatcaaaatggcagaaaggaagatggtcaagccttagaaattcacttggtgaaaggttagaaaaaacacatccagaacttagttactcctatttagatggtgactgtgacacattagtaatacttgatggtactgtagctgaatactgaatattaagaaaattggaatgcttctcagaagcaacaaaacaacgaaactacatttatgctgtattggttaagaacataggtgtcagaatcagaaaaacatgtgatcagttctaggttctcttccttagttgtgtgactttggtcaaactgcttacctatctgagcctcaatttcttcatcagtaaaataactttaaaatatagtaatgctcaataattcttagctagtaatcaaataatgcaaattagcataatacattctcacttataaaattagcatatattaggaaaattattactattcaatgagtagtagcaaaatgtttttccactttgcttttgggtacatgtgaaattttattgtatgtccactcattgagatctcaaacatttattatcataacatttacataatttatgtgtatgtaccttatccaagaaggcctatgatagcaaagatgctatgtctcagttttctttgaatacttcactcctacaattactgagtgtgtatgcatgtaatatacagtaatataaataactgataaatgtatgggcacatacattttatattggttgtggcatgacttctaatagtgaaagttatgaaacaaactaaatattcaaaaccaggtgaaataattatagttaatcatattgatgaaatattatgaaaccactgaaaatgaagttaatgaataagaaacattaactttaaacaataagaaaaaacttacggtattaggatcaaaagaaagggatatcatactatatgtagagtagtgttgtgttctagttttatctaaaactgttttggagaagatggaagaaaacaaaacattttaaaagattaacagggattatctctgggcagtaggattatgagtctttttacttcatacttttgtgcatgaaaaaaattaacagtattaaattcttgctcattttatttataataaatacatgcagtattgattttaagaaagagcaaataagccttattttacgtatcaccagattatatcacaaagtgacgttaattttactacacagataaatgaccacatagctcaaatgaccagaaaaaaagaattgtgaagtatattctctaaatataagcatccaaccatattgatagccaccaatgtcagtcacacttaaaaagattttttggccgggcagcgtgcctcacgcctgtaatcccagcactttgggcggccgaggcgggcagatcatgaggtcaggagatcgagaccatcctggccaacatggtgaaaccccgtctctactaaaaatacaaaaattagctgggcatggtggcacgcgcctgtaatcccagctactcgggaggctgaggcaggagaatcacttgaacctgggagttggaggttgcagtgagccaagatctccactgcactccagcctggcgacagaacgagaccccgtctcaaaaaaaaaaaaattttttttttggttcaacaaagctgcttagtaagtagtttaaagttatttattattctaacccaaatgtttcacatcacagtaatttgttaaatataattgtataacatagtaaaacgtgaactgccaaatacaatatattgattgaaggagtctcatgaagctttgagagcttcagcgatagtggacaggctgtattcaaccgcagctccaaaggagaaagtgattaacaaaataagaaaataattaattcaaaagaaaatatgctttagaaatatgtgattttttaattgtgagaaggataaaatgtttccttaaggtcatgtaactgttagctacacaggtagcctttctgcccggtagtaagcccaatgtggaaatgaaatttagtagtgatttaatttataattatttttcaaagtttgaggaataggaacaactacattatgttcaatagtctgaaagcacaaattctgacctttaagttcaaagtggaagtcaaactgctatacgtcagcatgacaacatcaagaaaaaccaacaggtcccaggggacaaggggaatacctgcttccctgcccactatcaccccaaaagttttgtcagaactattttggacatttgtcaaagatgtattttttttcctatttagatcatgagctgtaaaaacagaaaaaaacaaaataatgggcagaaatctatctgaaacccactactttttttccttcctttattttaatagataaaaggctaaaccaggtcatctacctaaacaagactggttccaggcctctgctatggctaagtagttaaggaaatgatttttgcaattaggatggtctcatttatattgggacttcactacttactaggtgggtgagtgtggacagcttacttccatacccctaggcttctttcagcatctgtgtaaagggccattaagtcagaattaaataagtggtagctgttattactaaatataaaagcctcatagaaaagatatgttagttattagaaagaaaattttccctaaaacttcttttaaaacatcttatgacaaagttacagaaatatttttaagccgtttgtaactaatacagacgcacattctctctcatatttacacttttcacctttgcttcccatctggaggagatcatcctccaaggtttcttccagcatattttatgataatcagactatgaattgggaatacatattatttgggctctgtttttgattgctatttttcatgtggtaaatcccagaaagctgcccaaatcccctgctgattatcttggccaagatgttgacaaactcttagatttctgctatcccattggcatccattggtattgcaatggcattctttcatccaacggacaaaacctctttccaaattctgacaacttctatattatcatcattcttctaatgttaataagcttgaatttggtaacattaaccccacagttaccaaatatggcctcctcatgccaacccacctctgctttttgtagaagaaactattaggccatttgtaaaagtctggtttgatgactcctcattttgtggcaatttcataaatatgaccaactttatcattagtcttattttctttcaattaatcaacaaagccatgagtaaaatgtgaaaatttaatagtcttttcccatgatttctcacagacaatataattgagctttccatgttattttacagttctttttatatggtaggcactaatgaaggagtccacaaacactggttacatagcacacatggttgatgtctatttttcacatggtactttgagggtggagggtaggtgggaagggatggatgtattccataggatctgtagcaacaagtataaagctaattttgtaaactgcaactcctgaacactggtgcctttggagaaattatttatcatatattatctatattacagagattgtgtttggcaaatccacggttttagagtcagtacacaaggcagataatcatttgtctgaaaatctcggacaagtgtgtttactatctatagtagatggcaccattttcttcacaaatatttattctcctcttctcctacatcgtgggaggagtatactactttgctttactgatttcaagatggtcatgtgatgtgctttggccaatggatcacaagtggatataacacacggccctcccaaaggaagctttaaacgtatgtgtgtggtctgggttggccttctaacctcctgccctctaccataggagcaaaatgttccagataggggctgcttcttcagcctgcgtaaatggaatgagaagacaatggagcagacccaaagccagctgagcccagccaagaccagcagagccacagctgacctgcagatttgtgaacaagaatgaatgatgttgttgtaaactaccaagattccaggttgttgccccataaaaactgacggatatactatccctaagtcttaattacttcatttaataaattgtgatttagtgtgtgtaaaacatagtgctgaagttactatagtgaaaaaaaagcatatactgcccctgctctcatagtctagaggaagaaaatggaaattgcaccatcattctagcacatgtgaattacaaacaagtaaatgctatcaaggaaagaaatgtggttccattagaacatataataaaggaaagtggccaagactgaggtttcaaaagagcccttctagaagaagggatacgtgagttggcattggtagaatgaacaggagttagcaaggtaaaaagacaatgcaaaaacattccagtcaagagagaaacaacatgcaaaggcctatggctaaaggaaacacgatttggtggaggaatgaaagaggctagtatggctgggcatgaaagaaagagggaggcctggcatgtggtgagattagagagaaagactgaagcaagaccagaggcctttaaaggccatgttttaaaagctagggtctttatcctatgtacgaaaggaagctagcaaaggttttttgttttgttttgtttcattttgtttttttacaacaacaacagcagcaacaacaaaacttgtattttaagctcaggggtacgagggtaggttagttacataggtaaactcgtgtcatggcggtttgttgtacagattatttcatcacccaggtattaagtctagtacccgttagttatttttcctgatcctctccctccttccatcttccaccctctgataagccccagtatacattgtttcctcggcccatatgtccttgtgttctcatcatttaactcccacttataagtgagaacatgtggtatttgctttcctgttcctgcattagtttgctaaagacaatggcctccagctccatccatgtccttgtaaaggacatgatttcattctttttatggctgcatagtattccatggtgtatatgtacaacattttctttatccagtctaccactgatgagcatttaggttgattctatatctttgctattgtgaatagtgcttcggtgaacatatgcatgcatgtgtctttatagcagaatgacaaaggtttttcaatggggataaagtaaggagttcttcatcagtttgtgtttgataaagctctgactgctagctacatggagaatgtattgcagggaatgtagagtgaagacaataaataagctgagtgaggaatgctggtggcttggattagggcactggcattagaaattagagaaatagatagatttgtgaaatttaggaagtaaaaccagcaagatcagcactgtgaatacagtattgcatgttagaaaaagaaggatgttctatagtactactatccatgaagcgatagatcttacaataaagaaggaatctaagaaataatgtctctggattatgaatttgacttaatttatcaattaggtttgactacttgaaaataacccataatggtaggtaatttcaactccctgccaccacagttacaggtggaaactgttattactgaataatggtgtgagcataaatgatgtttgtcaaacttgtgaatcttaggaaaactctttggacaagtgagtgaatattaatttagacttcattggagagttcaagttttttctctttccatataatctatgtcatctttttggaaaaggtgaaaacaaaaaaatagataatacaaagtacttcaaaatgccaaagactaccctctgagctagcttgaattctattccttctatttatttggatcaattcttatccaaatctgtgagatttgtatattatgagggtgttttctttgacatcttaaagttcaaagatgtgtttcaacaatctttagagtaggtacttatggcatcacagcttagcttctcaaaaagccaattataagacacagctgttaccatgccaaattcctatatatttggttttaaaaaaaactaattctacacctggctgatgaagtaaagacgaacgtgatagtataaatgtacagacacaaatcactgctttaagattccctctctagacccacatagtacatatctgtggtgtctaccagctaagcttctcttcctatattcccacccaaattcttttggggtacctgcaactcccccattgcaagcagtcctggtaggctatcaaataaaacaccttatctaccaagcaagagatccaggacaggccaaacagatggcgtgctccaggaatgtgactcttggcgattccaaatgataccaggacatgtatggttggagctacatcacttcaatggcagcatcctgaggagactgtcattaccgcaaccaggatacccagagctgccccaacttctattatttctgaggcctgtttgtgcttagctttcaaatttcagtctatgacctgcttcccatagctttccaatcttgtgtactattacataagtagaagctgattctcagataagacaagttgtccaaaatcacacagataataaatagatgaattaggattcacatctctgttagactgaatccacattcataatcttaataaattcattatactgttcctatgatcacatctcaaatggaatttgtaaaaagcccagtaacatttgtttattgccttagcctaccacttagaaattacaatgaaatgttaactatatctgctattttgctattcgcaagtgacagatgacttggaaagcatgtccactttagtcctctaagcacatttacattttcatattgccttcacatgacatttctgtggctacacttgcaatccagactagtctttcatcctctgttgacaatgatctgtttcattttcagagaaaactacccaataagtctctttaacgttatggatatagtctttctaaggaataggaagaaaatattttttcattgtcttacagtttttttgtttcaatgaatacatcacgtacctggtaaagaaaccttgctaccgtctcaacctttgccaacattatcattcacagagattccaatgagtgatacaaaccctagcagcttcagcctacagcttggtgaggttgactacaaagagcgcccatcccagagttactagtactcttattttgccatctttatttttgtctctggaaaatgaataaaatgtcagcttcagtagcaacatactgtggaattcataaaacaaaggtcaggtatgaagaacacaggaaaccaatggtagcaaaaggaaacccaatgcctgagctggccatcttggcgagtggggaaaactagaacagcactgaaaaccaagcatagttaagccaggattgatgggtaacagctgcactttgcaattcacctgcaattcagatccaatttcacatattctgcaagcccaaaaaaggccaattattgttaagtttctataagagtttaaacggccatgattcatttttgttttcctttaggaattttaggaccccctaagaagtattctctcttctacatatcatttctaggccttgaatttgaatggagcatctgctgagtataatggacctatttggccttttatctcattttttgtgaagctagtcaaatatgtatccttccactagggtcagcatcgactagatggactaggaagaatttcattagaaaatgagatctcatgggagacgataaagaccaggcttccaagacagagatgtgagttcaagtctctggtatttactagctgaagggctgtgggcaatcatgttaccttcttgaacctgctcccccacctccccccacacacacaatatagaaatacctaatttgtacaattacgaatccaaaatattaaatttaaatttaaggttttagcacaatggcacataggaatgactatagtgccattattaaaaatccagtaagtgcatttatgcaccatataatgtagtatatgttgtaaattcaatagtacataatagaatcatagtctctaacctcggaggtcttacatctaatgttaatgacaaaccaagaataaattccagtaagggggtgaaaagtgttctgatgatgggggaaatgcaggtaataatgagtagctattttattattaaaaacgtaaaacacatgtacagcagagtggtcaagaatctaaactctatcatcagaatgcctaggtgtgagtctcatgtctgcccattactttcagtgagactttgcataaggttatccatcagtgaaattaaaatgataatattaactatcttaaagggttttcacaaggattaacagagaaaatatgtatcgtactgagaatggtgctggagatatactaatccttcaataaatattacctataattaccaccattatgccaattccatcagtactgagctatacagaaatggtcgacacccttcagaatgtctccttctacacagacaaacatcgctttatgtgttttaagacaatcaagctataactagagaaaaatctaaggtatctctaaagacactttcaactcagaccatttatctttaatcaaaaatttggaaattttgatgttaaaattctgaaattattttgagggtactatagggtcttagaataaatagaagagaaaaataaacataaaatgagaggaagcacccccatagtgctggattttaatggaggtatcagcatcaatccatgatttaaaatatatgtatacatattttccagtcctttctaacagaagggcctagaaacaatgtcacctgagtagccatgagcacacttaatgcccagatcttggtttctaattatcttctatttaaatgaaccatatagctaattccagatctgaagcagggaaagtatgttatgccaggaaatgaggacagcttatagataaatagggttatctcaaaagggcagagacatctgaataaagggacttctgctgtcaaattgggcaaatttaatcaaaatgatataataaatggattctaacaccttgaattaaaagtgatctcagtttactagatgagagagaaacagcaacagacaaaaaggggctaaaaaaattgaggagaggtaaagttcttccttacagaataatgtctgtaaatatatgttgaaagaacgacaaaaatagaaagctaacatcttatatatcccatattataaatgactcaagccagaatcaccaacaaatgctaaaacaaacaattaggggaaatcttattgtggaacaagacatgtctattaattcaagtcacagcaaacctaggaaaagattgactgatatgtagccatggtaataagtagcatcctgaatcagattaaagtctatttaattggcactttctagtcaaccaatcagtaacagccctttattgctaaaagacagccagtcagcaacagactcatacatctctaagtgccaattaagcaacctgccccactcctcacctgaatcaacatgtttccacatatgtcagcttacttacttctgaaaatctacttaactccatactttccactttggtctactcagactgaactcgaccagcatagttctcctttacaataaattcagctttgtctttgaatttcagatgaatggtgaactgcattatcaccccactatataataattaaaaagaaaaaaactgtgtcttttacagtggggtaatctggcagtcatcaactaaccaaatggtgaaacttggcattgtcattagtgatgccaatagcctgacaggatgtactgatgcagaggcaaggggacaacataacctatttggtgtccttgccaaaaatggtttaaatgaaccgaatcaggagaaaacaatgagatggatcaagatagtaggctgttgcatgggccatatggcttggaatcttcaaataatttaatgtcatgaatatccaagggagttagacaattgatatatattttaaaatatttaataaccaaatgcaatttattaatttatgaataaccaaaagcaatttaggaaccttgactggatctgtgtcatggaggaaaaaaagccaactgagaaagcaaattgagaaaatctgaatatggaaaatatgatattactgaactaatgtgaattttcttgggtgcagtaaatggggttagttgtgtaggaatgtttccttattcttggaaaatgcaagctgaattatttaggagtaaagcatcctaacatctgcagcagactactgtttgttagagggtttggcacaaaggaagtgtctacagagacacggcacagatatatcaagatgtcaaagttaatgaatctcaatgagagataaacaggtgatcactgaactgttctttcaactttactgaggttgaaatttttacattctatttacttttattctgaatcttatatacacagaccacccatggaatttcccaggtatttttcttcagcctcaatttctcacttacagtaaaaataaatgtgttgtactctgtttttgtaagtcagctcaaaactttattggcagaaacagtggtccaaataagcaaagttcaaaacatttaataataattttcccctacataaaaaaggcaaatatttttcagttaaggataacaaagataagattccctttggagtttaaaatcctccaatctttcagctttgtccatgtcattatcctcagcaaacacacacaggaacagaaaaccaaacaccacatgttctcacttacaagagggagctgaacaatgagaacacatggacacagggaacaatacacactggtgatatggacaggaagcaggagggaagggtccctggtgagggttctactctcaagcctggacccatggccttaaatgagaataggcatgcttgtttttgtgcccagatgttgccttttccaaaaccactctgacctgccctgcaccctatcctgtgcccataagaaccccaaaccccacgctccatgagcagaagagcagcagagcggcagagcagagaacaggagagaagaggagagaagtgtctgaacgtggagaggacaagaggcagctggacatcggagactaggttggggagaagtttggccagggacagccttactccaagggaagattatcttcccactccattccctttccagctccccatcctgctgagatccactttcatcacccaataaaatcctctgcacacactacccttcaatccatttgtgtgacctgattcttcctggatgccagacaagaattcaggaggcactgggtgtggaaacccaaaaaggctgtcacactgactcttcactgagctggctaacacttaagctgtctgtggatggcaaggctaaaagagcattgtaacacacttggacgctgccatggggcatgcacagggcctgcttctgctggagagaagcagccagcagttccagtgttccttcactccggttcccacacccgtttccttgcacgctccctcccgtggggagtggccagcagtgggctgagtaaaactagcagcttcagttcctgccagcgaagtggtcaagggagctcccgtttcactggggcctgtcgaggaggtggggagaaggagagcatcaggttaaatagctaatgcatgcagggcttaacaccaggtgacgggttggtagatgcagcaaccaccatggcacatgttgacctatgtaacaaacccacacatgctgcacatgtatcccagaacttaaagttttaaaagataataaaaacaagagttataagtggtggaacaacaacaacgacaaaaatcctccagtgtttatcataagccattttgcctccaatgtcagtaagacaacctagaagtctctgagaggagagaaatctttccagatccatcaggagacacagaagtcacatgaaagcgttcctacagacacatgaaaatgctaagggtatctttggacactgaggactctcccaccaacagccacactgacaacagcctttggtgtctcactcagaggagtccctggtgggaagccaggctgtaatctgtcacaagagcatgtgagcagaggccaccttactagataaaatgcagctggttaccgcattccctggagggacagtgacctccgacagacaaggtgaggcaggcagacaaaacagtgggcaccgcaaatgaacaggcaggcgcggagtggtgcctggaggaaagcctctgacctggagccgagggagagctgctagataaacaagccattataagagggtaatattccatcctagtgtgagcggaagctgggaagaaaaccaactgtaggcctgatgtggactgcagctggcaggaaggctgcagagctcggttcaaggcaggagatcctgcccctgtccctggcacagaacacaaacagcaccactggatgtggtgggaggaggaggaaggaaaatctatacatttacgggacgtgaaatgcaagaaattgagggaattcgtccaggaaggaggaatgacaccattaatatcagtatttatgggcttacaagaagataaatgcatttcaagagtagcctcaccccaaagagaactaaccacacaattaagatcaaggctactgtcatagacctggctctgctttgaaaaacaagctacaaagggaagtttgggctttaatttaaaaaaaaaaaaaaaatgttcacggaaataagagaaactttaagaaaacttgtagaacacaaaaatcacattagactcttctataattctcataacaatagaaacttaacaataatggagcttatatttgaatgcttcatatggacgagagagagtttaagcattttgcatatattaactcacatgatcctcacaacaattccgctgggtagatactattaccgcccatttgaagcataaggtaactgaaggaaatctaggttaagtaattcccagggcttgctcttgtaagacaactgagcttggattcacatccaggccctcagctgcaaagcttatattcctcagcccatgaatactgcctctgggtatgcaaaaatcacctttgccttcaggaaataaggctcacatttttaagtgaacactcaagttgatatagtggggaaggcggggaaggcagggaaatctggagctgagacaaaggagtggggaaacatactatgggttcagaggacctatccacaaacctgttggtctctgtacctcttcacgctgttgaaaaattgactacaccgaagagcttgaatttatgtgactatatttgctgatatttaattccaagttagaactaagaaaattctaaaatatttattcatttacttaaaataataaacccatatgttaatgtaatattttaataatattttctaaaacaaaaaaactagtgtgaagagtgacaaatctctaatgaatggcttgatagaagataattgcatccttatttctgcttctgtatgcaatctatcatgagatgtcttcgctaaagcataggaagaagttggcctcatatagacatatagttggaaaaggaactacttcacaaattctgcaaaggtcttggggaccttccggggccccaggaccactggtctagagaaaggactctagagttagaccacctggatttgaaacctggctctgccacttaatagctgtttggtctagatcgatttagctcatattatctcattctctcatctataaaatggagataccaacagtacccacctgataggtttgctcatgagtgctaaattaatatttatcaaatgcctagaacaatctcagagcataaatattatatgttagatgaataaataaaatgacctggctttgcaagaagcatctccgccagagtaacgtctctgtactgaattgtacattctgacagctgagacaatgacagggatcacttgagcgaaagtgatcaattacacccatgttataatagggataattataataggagcttcagtaaattgagaaatcaattgagatacaaacttcgacttcatgggagctaagaaaacataatcatttgaatctctactcctctgaggatggatagcaacatcctttcaaaaccctttcatgttcaaagtcacatcagacaggggaaattctttaatgtaatttctgttgcattttggctataaaaacatgtcgagaagttgttaagctgacaaattccaaggtatctcttaatgacaaaaagtgggtgaatagttataaaggctcaagagttaatgttattttagggttaagttaaatatatttttacctgtgcaaatttttatctatttcatttttaaaaattgataaaggtcattcaggaggtgatttgagaacacacaacttgttgtagatatctttcttatttatattattgccatatatgatgcaatacatgtaaaattcttccatcccatcctactatacctttcacatattctttgacattttattccctccatcaaatatgagttgtcttttagatagcatcggaatcataggatactaagtagctacttcctctgtctctctacacccacctccctaaaactacaggcggctgacccactgatattactatgaattttttgctcttcatcaacggtcaaagggtggtcttcagtccaatggcctggttaactgggaattgccatatatggcttatcatttttaagaaattacaatattgcagaaagcattttatatgaaaattatattaaacataatctagaatgtaaaacagcaccataacgtcatattgaatatagtacatttcatgactcagaagacacattatagttgtgccacaatccccaagatctgtcttttcaatattacccctatgcaggaaacatgtgaaactagcaattaatagtataaagaccaacttaggagttctgtaaagaagttagttagaatgtgaaaacaccgctgtgcttctagaaccatactgcccggttcatcatgacactcctggtctctccatttataaacttggaaataccattctttaccttcttcaagggtggccaggaagatacagtgaatttttaaagcatgcctatgaagttccatgaacttgttggtgatagtggactagcaaaataaaaattagaagaaagaaaactcattcaaaaaaaatcacaagaaaatacgcacaaatatttaatctcaggatagattttgcataaaagaacaggaaaaactcataaatgaccaagttgacaaaactatgacaaaatttctacatgttaataacatcttaaagaaactgaagaggctagggccaaaaaaggaacaatatttgcaacaaatgtgacaggtagagggttaattcgtaaaagatctctaacatattgggtttttaaaaatatcccaatagaaaaagaagcaaagcaccttcataggtaacttattgataaaggtaatgtatatatatgtttaaaagttaactccactagcaattagataataaaatgtaaacagtgagatatgtaaaatctatcaacttggaaaaggttaggccaaaacaaaaaacctaattcttgaagtttatgagatgtgtacccccatgcagtgctagtatacaataacttccgaatgttcatccatttaaacaccacataatattatagcaagtagtgattccagtttaagaaatttagcagaaacattaccaaagatcctgtaccaaaatatttgttacacatatgtcgaaaagtcagtaataactaataaattatagtagatccatatggcacaatattataccatcgttaaaaatttcatttatatgcaggctgggtgcgctggctcatgcctgtaatccaagcactatgggaggcagaggcaggcagattgcttgaggccaggagtttgagaccagcctggccaacatggggaaacttcgtctctactaaaaatacaaaaattagctgggcatggtggcctgtaatcccagctactcaagaggctgaggcaggagaattgcttgaacccaggaggtggaggttgcagtgagcaccgaggtggcaccaatgcactctagcctggacaacagagtgagactgtctaaaaaacaattattttttacatacatattaaaacgtcagaaaaatgtcaacaatgaagtaggttaaaatcatgttataaagtgtttctctttttcaagagaaacatgtaagaacaaagaaaaaagtagaaaggaataaactgcagttttggcaaaggttatttctggaaaataagattatagatggtttttattttgtacagtgggcagatattcttatgattagaaaaaataaatgaaaggtttaaaaatgggttacacttgatataaactagactgcagcttcatagatataatttaaacaaaacgtttatttagtcaagcaattcattagctggttactggtagactgcattaaaaacaccaaatagtttgaatatatttacagttggcccttgaacaattaaggggcaagtgatcctgtaccactccccatctgcatagttgaaaattcacatgtaacttaacttcccaaaacttaactactagtagactattgttgactggaagccttaccaataaacacttgattaacaaatattttgtttatgtattatgtattgtattcttaaagtaaactagagaaaatattaatattaagaaaaccataaggaagagaaaagacatttacagtattatactatatgtattgataccatagcttgacatcatctatttacaagatgaatcatctgtctaaaactgtaggtacatatcaaggaatttaaccttttcttgtaacatcatggcttttctctgcttcttgggagcacgtccagcatcactagtgacccttcatgttagtcccatggtactattccaggtttatggtatgcatcacacacaaagaaaaatgagaaccatgagagatcactttttactgtgaaacaatttactggagtgaccatcagctcagagatgattagtgtcctgaggagttttaaacagatactcccaacacttgagctcaccccaatagcaatacaaggtggctacaaatttcttatagtacagtatgtactatagttaattttatgcatttatgatttcatacaccatctttatatttctttatattcctctcaactgcaagtggcaccatgtccagactgtgtttgtgtgcctacgtttcgataaattttaggcttgtttgtgtttatggtactaaatgatagaacagactagtatctacatatattaatgacatacatttattctttttttagatatttctagctagttttttttcaaattgtcacaaatgtccaaaaaatttttctaatatacttattgaaaaaaatccacagaagtggacccacacatttcaaacctgtgctctccaaggatcaactgtaattccttttctccataacatttcagtagtatcagaactacattaatgctccgtacctcctgtgtacggattatatcaggaggctgagctgtggatgaaagagattttaaaaagaaacagtagtgtgatttgaaactaaataaaagagaaacatctcgtctagagagcatgtcagtcctagtccaaacctttccagcatgtacaggctgaacactccaaaatgaaggtctactgcttattgctgaattgttggtagtctcaatgaccccaggattgcagagatgcttcactttcaaaaaaaaaatccattaaaattagttcaaagaggacactaacatggtgttagagggtcatttttcaatgttgtgggtggaggagcgagacacttagagtaactcccattatggttaatgagagttgagcatctagactcatctaaaccccctgagggtttaatttaaaaccactatggcaaagcaactctaagccatgaatgaacagcagcatttttcacacacctacctcttcccaagtaccaaaaacagtagaaataataaaggtgagtttgtttggttgggtttgatttttactaccatgcctcatagaagagaaaaaaaaaggaaaaaggctcatatcaaatgcctataaattttttggtttattttaaatccagggtgttattttaatgccatttttaaatgactaatttaaacttgagtctgggtttttccagttgctatgtgatgttcacatagaaatgcagtatttttttaaattccatttaagcttcagttttacaaatttagggctaccattatataatgtccattccaagacccatgctcttgatcaaccttaaggcatcaggataatggacaataaaaaaaaaataagtattattattattttttgaggcggaggcttgctctgtctcccaggctggagtgcaatggcatgatctcggctcactgcaagctccgcctcccagattcacgccattctcctgcctcaacctcccgagtagctgggactacaggcgcccgccaccacacccagctaattttttgtatttttagtagagacggggtttcaccgtgttagccaggatggtctcgatctgctgacttcgtgatccgcccacctcggcctcccaaagtgctgggattacaggcatgagccactgtgcccggccaaaagttataattattataccatgcttccaatatgccaaatttattcattcttctgacttccatatcaccttgttttaattctctcacaagagcccaggaggcaggcaaatacctgttttcatagcagaaaatacctttatcttcacatgagcaaatcaaacaaaaaagaataaatgacctaagtttccccatatgggactaaaatacatttctccaattccctgtccaaagctcatttgcagttttgacaagtacaaatgttttgtacccaaagacagtaaatgaggcagtagagccattggcaggcagagctctttcttctcccatgtacattcaacaataccagaaacaggactgagagagccttgtaaccatcatttccatggtttgagttttgtggtagggtcagggaaggcctctgtgtgtaagtgatgacaagggaacaggaattgaaaggaggaaaaccagggaccctgtgtaggtcagagggtggcaggtgaaggtcagaggaatgtcagattttactttaagtgaaagaaacagcaacagcaaccagaagttttttttttttttttttctgacacagagtcttgctctgttgcctaggctggttgtgcagtggcacgatctgagctcactgcaacttctgcccccctgagttcaagcaattatcgtgtctcagcctcctgagaagctgggattaaaagtgcccaccagcacacctggctaagttttgcatttttagtagatacagggtttcaccatgttggccaggctggtttcgaactcctgacctcaagtgatcacctgcctcagcctcccaaagtgttgggattacaggcatgagtcactatgcccagccagaaacaaccataatttcttaatgcaaaggaacaacctgttcttgtttctgtatttttaaaaatctatgtcagctacatagtggtagactggaggatggatagtggtagactggagttgcgggagtgataaacaaggaaacctgagagctcactgcacccagttcagacaagatttggcaggagtagtagagatgttgagtaccagactcagaacatatttttgagaaacagcctccatgtgcattggaaggatgttttgagaatgctgtcaattacatattctggcatcatctccttgaggaagaattcacagaaaatcgcctgatctctggtgttgtgcacatttctgcatttttctgaacaatcagcctatttttacctcaagaattgatgctctttccttatttaggttggtgatagaaagttcagggccaactttgtgacccatctgtttttgttggttttcaggctgctaaagacacacccaagactgggtaatttataaagaaaaagaggtttaatagactcatagttccacgtggctggggaggcctcacaatcatggcagaagtcaaaaggcacatcttacacggcagcaggcaaaaggaaaaatgagagccaagtgaaaggggaaactccttataaaaacagcaaatctcgtgagacttattcattaccacaagaacagtatgggggaaaccatccctgtgattcaattatctcccacgggctccctcccataacacgtgggaattatgggagctataattcaatatgagatttgggtgggcacacagccaaaccatatcactatctctagcaagtatataaatattttatatctatttgatgcactaatctcacttttggtccatcttactttccttttactacttcttgaattttgtagtttgcttttttttaaagcacttaaatcttactctactttttcatagtcaccttaaatcatgttttaaaaattctaggaaataaatgaataaacaaactaaaattgtctaatggaaatttccttgattattatagaaataataaatcagaagaaggtttcatcaaagggatcatcagaaagaaatagagatctacaaaagggcatgttatgtaaggcaacctgtatgcatgggaagccaagatgataaagccataaaaacttgactaaactgaagaaattgcttacagagctgctccagacttcctgaggaaggcaagacagtggcatatacaatcttgggaaatcaaatctcatgagccgacgagttatcaaacccttctgttagatttctctcagctgaggaaataactgatttcatcagcctggctggaatccacatggaaatctatgaaacctgtgctgggcatgggaggggttgagtatttttcatgctcaaaccacctgttacttctctctctttcaaagcaggccactttggaatgatgaatattagttatgtctccaagcatgtgttcatgtgtgttaggtacatagaaatcctggttgacactatgttaaccattgcagtatactgcctggtgtgagaacttaccacattattctacttgttaaatgaggaccgttgtcctcttttatctttagagctaaaaagccaacatggtcaaccagggtcactcatctagcaaatattcatttaacaaatatttactgaacacctcctatgagcctggccctgcccaggcagaggagatgcattcatgaataaacctgagaatcatccctgccctcagagagctcacattctagtcagcctgagacacacacacacacacacacacacacacacacacacacacacacacacacaaataaattatataataatttagtgtataaacactacaaaggaacgtcatgtggtaggggtgcaattttaagataatgggaaagactattctgtgacatttgagcacaatctaaatagaggtctgaaggagttgagtgaacatagcatatgtacatctggggaattggcattccacgaagaataaacagctgctggttcaagggctatgaggcagcagtgtgcttagaatgttaaacaaacaacaaggaatctagtgtggttggatctgagcgaatgtggggagctttgaaagttgtatgtagctgctgtaacaaattaccataaattggtggctgaaaacaatagccattgatgctgtcatggttttggaggccagcgtggcatccaggtgtcagcagggccacgctccctctttgctgctccagcttctgatggctgtcagcattccttgacttgtgaccacatcactccagtctgccttcacgatcatgttgtgtcctccttttctccatgtaatctccctgtctcactcttataaggacactgccattggatgtaggatttgcctggctgatccaggataatctccccacctcaaggtgagatacttaactcacacatccacaaagacccctttcctaataaggtaccattcacaggtttcaaggattgagatatggacatctcttttgagggatccccattcaactcactacaggaaaaatggtaatagatgaaatcagaggggcaatggttgatggcagggggtggatggaggagtacaagtaggaaccttgtcaatcactgtgataactttggctttagttagaagaaggtaggaagccactgtggggataatgagagaagtgacatagattcaacaagtcttaacaggatcactccggctgctgccatgcaaaaaagttccaatagcatttaatccttacattgatactttgttggcttaagagcatgccaaatttagattagaaatgaaaatgagaagaacctgatatacagatcttcagaaaatatttaataattaaaagaatattcctctacctaaccatcctgttttgaaccaaaattaaatttatcccataaatatttatcaaccatctaatatacacaagattctgactctaagaattgaagggatcacaccctacctaatgtggtattgactgacaaccccttttttttaagatttatgtcatctctttgtgtaaacaataattgaagaatctcaacttagtgggagaaagacgtgctaccattatattctttgccattacttttccagccaccctatgttgaatccctttctggctctttaataatatcttgggcagaacgtataactatgtagtcactttccataattgtaaatctctccattttaaaattctagtcttggttcttttaaaattttatatcctatcaagcacagacttgagatgcaacttttattacttagagctctctacaagtgttcccccatagtgaggctaagctatgctagcgttaaaggcagagtggtcttaggtatcaggttgcctgtcaacaggtgacaggtggccaggtgtggtggcacatgcctgtaattccagcactttgggaggctgaggtagattgcttgagctcaggagtttgagatcagcctgagcaacatggtgaaaccttgtctctacaaaaaatgcaaaaattagctgggcgtggtggcccacacctgtagtcccagctgttcaggaggctgaggtgagaagatcacttgagtcctggagctcaaggctgcagtgagtcaaggttgtaccactgcactatagcttggatgacagagtgagaccctgtctcaaaaacaaaaacacaaaatgaaacacacaacacatacacacacacacacacacacacacacaaacaggtgacaggtaagtgtccctggtctagctccagttccatctgctgggagcctctgcaaatacggtagtctgcactggtgaattaacagacatgttttttccaggaaggtagtaaagtctcgcccccgtttgtttctgaggatccatttacaaaaggacagccatgtctcccttttaggtctgccggtgttccatgacccaatcccctctctggagaggccagcacctcagttggcccagcatctacctgagcaacctagtggtgcctgcctcctactcggacattcatggtcatttacaggaaccgggggacctgctgaggttggtgcttctgggcttcttcaaagggctaccgaaaaggtgaaatagtgtagaaaagttgttctcatcttttttcccaggaacactactcctcttcagtgacttcttgctctgctactacaggcctctccaacaagcctcccctgccccaccctacattcaagaatgcaaagatgagaagcaagcactcttgtgtgctcatgtacaattccaaactccacagagcacatgggaagctctccaaaagcaattgtacctccctgcactcccagatcatgacagtacctgtgtcagcctgcaggtcctacagcttcgtagcatcaagccaaagaacaagatgccagtgtcattttgtggaaagcatcccccaagagatgtgacttttgaggcagtgggagtaattattccagaagagggaagaagaaagcatccctacactcctcatttcaactgtcgatctttgtcctcacgtatcctctccctttgcggtttgggggcgtggaggtatgtttcagtgaggtaggaatggttctgctgctgcctctcagtaatgtggatgtggggagcatctgtccccacatgtcagcattcctgcttaggccttagctgtttattccgcggaaatatgaaaagtttcactcaacatctgctgcactcctgaacttcaattacattactgcagatatgactccctgagagatggcttctagagtcatttggtccctaaacagaatagaaaatactaactggtattctaggcctctgcatgtgaaacactctagattttcatgtaattcctgttgatttatttttatcttgacacatcttatttaacaactattaaagcaatcatctttggtgaatggaagggtatcatggctaacttttaaagtattagcacgtaaatctcttgaactgaaaattaatcttaaagataaaaagaagttcttgataacttcaggcatttcaaaacctatcagaaaggagaaaaattggagagccagatgaatttagctcctcctggacccattttatctcagagcaaattatgcggctaaccaagctaaactgcctggccccatatagatggcagtggagagtaaggcttaaaccttctagactttcagaagtcactaaggttggtcttattcttaaatgataatgaagcttacaataaaataataaagccactaacagcaaaatgcccataaaaatataaatggcagagtaaagatttaggaaaatacaacactagaaagtggggctaatgggaaaggtttaaactctagggagaagaacttctcaggacacccaccccaccgtacatagaagtttgcagcacatgtgaaatgtaactggagaaggtgaaatgaacaatggaatgagaatcaaaagtcctgggtaaagcccagactcccatgaactagagccaccattggtctgtgcctcagcttttccattcaaaccactcataggccaatgaggatagaacaatttttgtttcagaaaggttcttgctctgcagcccaggctagagtgcagaggtgcaatcacagcttactataaccttgaactcctgggctaaagcaatcctcctacctcagcctccctagtagttaggactacagatgcatgccatcacacctagccaataaacttttcttgtagaaaagggtctagctatgctgcctaggctggtctgaaactcctggtctcaagtgatccccctgcttcagcctcccaaaactctgggattacaggtgtgcaccactgtgcctgtgtgaaacaaaatattgactccaataatgcattgttagtcataaaatataattttaattatttaaaattatcttaatgtaagatattagttatatgtatataaatatactctccactgccacagttaccccaaacacatatacaaaaggaaaagaaaggaaggaaggaaaaaaggaaggaaggaaggaaggaaattgcctcagtatcccccatgctacaagtaagctttcccttaaaccactattaggaggctaagttcagtgtgaggaagatgaccatttgatacgaagaaagagttctgttggtcttaattaatcagctaacctacaactatgcttgacttaattggtcttgaagaacaaagaacatgcttggtcttaggaatataaaggagcttcttccatctgtttttctccctctaaaatctccctctaaaatctactgagaccatgtgcattggcatgtctattcctgttattacaatattgaaatacacaagtattacttattacccttgcgtgctgctcaccacctcttttcttcctcccctgggactctccagacctccccacaatgcacaaattaataggctgatgtctggcacagtagagagctttcaggaaccacctttgacattggtcagtaccacctgtcatactaattgttacacataaacataactccactgcctaagacatatccacccatatcctgacccccaaatgcaggcagatacaagctaaaccaaggctcctgaaatatatttaaagcctgtagtagaaatctcacaaagatagtttagattgcaaactacttcagatatctggtattgtagaggtttttaaggataagtccaatgtaggatttgtgcccagaagctatttgcaaatttatggttattttttcagttaattagtttgagaaaggaaatggcagctaagtaaataaattagatcattaatttgcaataaatataaattaattatgctaattctaagagttgaacacatatacgtattttgtatatataataaaaataaggaacatacataagactattaggagaggaaagctaccttgactgttgtaaaaaaatccacgtatatgtactcagtagattttaacagttttgatatgtgcatgaaatataaaagaataagtaactacctactgatgttcaaacaaacctattttcattccaaatggaaattagaatatattctgcattatttgagttaattacatgacacttcttataaataatgatgtattattattccattcattacttctaattatattccttagcaagtgcgatgcctgcaacaccatgaccagtcttttcctgttccttaaaatctgatgacttgcatggaaagcaggtcaaaaatatgcccagaatataacgaacagagttcagtgattgttaaccatgacagtttaaaactacttgaaaaagttactgtggaaataaatagaaatggtgaacagctttccaaattacaggatacccatgatagcaacataagaaatatttgaagtgttgtctagatacatataattatcattctaccattcactagaattggagaaagaacacccctaatatccctctcccccagcatacatacacattaacagaattacattctgtgtagatccgcagatcgtaaagatacacatttctggttgcaaaagtgactctacagcctttatgcaattctgagaaatgtacctgctaaaagtcctaatcaaaatgacagttgaatttttctcctgtaatgcataatcaggtcaggccagcccaccccatcccatgcacagcacggtctggggctagaaggtaaaacatagtatggaagacaggtcaagatcaaggaaagacagttaaaactatcattaagcaacagggacctagtaacccacaaggctactttgtacatacatatcctcaccagagagcaggcagcaaggagccagaagagtcaaggaagagaaggcagatagcaggaagtagtctagatgaggtctagagaccaacatgtacatgcctcaggaacagtgtttcgtgggtatgtcaccttcattttgaaggggccagggcaaagtgcacaaagtccacacatttttcttcatccaatttcaaaccttccttgcacacatacaaagtacctacttaattccttcagcatcagcttccaacaatccattgttctgtctatgataaaaaataaagatgtcagtctcggctccagaaacaaaaaataaacttgggagaggaagagactagcaaggagggcttccccttcccctctagtgcccatcacagttactgccttctgaccccacgtgcagcctgagtcctcaaccttggcagctcactaccaactgatcagctggtatgtgagataaaatgaatttgttttctgcattgtaattctttagatggcaagtcaagatggatgatggtcacagcaagtttgtcttacaatgggagttggcaggattctctgtggtggattttagacactgaaaaaagatgttggtcaactttgaatgatgacagcatccaataacttcctttgttcccattgtccagtgctatcagaagctgcttgtagctggtggccatgtactctaataacccaagggtaggtgcacattcatatggaaacctttcccacagaagtaggaaaaagaaaggtccaacttaacagtcactgctaaatgcatgtctttgaacacaataatctgccaaatgaagtcaagaaagaaatgtgaccacaagaaaaccaacttgccccactacaatggacagcaatattgtctttgaacatttctcctccaaaagctcttaagctggctaatatacaacaagcatgcacagagcaaagacaagacatgtgcttagggaaattttaagagcaaaaacctatctttagctataaagatattaaaatagtgcttgtgctcattttacttgtacaggaaggtttgaaaagaactcttttttttttttttttttttttgagacggagtctcgctctgtcgcccaggctggagtgcagtggtgcgatctaggctcactgcaagctccgcctcccgggttcacgccattctcctgcctcagcctcccgagtagctgggactacaggcgcccgctaccacgcccggctaattttttgtatttttagtagagacggggtttcaccgtgttagccaggatggtctcgatctcctgacctcgtgatccgcccgcctcggcctcccaaagtgctgggattacaggcgtgagccaccgcgcccggccgaaaagaaactctttagagaaatgaaagatcactaataactgcagtttcctgaacaattaaaggaattcacaagattacaacctactgaggaaatgacaaatatttctgatttttatggaaggactaaaagggcgcttttatgtatagcatctattctgtaagaatcactgttaagtaatgaagctatttttattatttttccacttatttcaggaacactcaacatggtaacggtctgaaaacgggggaaacttaacattgctctttggaaagttaatattccgtattaaaagatatttgtcagagttttcttttttaccttttgaatttggatcttggagcactgtttgcatggtagccaactttttatttctaatgtgtcagcagaaatgttcttaaagttacctagtctaattctctcacaaatatactttgtaaggctgtccctacatgcatcatcctaatgttgtatggccctggtaacattctgcgtgagatggtcttgattggaaaaatctgctctttttaataactgattcaataaactgttgacgtatgatttgtagaatacagtatgatcagtgagcaaggtttctgtcattacacaccctattcaattcatccacaaatgttgctgtgtctccctcatgttgcagctccttatgccattcagaatagcaatgcagagatcaatacactctctgctgaagacgacagaacaaatgaataattttatttacaatgaaagccccagtcttcaaatggataccactaatgtttaaattcattttcatgctcaactcaagaagagagatagacacagcacaaagcaaagggagtgggggtaaggagaagtattagccataatggttcaaatttatttaagccatgaacaatagctgggctgcactgagacacaggaataaaatgtttgctgcagaattctgaatgtgtactcttcaaaatgattctgtcaccaagaaactctgaaaagcattttccagtaacaagaaattaatggattaaagacattctgacatattcttctaagcgttgcaccacagaagccaaagcctgttcaataggctttaaacagtgttggcaaggaacagaagcgtttgcttcaggtgggaacaaggagggactgaagtggctgttttgagaatgaagcaaacgatcctgcttcaaaagcgtatctttggcctctgatttgacagttctttttctttctctgaaagctatgaaaaagtcagtgagcaaagtcataagaaataagtgttggtgaggggcagcaaaatgttataagagagacaagttcaaagatgacatttacaagcctctcatgaatggcacactccccaaagggcacctgaatgccatttttaagaagaagtcatcaaacatacaaaataaaatgttccattttacataaagatgccaatatactgcccttaaaacacagattggtccattcacaaattaacatgtaaagaaatggcaaagaaccttctcccatctgccatcaattcattcactgcttttagatttaactccctacactcacacgcttgtaaacagaattgtaatggacaaaggatgaaggggaagctgggaaaacctagcttggacatgatactgaaacatctggaaaaaagtggtgacaagacttggccttggggatgggaaacgggaaaaggtgggatttcggcacatcctgtctctctattctgttaactggaacaatgcatatactcctgatgtttccagcttcactttagattcagtgaacacagtacatttggatgctaagaaaaaagagatgtgcaagagcaggtctcgtccataggaagcaaagactcagtgcagacagaaatagggatgcacgtactttggatatgaggcagactgggctgtgtgtttggtcttggtacctggaacagagtatgagctcagtaataaagtactgaatgaatcaacatgagaataaggaagtgagtgtcacaaacagaggacagagttttgttttgttttcttccctaggagcaggggacagttatcaaagcacttcagatgaaatgaaaagcatggggaggaatctccagttgaggtgaggggcaggagaaagtatagtaaagggatagtacaacacatattcagggaacagccggaaagaagggagactgagccagtacaatgaaggtccttaaaaactattctaaggaatttggactttatcctcaaaaaacagacattccttattggtttattaacaagggaagagaagaatgatatggtcagggctgtggttcagataaagttataggctacattggaaaagcccagaggcagggagacagcataaatctagatgaaccacacctaagggctagactagggcaggcaggagagaacactggaggaagataaaagcccactccagacatctcaccatttatttatgaaatgttagtggacagagctatccacatcttccattctcaagtctcaggacaaaagactagagctttctgcaagcaaaggagtaccttattaagatgcgtctcccaggccgggcgcggtggctcacgcctgtaatcccagcactttgggaggccgaggcgggtggatcatgaggtcaggagatcgagaccatcctggctaacaaggtgaaaccccgtctctactaaaaatacaaaaaaaaaaaattagccgggcgcggtggcgggcgcctgtagtcccagctactcgggaggctgaggcaggagaatggcgtgaacccgggaagcggagcttgcagtgagccgagattgcgccactgcagtccgcagtccggcctgggcgacagagcgagactccgtctcaaaaaaaaaaaaaaaaaaaaaaaagatgcgtctcccagttgtaacatggcagagtttataaaggtaaagtaaaataaaaagttacaaaatcatcacataaaaagcattgtctgaatacactgtctactggccctgagactgttttaaatactgcagctgttaattagacttatagagtataatgattttaaaaaagctctggttctcattgttcttataatcagagagggttggatccttcttgctaccttccaaacaaactgaagtgtgttaattttaataaaatattctccgagcccttggtatttactcaaatataaagtaactgagcagggttcatttcccaaatggtgacaccagtgccatctacaaagaaacgagttgtcattcactacttgctcactattcactacagatattttcctagacatagacatttctacttttcttgagttcaaactcaggtatgccctggttttagacatcactttttctgagtttgttaaaaagtctgaaatatcaaattactctcaagatatgagtaaaaaaactacaaagcagagttcattccattattaaccattttaaaaagtggccaacatggcaaaaccccgtctctactaaaaatacaaaaattagctcagtgtggtagtgcctgcctgtggtcccagctacttgggaggctgtggcacaagaatcggttgaacccgggaggcagagattgtactgagccaagattgtgccactgcaacttagcctgggctacagagtgagactctgcctcaaaaggaacaacaacaaaaaaaagtggtacatctctgtgacctctaattttcataggaatgagagtgaatttagacaaatggatcttgtctaaattcatattttcatcccaggtccctttatttcttttctaaaagtcagttaaagctggcacctagagagagatggcatttaaaccatattcttttaacacctgaatttacagacattttgctttaaaaaaccccaaaggaaaaagcccactacaaacttatagcaaaataaaatgttacttcaagaaattcaggtcttttaaaagatttcaatacacaattggtattaaaattaaaagtgctgttttctagggcttttctaaatcattctagtgtttttttttaataaacagaagaaaatagttttctaatattatttagactcatttaaaagaagagttttaaatattaagaaaagcttacatatttactagagtattgcttattagttttctaaattaatacaatttatttgactagaatttggattccagaaatttgggagtctataatacaatcacaattatcttttggtacatgtttttcttatttgtattttttttttttttagcatacaatagttacgtggctagaaaagaagcttgttcataaagttctcaggcactttccacattttcactggaaaaaaaatgtagcttactctgaaaaacctcttggcatatttgtacattcagaattactaagaaattcatttcaaagcaaaatcatgtctcagcgtggaaaatacttattatctgaaaatatcaaattttattctgttgccttctgcatggcaaactaagtgaaggaggaaagagaaaaacatcctgaagagtccgtacaaaattcatatgcacacaatcaggagtgaaacttttaacaacataaagataacttcccaagcatttcaccaatacttgttattcccactgcaaaagaataaagctcctattgaagtctataggaggaaagactacaactcagtggtcagagggaaataaaacaactccaccaatgacactggtcaatgatctgcaagctggtatttttcccaagagaaaatgctatttcaggtcctaatattttttaaaaaaaatttgtaagtatatctataatataaatttaattaaaacgcacaacttgaatgatctccaagaggtaaagcaacaaagtcagtctcaaatcctcacatatcttacttccacatcacaaaggcaccactcaatctactattaaaattcacaacagataagctgaaaaccaagtgcccgtgatattcactgggctcattttagaagcacctatttatttactcagctatggtagtgaaaaggtcaagcaaaaattcacctccaaagccacggttgctaagcaactctcctcagaagttctgcaacattgatcaagcatattactggtgccaccaactggattcagaataaatatgagtaacatcttacctggtgtctccgaagtgggagggagatggattctttatttacctttttggacagactggaggccaatcttgtatttatattcatttggctggttaggctcagaagacttttattttccctctccaaaaaaaaaaagaaaggatacgtcctggtaccacaggtttcctattcacaagagcgaaggacagttctgttttgagaaacactacagagggcttgatgagatgttggccaaatctgaacgacatgtcctcacagttgaagtctaaaagaaaagacaatggatagttataaaattcaattaagaaactcagttcatataccaccttaaagaaagcaaattccattactacagattcttagttgcagagaggatgccattgaaattgttcctcattgaatgttcaccaagatgcattctgggaaagtctttctaaaatactccactctccctaccagtgtttccttgattagagttagcaattttcaagcagaagcttccacgtggacaataaaacagcttttccccttcactccctctgcacttcacggtgccaccttaactcaaatccacaaggccctatttgtcagctacttatttttacccatctattttgtcatgtctgctaagctgaaaattttcattaagtattaactataaaccttctaattcttaaatgcttctctcaaatggttttgtgttcatataatagcaatttagaacaagtacgaacactgtctgaccttgcctacaattacaaaaacatgagcacttccagagaactattctagtaaaatctccaaaataaaggagaaaaaaaacatttaaaaagaaggaaggagcaaaacggagttcaaaactagaacaattcctggttgtaacagggccacaaagcagcaaggtacctgaaatgttctgcgtcttccttttgagggaaagccatggggggccgggggcaggaaagggaggctgaagggaatttggcaaatggcacagctgagacaagccaaatccatctagcaccaaggaatgacttttcaatcaggtggatgccaatacatgacaaagttactttgtgaatgactaagacacactttgtgaatgactaagaaacaccatccctagaaaactacttcatttttctaattcgggaacagcctagtatgaaactgaggaacatggatcaatctacagaaaaacagagaaaggattacaaaaaggatgaaattagaaaatagttggctatttgtgatatgcatttggttttcaaccccatttcctggcacgcaactcctaaaatccttagaaactccaaagtgatgtctttttgtatgctaatgattgactggtgtctagcagcctctaagagtctaggtagcttcaggatggggttgatcacaagaaggaccaagcacacttatacaccaataacagacaacagagagcaaactcatgagtgaactcccattcacaattgcttcaaagagaataaaatacctaggaatctaacttataagggatgtgaaggacctcttcaaggagaactacaaaccactgctcaacgaaataaaagaggacacaaacaaatggaagaacattctatgctcatggataggaagaaccagtattgagaaaatggccatactgtccaaggtaatttatagattcaatgccatccccatcaagataccaattactttcttcacagaattggaaaaaaactactctaaagttcatatggaaccaaaaaagaacctgcattgccaagtcaatcctaagccaaaagaacaaagctggaggcatcatgctacctgacttcaaactatactacaaggctacagtaaccaaaacagcatggtactggtaccaaaacagagatatagaccaatggaacagaacagagccctcagaaataatgccacacatctacaactatctgatctttgacaaacctgacaaaaacaagaaatggggaaaggattccttatttaacaaatggtactgggaaaactggctagccctatgtagaaagcagaaattggatcccttccttacaccttatacaaaaagtaattcaagatggattaaagacttaaatgttagaccaaaaaccataaaaaccctagaagaaaacctaggcaataccattcaggacataggcatgggcaaggacttcatgtctaaaacaccaaaagcaatggcaacaaaagccaaaattgacaaatgggttctaattaaactaaagagcttctgcacagcaaaagaatctaccatcagagtgaacaggcaacctacagaatgggagaaaatttttgcaatctactcatctgacaaagggctaatatccagaatctacaaagaactcaaacaaatttacaagaaaaaaacaaacaaccccatcaacaagtgggcgaaagatatgaacagacagttctcaaaagaagacatttatgcagccaacagacacatgaaaaaatgctcatcatcaatggccatcagagaaaatgcaaatcaaaaccacaatgagatacaatctcacaccagctagaatggcgatcagtaaaaagtcaggaaacaacaggtgctggagaggatgtggagaaacaggaacacttttacactgttgctgggactgtaaactagttcaaccattgtggaagacagtgtggtgattcctcagggatctagaactagaaataccatttgacccagccatcccattactgggtatatacccaaaggattataaatcatgctgctataaagacacatgcacacatatgtttattgcggcactattcacaatagcaaagacttggaaccaacccaaatgtccaacagtgatagactagattaaggaaaatgtagcacatatacgtggaatactatgcagccataaaaaaggatgagttcatgtcctttgtagggacatggatgaagctggaaaccatcattctcagcaaactatcacaaggacaaaaaaccaaacactgcatgttctcacttataggtgggaattgaacaatgagaacacttggacacaggaaggggaacatcacacactggggcctgttgtggggtggggcgagggtggagggatagcattaggagatatacctaacgtgaatgacaagttaatgggtgcagcacaccaacatggtacatgtatacatatgtaacaaacctgcatgttgtgcacatgtaccctagaacttaaagtataataaaaatatatatatataaataaaataaaataaattaaattaaaataaaaaagaagaaccaaagcaggattatagggccagaacattcagccccactcctcaatctcccaggaagagagaggggctgaaggtgaagttgatcaccaatggtcaacagtttaatcggtcatgtttacataatgaagcctctgtaaaaacccagaagaacaggtttagggagcttctggatagctgaacacgcagaagttcctgaaggatggctcgccctgggagagcatggaagttccatgctctttcccccatacctcaccttatgcatcttttcatcagtatcctttgtaatatttgctgtgataaactggtaaacttaagtatttccctgaattctttgagttgttcaagcaaattgattgaactcaaagaagggaccatggggtccctgatttatagtcagttggaagttccagaggcccagacttgcaactggtgtctgaaagtcaggtgacagtctcatggcattgagccctcaacctgtggaatctgaggctatctccaggtacgtaacatccaaattcttctgaaatgaatcaaaggacatccagctggtgtccgctgctttgtgtgttggggggaaagaaaccccacacatttggtcacagtagtagtctttgctgattgttgttgctggtgtgaaagcagaagaaaaacatgttgagtgtatttttttccttattttatatagcacatgaataatgcatgattgtttaatgattctaatattctcaatgacacagaagacagagagctgtgcaaatgtcacttactatggacacacccacatagccagaactgtacacatttcaggtactaaagaaataagataggaaggtttgccccagtggtacaagataatggtttttagaacatttacaaccagctcattaaaaacccaacagttctcaaggtgacgtccctccacaatagcatcagcatcacttgggaacttattagaaatgcaaattttgaggccccaccccagacctactgaaccagaaactctgggacaagggcccagcaatcaaggcttccatagctgtccaggtgtttcagaaccactgaccaaacccaactatcctcccaatccctgggccttttcctacagaattcctgccaaatggctgcctagcatatgcttgaatatgtccagtgatgggaagttcatcacacattcctcctaagacagtcaactctacaaataacatagttgctctttataccaagtccatctgtttttcatgactttattccttgggatcatataaaacaagtatcatgcaagtggcagtgcttcagatatttggagttagctatttttcattttttcttgtttttcaagaataaagatggcaaatcacatccaccattctacaaacagcattgattcaagtgacctgtgattatttccctccccagaatctacttccttagagtcttagctgtaccactttgattttttgcttttagtaacaccccaccatattctacatgtggggctattcgtactacctggttctagggatgggcaagtgacccaggcacccatagtcctttgacatatgattggttcgggagtggacacaggacacaaaatgagccaatcaaaggcaaggacatccttcagagtaatactgctattagtaacaatgccactttctttcaactgagttgccaaactggtagactatgaacctgaaacagctacgagttttcctaaaaaagagctggcttgatgtgagagccaatactgaggcaaagacagtgaagacacagagacccatacctgatgacactgtctgagcacatggatctaacattgccagaagaagtcatgtaccagaagtttctttcaggataatggaatagaattgacttagcacaggctctacttgatgagctactattatcatgagcccatgaaaggctcttctttttcttttcacttttccaatcattttcctttttgtcctctgtgttcagtcccattccctcccttcccaccacagaaattcactttttcataattaatgtattattcagaatcctctttacatgtttgtgtacatacattttttgtcaaaaatacacagggcccttatacataatttttaaatttgtatataaattgtaggttttaaatcccattcttctgtattctctcaacattgttttagaaatttatccatgttgccataaacaattccttcactgcattccactgtagtattccttgcccattcctctagtgctgtagagctagcttgattacaaccttttaccacaagttacactgtgactaccattcttacacgtttccctggattcctatcttagcatcccattgttgggattcaggtcagatacttacttagattttctaaaatatatgcaccagcttgcacgcccagcagcaatacattaggatttctattttcctacatccttaccagcacttgatagtacttcctgctttccaagtttttaattattgaatggtaaaatggcgtctcttccttttacttcatttgtctctaatagtgtgatgtgtgtgtatatgcatgtttctcttcttatgaattgccaattcatatactttgtcctctttcatattgctttcctcccttcaattttctaattttgtagagtcccttgtatattctaaatattgatcatggtctattaaacacaataattatattttcaccatctattaatttctctatcgttccctccattgaacagaaatcattcattttgatgtattccaagtccatcaattttctttttatagtttgtgctctgcaaatctctccgaacaaatccctctctaccataagtttgcaaatatatatattcctatattttcttctatcgactttatattttcatccttaacatttaggtatttattccacttggaactttgtttatagtatgaaatacagaaacggcttcatttttctttttgtgagccaattttcctagtaccaattcctgggaatgattacagtaagttcccatatatacacaggaataagtctagactcctttctattctgcttcagagccagacgctgtagaacaaaggtcgcacatttttgcacattttttttttctgtaaaggaccagacacagcaggccacacaatgtctgttgcaattactcaactttgtcatggcagcatgaaagcagtatgagtaggcgtggctgtgccccagtaaaactttatttgaataaacaggcagcagcccagatttggtttatagggggagtttgccagctcctgctgtatcttgttaatgtctaaagaaaaacagagatcctctttctgtatttattatcccatataaattttagcctccactctgcccctttcaaaaaaaaattcttagatgttgattagactgaatttaaattgtaagatgggtgaggggaatgtgacatcttcaaaatattcaacgaagccatttatgaatgctgcatttatgctctttaataccataataaaactcttgtaatagagttttaaatttcccttatatgttttatgcattctatcttagatttattcctagatagcttttagtttatgtcactattataaatggtatcttattattgtcatagtttataattagttactcccaatacagcagaaagctattgatttttctacgttcttatagctggcaatctagctgaactcttgcattgcttctaatggtttctgctgattctcttttttgttgttgttttgttttgttttcagacagagtttcgctctgtcacccaggctggagtgcagcggcgcaatctcggctcactgtaagctccgcttcccaggttcaagggattctcctgcctcagcctccagagtagctgggactacaagcgcccgcaccacgcccggcttttttttttttttttttttttttgtatttttagtagagacagggtttcactgtgttagccaggatagtcttgatctcctgacctcatgatccacccatcttggcttctcaaagtgctgggattacaggcatgagccaccgcgcccggacttctctttgtttttatatatatgatttcacttagaaataatgataatcatatctttcatggcaattttcctactttcatgtttctttgtcatactgcattggtcagctatgtggtaatgtattgagaagcagaagtaacacagggatccttttcttgttcctgaccttaagagggctgagtttaaacttctttttttttgtattatgaatgatgtctactctaggtttttaatatgaagcctttaatcaagctaaaaatatcccttctatttcaagttttctaagggttgatacctttttttaaaaaaaattggttttatgaaatgcttttcctatatcactgatgacacaattgcttgttccgtgccattaatgtggcaaactacattagcaaatttaaaaataataattcactattctttccctattatgattaattcaactccgtcacaaggtattattttttaatatactgctagatttgaattcttagccttttgaatgtcataagtgaagttggccaataatttctcaacctatttttttttttttttttttgagacagagtctcactctgttttccaggctggacacagtggcacgatctgggctcactgcaaactccgcctccccggttcaagcgattctcctgcctcagcctcccaagtagctgggattgcaggcacccaccaccacactcagctaagttttgtatttttagtagagacagtgttttaccacattggccaggctggtctcgaactcctaacctcaagtaatccacctgcctcagcctcccaaagtgctgggattacaagcatgagccactgtgctcagccaacttatctagtttttgttatcaagattaaacataatagtttggtttttcttttttgttccaaagagagtttattaaacgagcattttctgtttcatgagcgttaaacaaaactcttttgtcaaactgtgtctttttctcctgtgccagaaaggactaagttttgacaatcattacaatttattgttttctgatttactaaagattttttttttcttgtatcaatttcttagccatatatccttttcacataatactggtaaaaacttatattctttttactggatttaaaaatataatctgtaattatctcttttacctatttcgtattgtgtttatcatggtacatggagatgttttttcttcatctgttattcaaaagtaagatctatcctatgaagttttttaaataatgaacttctggttctttggcttttatgaattatttttactttattaccacatttgtatttatttcctctgatttgttttcctttattgtttctttggatttactatgttgcagtttttctagttacttgagtcaaaccttgggcttataggattccagacttagtgtttttctcttgggtaacaaaagctatatattgccgtgaaagtattccattagctctatctctcacctactgtgcttttattatcactccgctctaaaactttgctattcttgttattatttcctatttaacctgagggttatttcatagtatgtcttttcatatccagatatataggatgtttttgctatctttttgttaacagtgtctgattttatagcactgttgttaagagaacctctaagctgttgattttttagaatttgaggcttcctgactcattgaaagttgaagcttgtgtctaatccacatgccctctgaaataaagtatgctctgcttttgttgaataagttctatatacatgagacatcaaattgttatccaaatctctctttgtctcattgcttcattggtttctgagaggactgttttaaatttctaactatatttgctaaatcaatgtctaacgccataaattattgttttctgtacctcaaagctacattactacatgtggatatgttcctattcatttcactcccttggtcttcttattcctttttcttctttgtatttgacaagtataaatttttccatcaccttacattagcgtgtgttctcttgaatttttttttaataaaatactatagcatcttgttttctatccattaaagaatctgctggataagtttaatcactacacatttacactaattattctttgagcttatttcagatattttatcttttcgtttgtttcacttcactttttctcctgtctaccttccacgggttaagtctggtttttctctccccatgagtatgaaaattacacattctatttttatttcagtagtggttattcgtgttcttatcctatccatactaatgcttagtgtttaaaagcagatcaggatctttatccttagtatattcctacctcctttcatctcttccagatatcatatcccatcttcgtcatgtcctaacttttatgctgaattgatattgttataatttcaaataatgctttatatgcttttttacccaccatccctctctccccacttactctactgattgtattttcatttgtcttgtttacaaagatgtaaggacattcccttctcacaggcagctgtgggctccagcaccacctgcttcttttgaatcttactttccctttctggcctttagtcctcccttttcctcaaaactaggctacacttttgagtggataaagagtctcagctctgccactctcttcctgatcttccagaattcactgaaccttctaatcctcagacatctcatttgaaaatagtagataatgaagtatacaaagcatgtctcgttgtctgccacatgatgtaggtacccttaaatactaatagttttctctctttccctacccaaatctaagtctacctcttttttaattgtggtaaaaatcctccccatatatgctgctagtacacctatttcttcaagttttaatttcaatgaagaagaaaaatattctaggaactctaaaagggacaaaagcattaaaaagattaagagtcaatagagtttgatgggaaaatttgtgcatctccaggatctgaaactgtctccaagactgagataaatattaaatactttcctttcacataaaaatggcagaaagcaattttattttcagataagtaaaattgctgaatctttctaccaaatataaagactagatgtaccaatattctgtggaattttccagggaaaatcatcttcagggaactgcttcttagcaaatatggagatggtggtttctgtaagccagagaagcaaatactggattaggaacctcagtccaaggtttagacccttagacttgtagtgagcattagccaagaaggaaatacaaggaacttggtttactctagaaatggtaattgaaccctactctctctttataaacaaacagaagtagatacataaatgaaaaaaaaggtctcacatttctagccgattactttcttctttatttttttggtgaaaacttcttttatttgggactaaaaatatatgatttcaacattcttaaatgagtctccatttcccacttttcagccataaaaggtagcctcttgctacctctctcttatgacatatttgtaccctctctacctcctataaactacctttacatctgcatctcctacaattctcgccagctggtagcataacacttttagagctttatctttaaaatttaataaacataaaagaaacaatgaaaagatctctactatccttttgtgtgtgactcagtggatgtgttcagtcatttttttgacagggctagataggcaacctaacttgtagtagagtaaggttcagtgacacaaaagcaaatgcaggccccaaactgggaaatctccaagctgtgaacaggaactgacaatagctcacttcagggtagggcagattctttttccggatttgctttcaaatgttatgttaacatccaactaaagtaacgaaatctcttttggtattgccaaaagagattcacatttgagtcagtgggctggggaaggaagatccacccttaatctggtgggcacaatctaatcagctggcagtggatataaagcaggcagaaaaaaaggagcacgagagagagagagcgagagagagagagagagagagacactcttcatagagaatattattcaaggatttcttaaacttgggaatataagacttcagggccctgatttgggaaatactgaattaataacaactctgtcactttaggcaatccctttgcactaaagccacatagcagtactctgttatcagacaacaagcagctgatttaaaatataagcctatatctgtcattttcatattatttcatcaaatagagaacaataaatacaaactttttgagagcatgagggccttcaaaacccactggccgaagtttaagaaactcaggccttcagcaaatgcacctaagaaaccaagctcatgaagatgtgaaattctaatcaacagattacctgaaaacatttccatcccatttcatgatttctctctcttttctgtagcaaatgatgtttttggaagaaaaagagcgcatatttcccttgcctggctactcaaaatgtggtcctctaagtagcaacaacagcatcacttgagagttgtaagaaatgtagattcccaggccccagcctagatgtaatgcataaacctgtattttaacaagatccccagctaggctgtttgtacattaacgtttgaaaagcacatctcagagcactagttttaaaactaggtctattaagatcaacttgagaactttctcaaaaaacaaattcctatacttcatcatactcttgactccaacaatctctgcaacaatgtagctaacccatcacggggatttgacaaacatggcttccgattgtatcttctttccaattcattttatgaactcaggcaagttccttagcttctttaaatttgagaaatgagtatgacaacagtaccttcttctcaaggacacacataaagcacttaaatatttgataagtgctagtcacaatattggtgtattttgccttgacaaaagtaatgcctaattttattcaataaacaattgttaattgtcaactcatacataagctaatattgttaagttgcttcgtataatgcttatcacaaaaatggtatgtaatggttacataaatacaaataaaatcatgtatttgacaccatactgccattaggtgactactatctctccatattagaggtagagcagtgtcaaaaactaccatctgattaaataatagaaataacagctaagtacttactcggtactttcatctttctaagcaatttatatgatatgttacttaatcctgacaaccctatgaggaaggtccttcatacaccaacatatcaacatttatgcatctctttgattacttctcatgcattaattcctagatttgagaatcactgtgttcaaagtatattgaactattaaggctacgggtatgaactactaaatagctctcaagaaatgtagccaatagttgatatccaacggttgtatagaaaaaagtcccatttccccaaaactttgttaatgccaggcattctctaattctccaaattgctaataaaaatttgtcatgacttaggaatacaacataaagggaaataacttcttctaaatgtcctagataaaacaatctaccatgaaaattaatgtctcctaggcaaccaggaagtcagacacaatgaaaaagaaacactgttctcttcgttaaaagaataaaactgtgtttccttttaactagaaaaataaagttgttatttcattatggccaggaatattaaggttcactgtaaaaaataatctgctatttttataccctggcattactcagtgaatggcaaaaatctagaccaatcctagaaggcacgaatgtctttgggggatgtcagaaaaagccttaactccagacacttctaccaactggagagtaggtttctatttcaattaacttaaacactaggggctcaattgttaaccaagaatgtaaatgagcttattaaaagctgctggctaatggatcccaagatgaaccttgagaggaacaatgccctgtcatctaactgaggaacaacacaatctgatctggccccgctctgaaacatactttattgatgacttggaaaacaaggcacataaatgaatggttggagacatatattgaagtttatatgatttgtaaaacattctaatctacaggcgtatgtcaaaattccacaggagacagtagaagaggatcctagaagaagataacaaagtgaacaaagagaaagagaagacaacttgaagtgtcccagaatttaagcaaacaagaatacctgtaacatttttatacaaagagaattttttagtgaagtatattaagtcatcaacttatgtcactaaaaaaattttcaattgttaacaagtcaaagaaaatccaaaacctcagctatttataaacagaaaacacctaggtatttcaaaatgccaactgccttttcaagatctcacttcatcagttacctcttctctgttctgtcattttttttttttttgtaaacctacttgttttacatatttaacctcattctcaccagtttcttccctgtctcctaaaaagatgttcagggattacatatacttaataacctttcctcatcaaactctaatcacctattcatttaataaatatgtattatatacttgccatattccaaatactattctagtggtaaatatgacagaccagccctctgctctcatgtagtattctaggcacagggtgcatattgcaagcagtagagactacaagccagtcaacaaggaaaaatattctgattgtgacttgaaggaaatgatcaaaatccaagaacaggaagggacttggaggaggcagaagtggctgcctaagtgtcaaaggaaaggggaatctcacgtttgatctgcgagttgaatgataagaagtccactgtatgtgactatatggggataaaatgttccagatggaggaaacagcaattgccaaggcaagaatgatctcaagatcttagaggaatggaaagaagagtgtggggtggagcctaacagcaggcagcaaggcagaggtgaggagatgggtttgaaagatgagcagggatcagatcatacaaggtcttgtgtggcgtttcacttaatgagaaactcgtgataacaaagattcaagctccagagtgttcagggtctaaatttgactttcaaaaaaagattttactattgtacattaaaaatcatctcaggacgcctggtgtggtggctaatacctctcatttgggagaccaaagcagaaggatcccttaagaacaggacttcaagaccagcctgggaaatatagtgagaaagaaagaaagaaagaaagagagaaacagagagagggtaggggagaggggaggggagacgggagggggagggggaagaggtgagacgggagggggggaggggaggggagacgggaggggggaggaggggggaggaggggaggagagaggagaggagaggaagaaattagctgggtgtggtggcatgcacctatagtcccagctactccagagaccatggcacgaaatgcctgagcctgggaagttgatgctgcagtgagctgtgatcatgcccctgcactctagcctgggtgacatagtgagatcctgtctataaaaataaacctcaggagcttaaaaaaaagcatatgccccattcccagattatttttctgttaagacttttgaaaagtgacatacaattcatataccataaaattcacccttctagtgtacagtttgatggttttcagtatgtgtgcaaaattgtacaattatcataactacctaattcagaacatttttacccccaaaagagaaaccatttcctttagcagtcatttcacattttcctctagcccacagcccctggcaactactattctactttctgtctctgtggatttgccttttctggacattctatagaaatggagtcatacgatatatagccttttatgtgtagcttatttcacttagcatgtgttcaagattcatccacattttaccatgtattcatcctttattccttttaaaggctgaataataccccattgtatgtatacaccacatgtttttctccattcatcagttgatggacatttgttactacatttttggacgtttgtgaatagtgctgtgaatattcaggtgcaagttttgtgtggacttatgttttcaattattgaacgtacacctaagagtgaaactgctggatcatgtgggaactctgtatttaacattttaaggaactgccaagctgttttccttagtggctgtaccattttacattaccaccaccaatgaaagagggttccaagtcctccacattcctcaccaacaccccactcccagatattttaaattaattggtctggctgagacctagatatcaggcttttttttggtttttattttgaaagttcctatggtgattctattcctaacgtatagtgaaggccaagaagcccttactccagcctgttcattgccaacttggtaagtatttatacctactccctcttcctgataagtattcatacctactccctcttctgctccagagctctttagacatgttacttggtgcccccagcactctcaatgacatctgctttgtagctgactcatccagtgagagaaggaaagataattaaggaagatacagtcttatacttttaacagtctcatttatttctgagtggggccagtgtctgtgtgaaatcttcatggttatctgcatgtctggatgggttttctccaggcactctggtttcctccctcattccaaaggtgcatgtgagattaagaggcatgtctacatggtcccggtctgagtgagaaggtatgtagagtgagtcctgagagggaatggcgccctgtccagggtgggctcctcccttgggccctgagctgccaagacaggctctggccacctgagaccctgaactgcaatgaatgggtaaataattatcttgcttttattaatctttcttataatatgtagacatcatctttatttctgtatttaatattaacaatattttggtttttatttagaagtttggtgatgtttttgtgaggagaaatatgccacaggaattttttttttaatcagttagcctatggtcaaattggtttcattatacattgttttggttaaagttgtagtttctaagaaacctacctatgactcaagtgaggacttgtgtttttacgtaatgtgaatcagcaacccccttcttccactgattgatccgacggagaccttttatgcaaaaagaggtcactgctttaaaatatatatatatatatattttatatttattttatatataaaaattatatatatttaaaaaaatatatatatatatatatagagagagagagagggagagagagagagagagagagagaggctcctgaagttcttctcatctagtcaagaaagatatagggtgtaaatggatacttctatgttttatgcttcaacctgaccttgagtattaaacatggtatcatatttacaaaaatgtataacatttagaactacttttgtcactttataaaatgattcttccaaaccaaacacaggtgatgaatatctaaaacaccagcatcaaggcctagagctttgtgtttgtacaaaatatcagggaaaagccaagcacagtggctcacacctgtaatcccagcactttaggaggcctaggagggcagatcacttgaggtcaggagtttgagaccagcctggccaacactgcaaaaccctgtctctactaaaaatacagaaaattagctgggcatggtggtgggcacctgtaatcccagctacttgggaggctgaggcaggagaatcgcttgaacccagtgggcagaggttgcagtgagccaagattgtgctgcgccactgcactccagcctgggtaacaaagcaagacttcatctcaaaaaaagaaaaaaaacgtatcagggaaagacagaaacctgaataaaaaggaaacagatttctacactgaaggacaaagtatggcatgacttctcagtctgatggaggccgagattcgtttttttcattctgagattcatcttaacggttaaaaaaaaaaaaagaacaaacaaaacgaaacccaaatcatgtttttcatgtggactgtaatagcagagacgaacttacatgtttaaatacaaaaacaatccttaaagaggagaatcagaagttgaaaatcaccttactgttatgtatctttctggagtaatcaaaatttctactatattatagtctctataccatcaaaaaatccacagatatcacagatattcatctccatggactgtatgaagacattgtggacatattgggacatcaactcagaaataatgtcaaaagcttgtatggtaaatctgaatcaactgtgatctttcagaagcaggagcttccaaaggggttcctgtagcatccctttatcagagcaaggccagtcagaggttaagaaacattgggtcttttactttaacacttctcacatattattttaaaaataaataccaaaagaaataccaaaggaaaaaccacataaattatattttgaacatttacattgaacaaattaaagttcccaacataagtgaatacaacataataattactattctgcatatgagagaaattattccaccattttttgactcctgaattgttggcaatattcatggcaaagcaatgctgctcataggtttttgctaaaacggagtataaggctaattacagtgtcaattatagctatgtatcatttgtactctatagacttactcctattttaagtggtctaccatattcttctaatatctaacggtgttattcacaagataactacatgactgatacattttttacgtaacagtgtactacaggtggtacaaccttgtaagagaacaagtttagaagtatataatgcacatcttccttcaatcctgtttattagcatatggaaaacacatttgaagataaccagatataaattcaaggccttgaatccaaagccgtcccaaactactgattccctgtgttcttccaggccctcagaagatgtcggttaaaggaaatcataaaaagtcaaactatagcctctgtgttatgtccccactaaagccagtatggccagactttactgtagctgagaggttcttgctcatggagtcttgaaatagagcttcccaacttcagcagagatgcctattatacaacattaaataaaagacgaatttaaatgaatcaagtcttgactcttcttccaccatcatgggttttacagaacagcattatccagggctccattcaaggtaattttgctttttcattgcttgacaaatgctttcccatttccctgcaccctagacaaattggtatttctcagcagctcttagaatgacaatggcagttttctcttcatcgttttttcatttcttcatcctctcgccatgagaggcactcatcaggggatctctaatcctacccatctcattacctcttcactctatttgtcaccatttggaatttcagaactcttaattattagcttactgttaccaacagtaatgaggctctggctgcctactggggagcatcatccaacactaacaagctagcagactgagaccggcacctgaattccatcacgtggttccattgttcaggccaggtgggacatttctgtctgcaggcaagctttctgcaggagagctggagtttgcagggtggctattatccattcactttggtcttatgattcacactgactcaaaacagctttcctgtgtggtcatgctcatttacatactggctattgccttccttataataacacttaatgtttatttctgccttgtcctccttttcacttgtataaggacttcctggagctaagagttctcaaagggaacactaattggtcattttcttatagctacttttgatctcctcctgacctggaatgaacagtgagtctctcacagccatctgggtgatccgtctatatacagaccttccttgacactcccgcagtagtcagcatactgcctcaacacaaaagaggctagacaaatgttaagtgacatctataaagttttctgagcaccaaagacagacccagatgcagaggagacagaaaggtaaaggattaagaaggagctggtccctctgaaactatgacaaacatgtctttatatagttaacgagggaagatgcaactgatccaaaatccatctcttccttggcttcatatcctttcacagcaacaagagccttgcaccaatgaggacaaatgagcattggttgaatacttctaaatgcccagcctacattaggcacttgacctgcatttgctcatttaaaccccaatagcctgtacagtagacctggaggaaaacaaaacccacagaagtcaagcaacttgatcaaggtcacccattagtgaaaaccccaaagctcttctcagtacaagtggtcacccaacaccgctcagaaaacggttaggcaaaatgagggcctggggtgggttttggaatagcaacaccctgaaggtaatagaggctggtggtagagaagaggagcagtggcatcacctaggtgtgtaacgctgcctttgtcccctgtagctgctgccttctatccaaggtgaccaccgtgttgaacactgtctaggaaatactgtgctcagggcaaaggatgctctctttttttcacatttttatacagctaagagaagtcatttctgaaaacaggacttggaggtcaacgtttacatatgatgccaccaaggacatctcctgatgatacccatgaaggagagaccattccgttagaaaacttgtgcagtaacatttaaaattggcatttgttaaccatactaataagagctaatattcctgtagcccttgctatataccagacattatgctataaatgctttatgtaaatatctcacttactcctctccaaagcctctgaggtatttttatcaccctaattttacaaaagaaaacactaagagtttaagtcccttgcccaagtacacacggaagcaagtgatggagccgagatttgtacccaggtatgtgacactggtctcctccccacctccaacagtgctaagaaagatcttctgcccacattgcattatgtgctgtacttttttcatgtaaatgatcattccaaatgtctacatcctggtgggtgagcggaggaggtgacaggaagaacaaaaaaaaaaatagacatgatgtcaagaaaggaattaattttcaagtgcacaatcactgctacccacagagtctgtctgtttggttttccataggtataaagagattactcagagtccataaggtggccatgccaggtctctcggggtcaagcagacaggccaagggtgtacccaggctctccttagctctctacatggctctgcctcatctgcttgcttggttcacccatgacatcagagaaacaaagttgggagcaatgctacttcaagcatatgccagttactaagggtaatttatggcaactctcattgccacgtgggctgagaagcacaacataataattaaaagactgataagcaatcactaatgaaatgcataggtattgttgaaaaatgcattttgagtccaagtaaaacaatgatgtgtgttctcccagtgcagaatctctgagctctgtaatcttaaaggcttttgcttttaaaatactatttcaaatgccagctattagtaacccatacatttgcaccctggtttcattgcaaaaatgaggaaggaccattgctttccaaaagaggcaacaaatagaattttttaaaaaacgcttctcttggaaaattttgatccgtttcaagtgatcttgtttagaagacccctacgccaagagtcctgccgggacagagttgtgttggcatcacttgactgctacctgtgtcgtctttgcctttgtgtatcgcaaagcctgttagaaacagctcatggaagcggggctcagaagacagaggtgtgtgctagaccctgccctacctttgttctctaacagggaagcataatgtcaaccaatctctagtcatctccctgacccatgtccctgactggcatacacacagggccacatgaaaccattccatggctcaggccagggtttcaagcatcaattacccttagtaacagcacatgcctgaagtagggttgctcccaacttaaatatttctctgatgtcatgggtgaaccaagccaagcagatgaggcagagtcatatagggagctcaggagagtttgagtatgccattggcctgtccacttgacccctgagtctaatgactcagcatggtctttggagttctaggatggcattatttacttctcctcttgcacagtccagaaagaacatttttccccactaaatgcacattcccaggagctccgacctccagtcaaaaaagtaaaagttgcttggtaagctcactgcctggggtcttctataccaggaagggcccaggcctagcactcatgttgtggcatcttcctcctgcactgtaggcagatgtcgctaattaactatgacatgttctcctgcagggcattaacagaatcttttagataccattaccaatcaatcagagttgctgcataacatggaaaacctattgctcatttcacttttcggctttagactaatgacccagggaaacttttcatggcagccctgagatggttcgatccatttcaagctaaggatgtgataatacgtgtatcttccagaatcttgactctttcaattaggagcatgaataacaaacttctagcattgaaataacatattctacggtaatcctctgactgatcaccttgttaataaatatctaaagaccgcatttttctctgagcttccaacttccatgggaacattctgattgtgatataatttttaaattagcgggtttattcatagatttgtgttagtaaatggcaagcttcttactaattagcaaattgtgtaaatccacagcagtattaattttcaactgtatggggaattaatataagacaaaataaataaggagacaattaaaatttccctagaggcatgcatttctataaaattcagcacaaaacaagaaaacattaacccattttgagggtgcatttagaaaagatcacaaaagatgtgtcagtgtcacagagaacaagtgaagcatgcatttgctgtggcacgcactctcagttacagctaaattccctaaagatattttctcaagttactgctgctgagatgtcccctcttgccttgatgcacttttccagcactttctcatttaataaggtttttattatttctttattgatgtttccactcaaattgctggtgtgctctctctcactttagaggacaatgcacagtataatgttctgatcctcaaaaactgccccacaagaggtctctcactaaccaagcgcttgctaatatccatttcacttttcccactaacccactgagaagatggaaagcatatgtatctctgggctcctgtttaacctcccagctctagaagatgagaaaaagcatgtccctcttacgggcacttacaccatttcttatgaagccatcccacacactgttaaacaaatctgattgtttctcaaactcccctttaactgcttcagcttattgctaagatgttggagtcttcctgtgttggtggccatggaaaccacctgtctatttaatggcatgaggtcttttctttacttttcctggcatgccaggctgttggggaaaggccagagccctaagtttaaacaagtcaagtacagatgtttaagaatgacagctcccaacagcttcagatcatagctaataccaaaattaaactgtaacatggtatgctctgatggggaaactgtgcacagtttctaagtacacaaacaagacagtacacagacaattgtaggttccatttgggggcaattttcttcccttatcatggctatcagtgatacaatctgctgcagaagaatgtggtgttaactaattagtataccatatagaagtgcctgtcttgtattatttacagtgcctgggacacactcctagtacagggcttctcataggcacagtaattatgcatttgcctctctgtcttacatattagataatgatctccttaagggctgggaatacggtcagagattgggattgcctatcagccccctcccaagcagacctaagcagccaggtggtaggcaagaacagcttcatgaatggctactaggcagttcccagtagtgcctggaaattctgtaagtaaattttaaacggcttggttcaggccaaaaccaaaatggatcttcctgttccctcaccccaggtctgcagtgacatactatcctgatctcctctttctgtttgaggttgaaaatggaaatgggaagaaccaggcaggccttatctggcctgcttgccatatggagactgatgggcagactgttcacaaccacaagcaggtaccacagaaagaggacagaatagagccggtcctttacttttaggtgagttttcctccactggcatgttgtcaccaggcaaggcagttgccatttctactgatgtaaggagacacacacacacacacacacacacacacacacacacacacacagagagagagagagtgtgtgtgtgtgtgtcaaggagaggtggggaggaagtgagtaggaagggacacagagccagggactaaagagaaaagtcccttcctgtgaaaagaataagataatattttcatttaccatccccatatacacagcagtgagcaaagtgccaggcaaataattgatacccaacaaacatcagctgaatgaacaaatggattcattcattgcacttttccatgtctctatctctagtatttaagatttttttaatgtatcttagaagagcctactgttgtacaccaaaccaaaccaaaacagcagaatgtcctaaagtactgacatatgtgtagaaattacacatcaaattaccaatcagatagacgctaaggtaggactgaaatgtgggccaaacccattttggaaacaaagaacaaagtcaatactcaaggtcaagctcttagacagctattcttccaaagcacctggaccccaagacacactcaacaaatttcaggtcatttcttctctcattaagccagttacaaccaagttatagaagtggagtccttacaagtcgctattgatagaataagagctagtcaaagaatgtttgagccatttttttcccagcctcagatgatggggagaaaaaaaaaacacctcaatcaaggatgtcaaaatgaaccaatctgcaatagtcatctgggcaggggacaggtgaatagcccaattcttctcacagaaatgaagaaaaagttcaggccattatccaggatgacttgaaaaggcaactcagtgactgagctttgtagttctgacaccattcaaatagaaatgggagccagagatagaaggactgacggctcattctcaggaatgtctgtgactatgcttagatgtgtcagtagacaacagcttcctaccaaatggtacaggctttggcagcctcttttttaaaaggccttttagtaactagtcaggcaccattcttaatatcaaaacattctctcttttttattgcccagactctgggaatctggaaaatgaaagaaaagaaaaaaaaagaaaagagagagaaagagagaaagaaaaagagaaagagagaaacagagagagagagagagaaagataattctgactcttcctaggtaaagttatgctttccagttaacttgatccactagttattacccgaaaacatgctttccctatgtttgagttctcattcatttattcaacatctactatgtgccagaccctgtgttagatgctagggatacaacggttaatgagaaaaagaaaatgtcttatcatggagctcattatttatctgtcttataattaatctatattactttatttaacaactacatacattaaacactgcccttttatggttacggaaagacagcagtgaacaaaacagacagtctctattctctgatccagggggaaaagactaaatgagttagtaacattttcagatagttaggagagctggaaaaacatacattgggataatgccattgagagtgagtgatggagtggcagcaggactgttgtttgagataaattggccaggtggcgtctccaagaagaaaagtctcacttgagactggtaaatgaagccagcaatccaggaagggtgtttgtcagggtggccagcttttccccactcctaggttttaagaggagtctgacactgactattattaggaaaataagttagttggcctacttggagggtataataccagccagcaccttaatattcaatgtgtggtctggggaataccagcatcagcatcacccaagagcttgttaggaatgcaaattctcagctccactccagatgtaattgatcaaaatctgcacttgacctgacccctaggtaattcatatgtgtattaagactttgagaagccctggagctagccaccttgagtaagacctaaagtcatgtccaccaagcctggcctctatcagtcattcctttgtttattttggaattcatttgagaaatttgaggacccaggcatagacaagggctgctatttattggaggtcctcaagatcctctaaataaagggaagaacaagtacaaagccctgatatgggccaggctgaattatgagtgaaatcaacagaaataaacgcaagccatttaaattttatccctataaaatggctagcctttggaagtttttaggcaagggagaagtaatatgttctacgtgaaactttggagcagtgactctgggtgctgcagagagagtggacaatagccaagcaagcatggagaaaccacacagttaagaagctacaaaggcgagcccgatgggaagcggtagggacttgagttggtgaggcagcagtgcacttattctggatatgtcttgggagaagagctaataatacttactgatgaatagaaatgtggggcagcagttaggaaagaggatggtcaaagaaccagtcagtgcaggcatacttcatttcactgcattttgctttactgtgcttctcagatattgcatttttagaccaactaataaccctacaatcgccttttaagtgttcaagtgaaaggaagtgtcacacatctctcactttaaatcaaaaagtagaaacgataaagcttagtaaagaaggcatgccagaagccaaagacaggccaaaagctaggcctcttgggccaaacagccacgctgtgaatgcaaaggacaagttattgaaggaaattaaaagtgctactccagtgaacacacaaacagtaagaaagtaaaacacttattgctgatagggagagtttgagtggtctggatagaagatcaaacaagccacaacattcccttaagccaaagcctaatccagagcaaggtcctaactctctccaattgtatgaagtctgagagaggtgaggaagctacagaaaacaagtctgaagctagcagagattggtcatgaggttcaaggaaagaagccatttccataatataaaatgtcgaggtgaagcagcaagtgctaatacagaagctgcagcaagttttccagaagagctggcaaagataatcaatgaagttgaccatattaaacaatagattttcgatagtgacaaaacagccttctattggaaggcgatgccatcaaggactgtcctagctagagaggagaagttagtgcctggcttcaaagcttcaatgaacaaactgaatctcttgttaggggctactgcagatggtgactttaagttgaagtcagtggtccttgagcattctgaaaatcctggatcccttaagaatgatactacatcaactctgcctgtgctctgtaaatggaacaacaaagccgggatgacagcacatctgtctgttgcatgatttactgaattttttaagccccctcttgagacctactgctcaggaaaaaacattcttttccaaatattactgcttactgatgatgtacctggtcacccaagggctctgatagagatgtacaaggagatgaatgttgttttcacacttgctaatacaatatctattctgcagcccacagatcaaggaggaattctgactttcaagtcttattaattaaatacattttgtaaggctataactgtcatggacagtgactcctctgatggatctgggcaaagtaaattgaaaacctggaaaggattcaccattctagaagccattaagaacattcataatgcatgggaggtcaacatgaacatagtttagaagaagttgattccagccctcatggatgactttgaggggttcaagacatcagtggtgaaaaaagcaggaaaactagaattagaagtaaagcctgaagacgtgactgtattgctgtaatctcatgatcaaacttgaacagatgagaaattgctttttatgggtgagcaaagaaagtgatttcttgagatgaaatcaactcctagtgaagatgatgtgaacattgtcgaaatgacaacaaagaatttggaccattataccaacttggttgataaaacaacagcactgtcaaagacgattaactctaattttaaaataagttctactatgagtaaaatgctattaaatagcattacattctacagagaaacctttcattaaaggaagaatcaatcagtatggcaaacttcatttttattgtaagaaatcgccacaaccacccaactttcagcaaccaccaccatgatcagtcagcagccatcaacattgaggcaagaccttcccatttttattgttcacattttttagcaataaagtatttttaattaaggtatgtacactttttaggaataatgatattgcatacttaatagactacagctaagtgtaaatatagcttgtatatgcattgggaaactaaaattcacatgactgatttattgcgatagtcactttttcacagtggtgtgtatctgaacccataatatctttgaggtatggctgtacccctacgaggcatggaggtgggcatactacccatgctgcccccaagcactatggctgaccccttgctgggctgatcccaaatacaaaatacaagaattcataaacaatacaacactttccgttaatggagaatgctataacacctagttcccacttctattcttcaccgttggattctaatagatgcctgttattcctttaaaaatatgagagcaatggatttcatttacaaaaaagggaaattagttacacaacaaaatgaatactcagaaaaatatttcaagcaaatagataaaagaccacttttaaaaatctgaatatccaagataacttgctctcgtaaaagtttgtgattggcaataagagacagattgaaaactgctagacttttcaaaaaaccagctcctggattcactgattttttgaagggttttttgtgtctctatttccttcagttccgctctgatcttagttatttcttgccttctgctagcttttgaatgtgtttgctcttgcttctctagttcttttaattgtgatgttagggtgtcaattttagatctttcctgctttctcttatgggcatttagtgctataaatttccctctacacactgctttgaatgtgtcccagagattctggtatgttgtgtctttgttctcattggtttcaaagaacatctttatttctgccttcatttttttatgtacccagtagtcattcaggagcacgttgttcagtttccatgtagttgagtggttttgagtgagtttcttaatcctgaattctagtttgattgccctgtggtctgagagtttgttttaatttctgttcttttacatttgctgaggagtgctttacttccaactaagtggtcaattttggaatcagtgcggtgcggtgctgagaagaatgtatattctgttgatttggggttgagagttctgtagatgatcaagtgggtttcatccctgggatgcaaggctggttcaacatacgcaaatcaataaacgtaatccagcatataaacagaaccaacgacaaaaaccacatgattatctcaatagatgcagaaaaggcctttgacaaaattcaacaacgcttcatgctaaaaactctcaataaatgaggtattgatgagacgtatctcaaaataataagagctatctatgaccaaccaacagccaatattatactgaatgggcaaaaactggaagcattccctttgaaaactggcacaagacagggatgccctctctcaccactcctattcaacatagtgttggaagctctggccagggcaatcaggcaggagaaggaaataaagggcattcagttaagaaaagaggaagtcaaattgtccctgtttgcagatgacatgattgtatatctagaaaaccccattgtctcagcccaaaatctccttaagctgataggcaacttcagcaaagtctcaagatacaaaatcaatgtgcaaaaatcacaagcattcttatacaccaacaacagacaaacagagagccaaatcatgagtgaactcccattcacaattgcttcaaagagaagaaaatacctaggaatccaacttacaagggatgtgaaggacctcttcaaggagaactacaaaccactgctcaaagaaataaaagaggatacaaacaaatggaagaacattccatgctcatgggtaggaagaatcaatatcgtgaaaatggccatactgcccaaggtaatttatagattcaatgtcatccccatcaagctaccaatgactttcttcacagaattggaaaaaactactttaaagttcttatggaaccaaaaaagagcccacactgccaagtcaatcctaagccaaaagaacaaagctggaggcatcacgctacctgacttcgaactatactacaaggctacagtaaccaaaacagcatggtactggtaccaaaacagagatatagatcaatggaacagaacagagccctcagaaataatgccacatatctacaaccatctgatctttgacaaacctgacaaaagaaacggggaaaggattctctatttaataaatggtgctgggaaaactggttagccatatatagaaagctgaaactggatcccttccttacaccttatacaaaaattaattcaagatggattaaagacttaaatgttagacctaaaaccataaaaaccctagaagaaaacctaggcaataccattcaggacataagtatgggcaaggacttcatgtccaaaacactaaaagcaatggcaacaaaagccaaaattgacaaatgggatctaattaaactaaagagcttctgcacagcaaaagaaactaccatcagagtgaacaggccacctacagaatgggagaaaatttttgcagtctacccatctgacaaagggctaatatccagaatctacaatgaactcaaacaaatctacaagaaaaaaacaaacagtcccagcaaaaagtgggtgaaggatatgaacagacacttctcaaaagaagacatttatgcagccaaaagacacgtgaaaaaaacgctcatcatcactggccatcagagaaatgcaaaacaaatccgcaatgagataccatctctcaccagttagaatggcaatcattaaaaagtcaggaaacaacaggtgctggagaggatgtggagaaataggaacactttacagtgttggtgggactgtaaactagttcaaccattgtggaagtcagtgtggcaattcctcagggatcttgaactagaaatgccatttggcccagcaatcccattactgagtatatacccaaaggattataaatcatgctgctataaagacacatgcacacacatgtttattgcggcactactcacaatagcaaagacttggaactgacccacatgtccaacaatgatagactggattaacaaaatgtggcacacatacaccatggaatactatgcagccataaaaaatgatgagttcatatcctttatagggacatggatgaagctggaaaccatcattctcagcaaactatcacaaggacaaaaaaccaaataccgcgtgttctcactcataggtgggaattgaacaatgagaacacatggacacaggaaggggaacatcacacaccagggcctgttgtggggtggagggaggggggagggatagcattaggagatatacctaatgttaaatcacgagttgatgggtgcagcacaccaacatggcacatgtatacatatgtaactaacctgtacattctgcacatgtaccctgaaacttaaagtataataaaaattaaaaaaaaagaaaagaaaacttctagacttcccaacactttgagaaacagttgccacctaactactaaagcaaaatgaactaaacctaccactggaactcaacctttaggcattttaaaaggccatttttaatgaattccctttcagctcttagtcaagctcatctttttgaattcgatctttatttttaacaggagcacatacttaaagaggtagaaggtatgaagaggtcagcagtgatcatctttacttataagagacaaagcattcctcttggaaaagtcaccataccattttggggacttaaactttgaatattttttcaagaaaacacatttatgacaattcattatgctagagattctttttttttttttcctttcaaaaatattttccattttatgtcttctaaggctgatgaaaacaggccttccaactctgggcttgccttattgcctgtctgtggctgaaacccaaacattttcctattacagtttaagtgtttttatgtatgttttatacccaaattcagtaaaggtttgacatagaccaaggtaacatttcaggcagtatctttaaaatagaaatctattttcagattccaggatgtagaacagttggttttgaatttataactttgataccagcattttcctctttaattgtacttctaaggatacctcctggccaccaaaggacactggcgtggtttatttcagtactgtgataaagtgattgagaactgagattttattcccaaagaggctaactcctttatcttattctaaagccaattattttgcaaattagatccactgcttacatagtatgacatgtgaatagatgtaaggaaatccatcactactactccaagcatatgcctactgagtaatgagttagcaggatcaccttcatgtttgaagacaccaggacgatatagtagaggagaacgtaagctctagtgtcagaacgcctgggttcttattccatctggctagctaggagactttgggcaagtccctcccctacatctcagtttccccatttatactcaatggcagtacttcccaaattagtcacctcatatttagagatatttatttattaatactatatatatatatatatatatatatatatattttttttttttttagacagagttttgctattgtcacccaggctggagtgcaacggcacaatctcggctcactgcaaccttcgcctcacaggttcaagtgattctcctgcctcatatatagctgctttattgagatgtaattcacatatcatacaattcacccattgatgtaattcacccaaatgatacaattcaatggtttttaatctatttacccagtggtacaatcattactacaatcaattctagaatgttttcatcactgcctagggatctttaaaaattccaaagcccagactatgccacaaatcaattatatcacagtctatggcggtgggacacagacatcagtagtttgcgaagctccccaggtaattccattgcacagatatgtttgggaagccatgctgcactggaatcactgtcagagtttcagggaaaataaacacagaaataaagaaagaggagatgttcagcagagagactgtcctatgataacataagcacagaagtggtggtgagaataatcatactgaggacgaatttaatgggaaagactatttaaagaattacactgcaacttttataatcgggactaaaatagcaatttttttactcgttggtaatacatctccaggcacagcatcctctgagagtatgtataagttgggaataagagtgttgaggtaggaaagggatcaggaggagataagaacctgtaacttatctaacacatttcaagacattaccaagcttcttggccttctaaaaagctcctggttagccttacaggatgccactgaagtgccacccctttgtgaaatcttttcccactgaagtcacagtttgatgcttcttaaagctctgcgtttggcataatacagcaattatcacccagagtcatatacttcagaagttggtcaccttcaccagggcaagagttctttgaaggcagaaacaatacttagtacattaaaaaattaaaaaaaaaaaaaaaaaactatctcaagagcctagcgcatgttatggcacagtgttgacaaatatttgttggactgaaccaaagcaaattcacatccactactgtcaacacaaaaatgaaaaaaaaatagtgcactagttccaaagttcccagaacacttaggggccattgtagctctcagaagactggcaagcaagacctgcaattttactctataagggacattgtaagagcaaagcttggggtacttaataactccactaaataaatggcacaaccacaagctgttattaggaacactgaatagaggctgggcacagtggctctcacctgtaatcccagcactttgggaggccgaggcaggtagatcacatgaggtcaggtgttcgagaccagcctggccaacacggtgacatcccatctccccgtctctactaaaaatacaaaaattagccaggcttggtgatgtgcgcctgtaatcccagctactcgggagactgaggcaggagaatcacttgaacctggtaagcagaggtggcagtgagctgagattgcatcactgcactccagcctgggcaacagggcaagactccatcgcaaaaaaaaaaaaaaaaaaaaaaaaaaaagaacaatgaatgacgtattaccaacactgagatcaagaaaaaaaattgccatccaggggaaaaagattaattaatatcaattaattttcttttacaggagtagattatacagaagtctttaggcttctgaggagaatttgagaaaattttacagtaaacaggaatttgcatacgctctgggagcaaaaagtgtgtccccagacaggtcacctggggtatgttcaagatgaagaacaaaagtcgggcatttctctaagtgtagagtcaggagggtgcaaataaaggcaggctttagagggaatagagaaacttttggattcaaaagaaatacaattatcattacaatagagctacatggttacacaataagcaatactattaagcaccctctctggaaagagtgttctttgaaaaacaaaatgcagaacagatccaaaagcaaggtaacaaaagctattaggtgaagtccatcagaggaagaattctctttccatagcatcttccttcaagtacaagataattatgttttatttatggcacaggaatagaatatgagattcaccattcaataaactcaggaaaatcatttctttggtcattgctttttatttataaaatgacggcttggatcaaggtagtgtttcccaaggttttctttctttcttttttttgggggggaagatttaacaggcattacttgaagaaacttagagtcaatagattctaaattatggtcacttgaaaccagcaccacaagattacccatcaagacctaatcaaccaaattaacaattagtatttgggcagaaagttgatgcaatatctccaatatcaaggcagtacagactgctttgaaactgatattcttctctgtgcatgcatatacacacacagacacacacacactcatacacacatatatttataattccttctaaatatttgaatgttcatatatataattctttctttttaattactccaagctgagcatgtgtaggttagattcactctgttttataatatttattgtgtttatagaatatgtccatcacatcctagcccctaggcatgtttacaaataagataggaaaaaaagagactgttgataacataatggctaaaaatccacagccaatattttcagaaagatcacacaaatgcacatacatgcatacacacacagacacacacacactctatctacagatcatcctggtatccaatgtgaattccatcagtattctcagtgcaaaccacaccctgtggtttcttttcctactccctacacaacttctgccatcttgagtcttaaaatataaaacaaaaaaatatatggtccattgatggaaaggatagaaggctttagatgggagacagggtcagattcatcacatcatttcttttgacagcctagcacaggggttaatgttggctggggagatggaaaaaggaaagaggtaatgggagcagacctgggaccagttggtcagcaactcgcagagttctttaatcaccaacaacctccctgtactgaggcaacatgctgctaaatgctcaacatacagcatttcgtttcatcctcttgatgtccctacaaggtagttcctattatttccatatttcacttgataaaactgaggcccaagttacaaaatatcccaagttacaaagctactaagtggcaggctcaggacctgcacccaggtcttcccaaggccaaagtttagactcttcaccagaactgcttggctttttgctagaaagcctggggtcaggaaggttaaccattcacaaagagctcagaagtggcaaggcctggatggaatgcaatcatgaggacaacatggggcactgtccataactgtgtgatattgcactttccctgatcaaacgtcccctctgagggtgtcctagggacatttgagaccatttccctctgacacatcccttcttctgcagaagcacccatctcctttagaatttgaatttctgctaaaaagtagatgctttcctcacaaatgtcccctcctcctgtattctttctcctcttggatctccaaactaaaaactgtagtgggtatagaaaggagagtctcaagtgctgtgaaaatctttctagaggactttcatcccttcccaacagcctgcaatgtggacttctgtcccctcagtaacaaaccgtacatgtccttcctgaactgagaacgaacctgcagcatccagagcagctctaagaagcaggagaagacaaaaaaggcatgcagctccctgctgctctcaggaaaggggagagaagcgcagctgcctccgttcaaggctgggtgagagtgatgagtcaaatgactgtcatcatttggattctgacatttcttcctctacagagaaaacgaaagagtctgctattggtgatcattcattctgcgttcatttatgtcttgtgtactttttttttttatttttcgagatggagtcttgctctgtcacccaggctggggcgcagtgacgtgatctcagctcactataacctctgcctcccaggttcaagtgattatcctgcctcagcctcctgagtagctggaattacaggcaagcaccaccacacctggataatttttgtacttttagtagagacagcatttcaccatgttggccaggctggtcttgaactcctgacctcaagcgatccacccgcctcagcctcccaaagtgctggcattacagacgggagccaccacgtctggttagtattatgtacttctgactattgtgttctactttccgatttaaacaatgatcccagcagctatgggagctacaaagagccaggagtttggaagcttttcaagacactgtgagccctctccttttatcctgacttctttctcactttctgccttttcttgaagaacaagaaaagcaactccagtggaaaccacttaagcctgcaatttagctcacaaattgtccccagcatccttgtatctccttctccaactccttttttttttttttaaccttagctcttcctgatgattgtgagcatagctcagagtaatgccaactgttgctgtatcagcttaaatcagtgtggtacctggtgatggggcacagttgaggcaggcactacgagcttagacgagccttcagccccaactgaaagggatatattgtggagcactcacgcattctatagccccctcctaatccctcaagaatcccaggctgggaatggctgcaacttcaggattgtaaagttgtgtaaacacatctttacattgactacatcatggtccaacgtaacactttgaaacaaagggcttgagtgtgtccctgtaccccttcattcctgagttaaaaacaaagctccatcagtcgactcatatttatagagtgctccctgctcatctcctttcagtccttccgcttgccagggtaagaaaatttagtgcagacgatcccagccttcccagacttccctcctccttcctgacagaattagttgttgccccccaccccccatgttttatcatagccctttgcacactgtgttccccttatttatatgcttgtctctccagttgactctgagcttcttgaggttgggaacatcgtttgtgcctgtcacatctttatgggcccaagaatagagatgataggcaaaagtggagtaaagaataaaggaagaataaacatttttaaaatcagtctccaaagagttttccttctggcaggtaagacaaggcatacagtgagacatgaggcaaggcagtaagtaataagggtcagaataaaaaggaaaaagaaagcgactgttggacttggctgagtaggttgatagcaagctagtaagaaacatgagtaggtatcaaatagacacaggtgcaaaaacagggctgagaaaggtatgtcggaagggatgtctagttccaaagtgtgctgagattaaggaattagaaatgtaagctgagctccagatactggaagacttttagtatcaaacaaacaattccatttttttcttttgtctaaacattagagatgggtacacaaagaatatttacctggttggaatgtccagaaggactgtagtggactggaactcatggaagggagacccaatggaaactgtagaaacaggcttacacaatagcagaggaaacccttaatagttattttaatcaaataagattttcatttaaaagaatgaaagaattaagaagaccacagtataaaatgtaaggaataaagtttatagagagcaactggcatcggagacagaattcacaggtcagaagagaacttacaaacataagttccagttcttggagagatgcaagaacatactgctcctataagttaagaacaggttgtttgttcatcagaaaatagaattttatgccttacggttcacatgaagagttgtgaatgaaagtatgagcagtgcaaaggaacaatgagggatgccgggacaccaaagactagcaacgggaggaagccatgactaccacaactgctgaaaggacaagggcaaaacagcattactcaaagccactggcagccacagtcacggaggccaagatgactggtgggagatgtagttgcagaaggacacagttactatcgtctggcaaataaaggagggaatgagtatactcacctccttctcttcacaccctgtaaacttacactaatgcctcccattgagcaaacaccagggaggaagtccaggagacgcaagacagagacgggtagaagttgaacctcaggcaaaacaaagattacccaacacaaggctgtataaaaaaggaaaaaatcagtttaagaggcaagagcgtcattggaaattaagaatatgattggtaaaatttttttaaaaaatacaagaaatggaaggcaaggcaccaaacatttcctaggacaaaaagataaggaggtggaaaatatgagagaaacgtcaggaagcacagaagaggggtcccagagagagctctgagtttaataaacaccaagggtatggtgtctgcaaatgctccagggaaaaacacaagcaaaaggaaagaaatgcaacctgaaaattctttaggattcaataacacgtaatgataaaacagtttctttgccccgagtccttggagcataaaaaaatctgggacaatccgttcccttaccacatcagaaaagcaactttttgtttcgaaaggtctgtggtgaaacacaattccatgacgttaatcaatttatttcaattgggagtgaagcataaatgaaaagttcctatttcagaacagaccgtgaaaatgtgaagatgttattatttccaagctaaaaggagatgtgagattctctgcctggcacatttcagaaaggtacaatcagccggggcaggggaatagatttaaaatagaaaagtaatgggaaaagtgctttccatgtaacagacagggtggtggatgaaaacctatccccctaaagcccactttattaatatacattttactaggcactttggaaagtttgaaaatccacatgcttctcatttcccatagcttctgggtctaattacatatttgcatccatttgcatacacacacacacacacacacacacacacacaggtctcatccagtgatatagataattcaatattcaacttgtcgatcatcaccttaaaatagagatctaattatggaaaaaaattgtatgctgtttttcaaataaataaaaaggaggacactgattaaaaatataacacccctcattgatcaacaggtacctttttggttttaacctatcataaacatgaggtttggtactacatggttctggccctcccaaattaacactgagctagttcagggaacaagctctcacataccaaattctgaagctgcctttcagcagcaatttgagggaccaagaacataggctttccaaatgtctagaagctaaccagattcctctctccttaatttagccccttacattaggtgccccatgctctcttttgggtcaaaaataacagggacaatttaataccctatgactgtccattaaatatctgaattatgaggattcagatgtaaagtgcaatagtattttaataaaagtacactaaataaggaagctggtaatagacctcttaacgaaaacgtagtcaatggttcatttaatttgatggcagagtccactttcaaataatcccaaaagtgtatattttgtaagaaaaaggttgcagagttcacctcagggtattcttaaaaaattgtttgcacactgagaagacatcagtgctaagaggctttcctgattactgaaatttggttggaagtcttttttatttctattaaatgaatatatacaaccgttcggctgcctcaggacatttatgaaaatgagatgctctgtcttaaggaagttagctttaagagcgacatttgaatcattagatgcctcattggctgttacaaaaacaaacttcaatcttctgcttccccttttctaatattagctaacaataattaagttgcttagacaattccaggtgactcaaatttcatagcacgctcttcaaaaggctaagggatcactttaagttcctaaagccctaagactaagtgtgtttcactcactttgtgtagctccagcccagcatcatgtaccaaagggataacatgattaaaaatcatcaacttgtcttccgaaatctgtttctaaaccacagcacaaggaacagacatttaaatacagaaagggatggagaactacaatcttttaaaagtgcacactttagtgcccagtgtggtggctcacacctgtaatcccagcactttgggaggccgaggtgggtggatcacaaggtcaagatattgagaccatcctggccaacatggtgaatccctgtctctactaaaaatacaaaaattagctgagtatggtggtgtgcacttgtagtcccagctactcaggaggctgacgcaggagaatcacttgaacctgggaggcagaggttgcagtgagccgagatctcaccactgcactctggcctgggcgaaagagcatgactccatctacaaaacacacacacacacacacacacacacacacacacacgataaatattcacatcatctgcctttggttattcaacctatagtttatcatgggaaacaagatcttattcttataaagtacctgcatattttcatttgctagaaattaaccaattcagcttatatcatatgtggcacaaggttttgtcatgaggaggacatttaaagaataatttaaaagaaaacaagttcaaacgttcacataaaacaaaatagccatctctaaggagaaaatgggtattgctgatcctaatgttaatattctaaaataaatgaaacatttttgaagggagtattcaccaccacagctaaagaaagccacaaaaattagtgtatatgtgcctatatttatataggtacatttcccaattttattcttttactattacagatagctaattcctaggaaacattttctagatgtcttcttttatataccatgtctttggacattaattacaggcaaagaaagtaaacactcacaagaaaaagggaattttacaatctgatcttcaatgttatctcaagaaatgctgttatagctccttggttctggtttccatgcacctgcaaattgtcctttcacccatcacttgtaagtagtagaggagcaagcatacctgtacagtcatgcattgcttaacaatgagaagttctgagaaatgcatcattaggcaattttgtcatagcacaaacatcataagagtgcacttacacaaacctagataggtatagcccactatacacataggctatacgctatatgctatatgctgtaacctattgcttttaggcaacaattctttactgcatgttaacatactgaatactgtagataactgtaacacaagtatatttgtgtatctaaatatagaaaaggtacagtaaaaatatattataatcttatgaaacctcagttgtatgtgtactctaccactgatcaaaatgtcattatgtggtgcatgactgtatgtgaacatttcttgatcataaaaataaagtgtatgttgacttagttagtgccctggcaagttaatatgtatgttgacaaactataatgcttaacatgagtatggttaaaataacactatgtgaatatataaacacatgtctatacatatacacatatatacctatatatacacacacatataaatatatacatgcttataaattacagtctgtcttacattagctaaactattactacagtttgagataaatttgagatgttacaattggaaatctcctgtttcaatttgagaagggaaaatgttggcatattctcctgagtggagaaagaggctttctatgtcagcagatacttcagaggaacgttaatgtctcgaggtttctagcaaattaacagcccaggtaacaaaatgcagggaactctggccagttgcttacttactcagttggatctggccacttctccatgtattcccaccacactaaatggagcatgagtcatttgagtaatgagtcagaaaatgtctagcagcctccgtgcaatagcagacgtgatgcttaagataaatttcagagatactaggatggtgtttttcatgtctgcacatctctcattggtgatgaataaaattccttctcccttcccaagagacaaaaactgtatcatatgctatcctgaggctcgttccaactctaaaatttaaaatttcaagcaaaacctatagaaagaggcaaatacagtgtataaatgtctacaatttgtgtcctattcaaaattagtttttgtggaatgttgtctaatggattcagtggtcacgttaatgacaacttcactcccaagtactacatgccctgttaaagaaaaaatgcttaagtgaacaaaaaatttaaacaaattttggagttcagtgaaattaatgaataatctctttttcaatcatccctgattttttaaaatcacaatacctaaattatgatgataggaattactactagactttgagttttaatcccagtaacatctttagctgatttaaacctatttcaacttccattttaatatttcatctcattttatctgtatggttaatattaatttcctttttgcaccttctggttgtagcacaaagccagctatacaatagttgtgtgctgctgaatggaatttgaaggcaatataaaataatgtacagcatcactgaactggggattaaaaatcccaagtttgagtactgtcttggcaatgcactgcctttgtcactcaggtaagtcacttcttccttacaaaagtttcttccattacaggtttcacctctcatgacaattcctatcaattagttgaggctgtctggagtaattaggcaggacgctggtgggatggagtgccatgattgatgagtgatgcctgccaagggtgtatgacagcgaagtggtagcaattttgtcctgtacttggcaattgtagattagaacagggctgctcaaatgtgcatctatcaccaggaagcttttaaaatgcagattctgattaagtctggggcggtggctgagattgcatagttctaataggattccaggtggtgctgatgctgcggagttagagagtacacaagaagcaaggcaaagtcccttgcagctctgaatgaatatggaatctcaacctctcattctctcttgctcactcgcacacacattatttctactttatgtatgtgaaaaggtgcttacatatgccaagaatactgacaagcacattaaatacgtaattctcatcctcccccacaaaaggtagttagaagttttcaggtaagaaaatggagatttaaagagggtaagtaatttgtctaacatcacagagctgacaagtagtctagatgagagatgaacctagagaacttaattctagtaccttgctcttgacctctatcatatgctgtcttgatactgtaacaacattagactgcttacttagtgccagccactaggctgttttgtacatattatctcctctacttttcttaagaactctaggaggtaggtaatatttttgttttacagataacaaaattaattatccttccactgtctcaatctcggtaaaaccatagtgattcctattaagtaaaacattagattcatatctataatgaactaaacacaaagaacagtaggctaataaaagcaacatgtatatgcataaggctaagagtaaatatataaaaatattcttttataaattcatcctatgtaaatgcatttttgacaggtaaactcaaatgtttctgcagagtttagtgatgaggttatcaaagtccaagtgattattggtcccaaacagaatccatcagtgggatttacagtgggagaagtatcaaagattcttttttcatcatactcttttactacctaaaagttctttattagcaagcaaatgaaataagattggatcagtaaatttccctggagatgagatttcaatataagcaggtgacagtggatgctgcaccgatgcacacttaagaagagcaaacaccattgcaatgtgagggcaggatttttgctttactttgtttaaaaaaacaaaagtgtgcttcaaaacctaagggtctgaagcagtgattctcaaccttggctggaggctgcactttggaatcaagtgtgtagaggggacttaaaaaatactgatgcctagatcccctagagattctgatttatttggactggggtgcaaccgagacatcaggatatttttaagcttcttagtttttaaatgtataaccaaggttgagaatcatttgaatataggcatacctgtcccatgtggggggcgactagtcattaaaggcatgaatgtctaattgatgaatgccctcgtcagagcagactggtggcattcagagagcagcaaagactttctcccttgaagttaagcttaaatttcataagtaagtctattttaacagaaaattttataaaacatttgtagatagtctgaactacgaaaatcattttctccccttaccagaattatttccactggagggcagtctcctcttgggaagaaatgaatgcggatacaaccttcttaacagaccaaagtttaaaatattgactaagactgtggcattcacatgggtttcatttcaagacaatttctgggagatggagtatttgggataaaaaaaaatgtgtattctatgtgaagatactgccaaattaaaggtttatttctgtctgctaaaactaaaaggataaaagcttaacccaaaagataaacacatccacatatggaagaccctggggtgtacaaacataacaacaacaaatagaaagtagcatttattataggtttactgtgtgtcagatcctgtactaagcaatttaaatatcctacttgattctcagaacaaatctatattttataggtaagaaaactaaagctgagaagtgttcaaagaaatgtgtccaataccacatatcaaaaaagtagctgagctaggacttgaaccctatctgcctgacttcaaaaccagcccttgcaatcaccaatgataccgctttactgcttgagtgagaagcaacatggtccctatgcgtaagacaagcgtctaaatcagaacatgtcaacacaagaaaacaggaggaaaaaactctctttacacagcattaggtaatgaaagaaactgaaaggaggtgattcgggcagaatgagaaattccttattctccttactggttttatattttaacagttttcacaaactgtttttggttcctcttcatttcttatgcaaaccctttccaatccattaaaaataaatttggcattcccattgctatgtcttcagccgctgtacagaaccttggactagctggtcatattcctcagagacttatttcctagatcaggggttgtcaaacgttttctgtaaagagctggatagtaaatatttcaggttcttcaggccccacggtcttggctgcaactactcaattctgccagtgtagcatgaaagcagccagagatgatgtgaggatatagatgacagacgatatgaacaaaaagggcaagactggattccaataaaactttatttatggtcactaaaacttgagtttcacatcattttcatgtgtcaccaattattattcttctttctattctttttcaaccattcaaaaatgtaaaagttatctttagcttatgagccacataaaaacatgctgtggcctggattcagtgggcaggtggtaatttgccaatccccgtcctgaataaggtgtcctgtattcatttgccataacgcaaaggtcttgtcacaaagatatctagcaatggctccatgctcaaagagcaaatgtatccccagataccatcagctagtatttcagaatcagctgccttcccccaaaccactttttgctattgtatacaaattctctcagtagtaaaagtatcccagttaaatcacatcagcactctgggaaatattcttcttggggaaatattacagaatctggaatctgaaaatgatccagaaggtcacagagggctgtcatttcccaaaggcattctccagagcctccaagctcctcacagctgcagatacaggtataggtacagttccttagagaaaatagctccacagaatgaccaggacctaagaaagctcttagcaggggtgtgctagagccatctcctatcagctcatagaagaactcattatatttttcagcattttgtgagccagttgacatgagttgataacctgaaattggccatggtgggagcatcagcaccacagaaattcagaaatgtgtattcacaagtgttacaaattaggctttttttcccctctgagagcaattgttaaacattggccagcatacctctatccattacccctttccaacagacaaactcctcttagatctgttttacacatacacacatacaacccttgtgagctgcggtggcggtggcagtaactgtgggttcagggaaaggaaagaatttccccaagtaataaacaaatgtatttaggattaatcaccattttagatcatccttgagttactactccctttggaatcccaaatgcattccccttttatattaaatatggtcaactggagactaaggagttcaatcatttttgcataggatcagaaatttatcagaatcttttatcttcaattatcttctgtaattttatgtgttcatctaacatggacaaaaggaaagaagttacaaagtcctgcactgcattgtacaactgtgatccaagaggtgccattttcacttctgcatcatgctaattatccatgagcctattcccttttttatttttgctactactgaatgaagatccttacaatgtaatatctagcaatgttctaatgttcctgaactatatattatttgtttttaagcaagaggctctctgattatttctggttcctggtctcactccactaaactacatgagcccataaacctaatctaaacaaatcattttgaatttattttttctgcatttgctgccttcatcttagttttgcatcacttcaggcatcaacaaaactattttaatacaatcctttccctctacttctgcaagattagaaaataaaagagaacatttatagctactaggtgagctggaatatctaaaaagggattatatccctccctatttgtcaataaatatgacaatagttcatgtgagagtaagctgaagctgagtggcctataactaattctgaaaatttctaagctttagaaaaggatatccaggacttgaatgctcctgaaacgatacaacacattcatgcgtaatcagagatacgtagattcaaataaatctacctctacaatcttcagaaagcaatttttggagtcagacacaggtgcattttgttagagtttactgaaactctttacattgtaaagctgtagtggtagtcacccttaagttattcatagacaatttcaattatttattcatagactcacatgatgttatttttcattcagatccaaagcttgttacacattctgcaacaaaatatttaatgaaattccaagacttaaaaaatcttgcagtgaaagcaagaaagacctatcaatactgagtcaacagagtggacctaccaattcaaccaggcttggtacccaaaggcacaactcaacataaagttaacatttcactatgtaaattctaactccagtttctttttgaaacacaccttccggtcatctatttttccttcttgatctgttcataagtcataggacagaatcaattacctaggaccctttcattgtcaatgaaaatatatttcccaaagtgggttctgtgaaacactattataggcattattacagttgttttactattttttttaattccagatttggataaatttgggagatgtgggttttcactccttggggacttctcagagcccttagtatattaatgtacatcagaactctccaagtagggcattagaacatacagtattatccatacattttaaaacaaaagaattttcttctcatggagaatctcattggactagtatcccacgaagcacactttcaagaatgctggtttataagacacagctgagatttgcatataggcaccaaaagtggaaccacagagaaagggggaaatcatctgagatccctctcacatgagcacactggctgcagtaaaatgagcaatagaaactgctgagttcttttacatctatttccagatcctgtcaaaatgaataaataaaggtaagcagggtaggaggacagcaatcctgtgaaataacctccccccagtctatttgatagtttccatgacttgatcattgactcatcaaaatagacagatgtgctcttatccagcaaagtttaaagttagagataaaaacaacaacaaaaacctgagcttcaccttcagcaaagaagtgtcagctggagactttagaaattcaaagaggtaaaaacagaactatcattcaacccagaaatccccttactggatataaacccagagaaatataaatcattctaccataaagacacatgcacaagtatgttcactgcagcactattcacaaaagcaaagacatggaatcaacctaaatgcccagcaatgatagactgaataaagaaaatgttgtatatatacaccatggaatactatgcagccataaaaaaagaacaagatcacgtcttttgcagaaatgtggatagagctggaggccattatacttagaaaaccaaagcaagaacagaaaaccaaatactgcatgagcttactcataactaggtgctaaatgatgaaaactcatggatacaaagaggcgaacaatagacaatgggacctgcttgagggcagagggttggaggagaaagaggagcaaaaaaaataactattaggtactatgcctagtacctgggtgatgaaataaactgtacaataaacccacatgacatgagtttacctatgtaacaaacctgcacctgtacccctgaacctaaaataaaaattttaaaaaattcaaacatcctgcctaggattacaaatttattaaaaaattatttccttccatctaagctctctatcagaaaagtaatcatggaaccaacccaaatgcccatcaataacagactagataaagaaaaagtagtatatatacaccacggaatactatgcagccaaaaaaggaatgagataatgtcatttgcagggacgtggatgaagctggaaaccatcatcttcagcaaactaacacaggaacagaaaaccagacacgacatgttctcactcataagtgggagctgaacaatgagaacacatgaacactgggaggggaacatcacacactggggccagttggcgggtggggagcaagggaagagagagcattaggacaaatagctaatatatgcagggcttaaaacctagatgatgggttggtaggttcagtaaaccaccatggcacacatatgtaacatgtaacaaacctgcttgttctttacttgtatgctggaacttaaaataaaatttaaaaaaaactcaaaaagagaaaaaagtaatcacctgatattcaccgggataaagaaaggaatttagagaaatgtcttttgtccctacagttgaggcgtaaaacctgacagtgaggatgaaggcccttagaagccacgcagttccactaacaagcccatgtagttatttctacctccattacctgctgctttattaatataattaaccactatttattgagcttctgctaatgccaggcactatgctaggctgtatgcctatatttttattttatcctctgaccatggtaacatcggttgtcttattatcctgatttcacagacttggcacagagaagttccgtctcatgtcaaagatcacacagcctggctggggtagaatctgtatcaggaggcaagtctgcctgactccaaagatcatgcaatgccccttctccttttttttttcccttccaccactcttctgtcatgccttttccctagctattaccatttaaaagcagttgtgattaaaaacaaaggtcagctgtccataacttaactcaaatgttctttcttccttgctcttagagacaaattaccatcttccatcattcacgtggaccaagaaggatttaggctgagatgattatgcataataatctgggtctcattacaagctgagcacttggaagggccattctctcagcccttaaggcagctgaacttgatcatattttcattttcttttctccctatatccactaaagatcaactgacacagaacaaatgaagttactaacaatttactgatttctttaaaatatatatcttcaataaaggaagaacaaacagtcaaatgactgaaatctaagtacggaatgtgaaaaatgccactctctaaaattctcaaaggaagagaagaaaataaagaggggaaggagaaagagaggggaaggagaaagggagaaaaagaatcgaaggagggagagaggaatggaaggagggaaggaagggtatagagatcatctgcattagaatcttctcaggctgggggtccctgagcccactccagaccaactgattcagaacctctggggtgggatccaagactgcatttgcacacactcctctcgtgactataatttttttaattcatttatttttgagacagggtcttgctctgttgcctaggctggagtgcggtagcatgatcatggctcactacagcctcaacctctcaagctcaagtgatcctcttggcctcagcttcccaaagtgttgggattacaggtgtgagccatcatgcctgtcctggtgattgtaatttacaccagattcaccttaccctaagaagtgacttgtatatgtgttgcttatggaagtcagaagtttcccaagtttaagaattcagcatttagctccaggaaaaattggtcataaatatgatgatgacacatatgtgagacaatgactgcatgagtccaggaaagaataaagacattctcctgagaaagactcctcgttggagcctatgggttctaccgggcaggtgactcacccgttggagtcacaggtgactcagcaacagggttatgtaacaagaccaccttccttggtgctaattttagatttaaatagagaaactatttgaatgtcaaattaacctttttatatagagagagaaaaagtataacccaatgtaagcacaaggtaataagcacagggcaacacattcaaacagatgcaaagcacgtggagtgaaaagtgagttttccttccaggcccaaccacttctttctggcacttcagaaacacactttgtagaaccaatcacttgtatttgtgtgaactcctccctgttaatacaaagggaggaagcccattatacacacagttctctccttcacttttcccagaataacatatcctggaggccattctccacagtacatacacatttacatcgttcttttgaacatcatcacagtccatgtatttgaccagttcactttaataaacatttagactttttctaatcctttgctaatagaaatgatgctataaggaacactcttcttcatatggctttgtccacgtcgggggatatatttttaagataactctgtggaagcaaaatggcaagggcaaaggatacaggcacttttgagatattgccaaattttccctcccaggaagttgtagcaatttaaacttctattaatagtatatgatactacttgtttcccccacaccttcaccaaagcagtatatttttgattgtgatttaatttgccacttcgacttcttactggagaaagtgctgaccagcaaacatgaatgtaacttggcagctatatttctcctggagaatgaatacattggcattctaatttatcatcttcttatgcattaggtaagtatgaatctgtggccttgaccctcttcaactctgggtaaatttacaaactttagtttctgggcctgctaacacaggtgaacagtgatgcctccaagagaggacacatctacaagactgctggaaggagtcctcttttaattttactcttccaagttttaaaaataaattgcaaaataatttttctctaataagttaacgatttaaaattgtaattcaattagaaatttttttaaatattatgaaccaaatttttcttgctcaagtctgcaagaagggaggaactctgtggaacgcttcagatcagaccaccttggcggacatcaaagatctaattcaaatgacatctactcacagactcagtggtctgcttcatggattcaaaagttaatcaaaattcatactacaaatgctgttactaatcgccacagcagcaaactagaacccctccttgcccaccacttttacactccacccccagagaataacagacaacatgctgtttcttccagtaattcttaggatgttattgatgtattgtttatttttcatagagtccatgcacttaggaggaaacagggcataatatatatgcactttcagaaaactgttttaatgttataaataatatccaaaaccattaatgagttttagaggtggctgccttgcagcggggaattacttaagcactggaaagccaatcaacaaatatttattttgcaacttctgtgtgcatgcctaaaaaatcttattccattagtaaaataagtccatctagaaaaatacattaattcaacgcatatttactccacactcacatgttgcaccacagctccaagtgtgaatgaggcagagaccctgcactcgagttaggaagacacagccaactgaactgatgacttaaacgcaaagggacagagcacaggctatggcaggattacagaaaaagggctcctcatcaagccttgagggaatcagggaaggcttccaggaggaagcaaactgatatgatttccaagaaggattcatccaggggggaaaaatggacagaattagggaaatactattgcttaatcatagaagttcacctaaaccccatgaaagtcagcaatagtaccgtttctacctgaaatacagtcagcccaggattagaatatgttcagctctcatgtcataaaatccctaaagaactttctgaaaagctaagcccactgataagaataaaggaaaagcatagcaccccacaaactaaaacatattttccattacaaatacattttcaccaactctgaaaaaccaagtggacatttaacagatcctagaagactttgctccctaattgcctcccaataaccctcactctcattaaactacagcatgaccctctagtttggaggcccaccttctctttactcaaaaatttccaaacctaatgagagatagtcttagagaaagatgatggacttaacagactgagacgtattttccttccttggtgtttacattatttgacagcaaggagccccagagcaggagctagttccaagcaaagtccccaaagaatatcaacaaggaaaaacagccactaggctgtataaatccacttgctataaaattccaacacacacataataaccagcatatgaagctgaatccttataggaaaacaattcaaaatccaggtacattcatcaggccctccccatgtcgtggaagactaaagttagtagctcttccatatgttacactatgaaacaagatgaaaatggcagagaggaaaatgaaatgagccttctgagattcattctttagtttgttcgttcaaatacacggcagaagagggtgctttccatacagaaattattccgttttgacacactctaacttaggctatttggaggagaattgtctggctctaccttacagtacacacttcccaaagtcccacaaatcatgtggctttgggagaagagagagttcggggagcatttaccccgaccataccaaaatgaattaacagggattaatttgggttacatggtctatgtgccagtcagaacagcttccagtgtgtttcagaatttaaggtggggaaaaaagaaacagaaaatcggatttcaaaactaccctttaatgaaaagctgttaaagtgatttatcttaacaaaataatcatcaaattagaagctatatgtattcttaagacattttgaactccacattgtatcaaaattaggtagaatatatatattattatatatatattatctctctatatattctctatatgtaacctctatatatatatatactatatatattccatatatatactatatatactctctctctatatatatatatatataaaatcatagatacaccatgataatttactgagaatactaaaggagatgcgaataaaaaatatgtatctagtctatttgttagaaatcaggtatacctatctgcaacagacaaaaataacaatggcttaagcagacatggtctaatttgctcatgtaagtctgaggaccagcagaccagaacttgtctggccactggcaccgtggtcatctaaaacccaggctgctttcagattctcttctaccacctctgtgatggttcttattctcctagcccaagatggcattccagccatgccattcactgcctgggcagcaggatggaggcagggcaggcttccaatctttaatgacatgttccagaagttgcgcccatcacttctcattgtcacttgtcagaatttgattatacaaccccacctagaaacaaggaaggttagaaatgtaatccttcctctaggcagttgtgcaggctcccagaagaaacagagctggattattcaagaaaggtaagcgtcagaggtagtaggaaagtagcctgagtctggagagagtgagtagagcctccgtgagatcttgtcctctcttctagcccctcatctagcaagatttacagtgggttcctgtgcctgggatatagcactgtcttgatggttatagcaaaggtcccagtggctgtgcctggcttgaaagaagtcaacagcagcaatagcaaagcttgacctcaaattgatggcacagacaggcataaagagaagcctgcccatcgctgggtatcctgaagacctttctccaacatctagggggaaaatgtgggctttcattcagtgggcagagcccacactttcattttgactagaacatacattctgagtatgtaatcttctattggttaaacttagttatactctctcactttgtacccttaacaccacatacaagactgcttttgataaggaataaggacaggagatccttttttgtcctccaactagcctgcaaaaaagtattactgtagattgatattgtataatattacaaagaatagcactagcccaggtgacctgacacttctctataataattttctctggcacattaatttacacttgcatgcatatcactgaagaaaggtatttggggtttctatcaggacaataacaggcttgaaattagtgttgaaaaacattcacagccaggatttcaccccctgcccctgggttctctattttagctttctacattggcaactttcaacttttgctgctcaatgcaaataataactagcttaatgatttagaagaaaatattcttggagtatgttatagtcgtatgttaactgcaaatggctgccacctccaaataattgtctgacactatgtctgactatctgttcctccattctattgatctctcctatgaacaaagcagacagatatgcaggtacagctcttttaggaacaaattgccctttctccaagctgacatctttagaattaagaactcagagacagccaatgtggaaaaacatttctcccctgccacatgcttggtgggtcagaaagtcaatcaaattctatttcacaaaaaaaactaattcctatgagatgggaggctgcattaatatttctaagaccaaatattctccctcaagtaatataaatttataggtataacttttcccaatgctctatcgacttctcatggtatatgaaagtaattaggcttctctgaaagccagagctgcgttgagaactatatttgagtaaacacaaaagaaaagcattttgagtgttacttttaatgtttccagaaaagttaacacctataaaaatattgtttccagttttctgtatagaagtcactgaaggaggatgtgtgaaagtctgtggaaacagtacactggcaaactgccagctggaatcgcacggagctctgttgtaactcaaatctggccaggccgcaagtcaaagcatgtcctaagaaatatagtacacacatacagcgaacacaaccattgtaactctagcccatgggaagctgaacattcaatggacagtgtccagactatatagaaaaatagaacactgacccaccacctgcagaaaccagtcgaggaaaccacaacttttgcagccatcggccccaaatggttggtacttaatcaacaactgccaacttccccaagtgttgccccctgcatccaacacaggaccaaccagtgaaagctgactctgatcacataggacatctggcttctaggttagccacctccagcttcctgtgccaacagcctcaagtcaggtcacacctgaatcctcctcctcccttccctctcctctccccttccaacactataaagggttttctattcccctacttccttttgagtcttcaccagccacatgtgatgatggctgccacccttgttctagaaagcccagaatagcctctgcttcttctcatttgcattgctttttcccccatatctggttctccctgggggccttctatcctgcctgggccctctgctaggagttccttaacttttcccttctccatcctgcagcatcttcatccttccctgcttccaagggctgtgtttctgtagatgaactgtttctcccctatttgaggccagtccttccaactgtattctttcctcattatttctattccttcttcctggaccttttgtttccacctgttgtatcccttgctgtgttcctcacatgccactgggacagcacagaaacagtcccaaggcgtctacctggccaagcacagtggagctactgtgaggacaggatataaagaagcaacagtctggcctcaccaagaaaagggagcattacagattgattcatctgcattacatttcaagccaaagttgaacagtctagatttggatgcaaagagaacagagaaaaaagctaggagccaatagcaaccaattcaggggtcagagtggcaggcatcaagaaagtaggatggacaaaggagagccaacgaggagaaattaggggaaagcgaaacatcagtaggcagaaggcaattgtacaggattaagcctgaggacaccatgttagtcttttttttttttatacttggctcctgtaaattgcagtgagccatgtattaaagggaaagaacatggaggatcaccaagcatttctgtcctaaatatatacatatacatataaatatgtatatatgtgtgtgtgtgtatatatatatggacacacacacatatatatgtgtgtgtatatatggacatatgtgtatatatatatacgcacatacgtatgtgtatatacgtgtagatatatgtgtgtatgtatatatgtgtgtgtgtgtgtatagtgtgtgtatgtgtgtattttaagagactaggtgtcactcctgttgccagtgccgtcgtgcagttatagctcactgaagcctcaaactcctgggctcaagttattctcctacttcagcctcctaagtagctgtaactacaggcatgcaccgccatgcctggctaatttttttttaagagatggggtcttgctgtgttgcccaggctggtcttgaactcctggccttaagagatcctcccacagcacgggaattataggtgtgagccaccatgcctggtcccataatatattttcctttgcaatacagtctatagttaacatccaaatcccatgcaaagtataataaaacacctcttaccagcttcttctagggctcagaaaaactctcttctctccatttttgcctcccttctgatttctccattattattgctctattaattcttctttcttacaaataaaagtatacttacccattatgaacttttaaataatcaacttctttttctcctgtaattaaccaaaaaagttcttggaataatctactaaacacccagtctccactatctcctcagtcaaatacagtgttggcttcttccctaggccattcttagagaattcctctccaaggtcattcgagcccaaacctcatgcccttcttcagcacgcacaggctgcaggctctcctgaaccaccttgaagttctccaaccttggccttgccgacactgcactagcctttgggatcaccctttttcagctcagctatttttcattctttcactcctgcccatccctcttttatcatccctcagtctcatctgcaatggaaacatgacctaatctccaaaatcctttccaattgctatctccttctggatctccaaaacagacaagattgaggctcccgtttgctgttcttggtgtttgaatcactcctgcagcaatttcctacacagtctcatagtaaaggaatctgcacccctgtattctacttctcactgggactgtaagctccttgtgggtaatggctaaatctcatccacctttatatctccaagtctaacaatagtactagacacatctcaggtagagactctggagtgtgactgcctatagagagcatgataatactttctatctcataatacaacgcctagcatgctggctcttaccatcatcatcaagagatgagagttaaattaaatgaacctaataatgtgaagacagatgttagtattgtccccctgtgctgtttctactgtatttgatttcagatattttagtgaaaaaaaatgtgctttgaactatctagatgacaccaaaactgaaatttatcagagacctctggtattctgttttgtgcagacatactgcttcccaaattattttacacagcaccatccccacctcatttcctgtgcttatggacaacggaggcttgcagaattaaagtatgcctatttattccataagaaaatgggaataaatattaagataatggttgggggaggagaaagtgtacagaaaataattaagtcaaactcacccaacattaacatgggggagaagagatttttttcaaaaccctgcctccctagagccctaaaccttttcatcgatttccaataatagtgagaacttttgctataaaattgttttacagcagctaacaagcagtaaatgtttaatcattatacatacttaggagagcagcattgttattttatagattttaaaaccaggggctcatatagatctaagagctttcttcttgcacctagaaagcagcagaaccataccttgaactgtagtttttcagactcagttcttacccgctgtcattcatatccataccattctccaaaagactcatgtaagaaaataatcaccatgcaaagaaaccatccagctcttcatgaaaagctctagttcagtctctaggaggacccaaatgacagtgaagtctaagtctcagtctctaatgccaaggaaatgtcagggaattaagaccctcaagtgtgaacatgggagggtaactcaggctcctcttctaataaagtctaaatgggagttcatcaaactgtttaaaagccgatcttatcaacctaactaaacctaattcttcttgctttatctgaaaccctgttttaaagttcaaaatgaccaagctatgcaatttgtatgcagagaagctaagcagctgagagatattgagccaggactctctgtctagtaagttagaggaagaacaacaaaagtagattgccagatacaaagaaataagcaacatcagagagataccaaataaaagaatgttgacagctcttggcttcaggaaagccaagaagaatcatacattgaggaattggcatttgagcgaaggaggtttagatcatattctttcatcttgaaagtataaaaaggtctggaaagatgtatcatcctaagcacccaccatcgaagttagatagcagcaatttaattccagccttcatattggagagcacataggcaacttaatattcagaaacaagatttggggggacaatttaaagagagggcattttccagattaatggatacagctgaataaatgtgttctttgctttaaaaatccctcaaaataattagcaggaaaggtagcgatcaagcaaaatgttgactatttttcaagctgtgttttctctcctctcagaattattaataaacttaccatattttggttaaaatatttgctcacaaggagtattaattttcctaaaatgaatagggttataatattttaaaatgtatttcaccaacagcaattaatttgtgttgagtgtttgaggatagataattccactgggcaacaaaaatcacttaatcttccatgttgttgcaagagcaaagaaaagcaactgcattttaaaagtttaattagaagtaaaagcaagtttatataatgatatatcacactgctagcaagtaataaagataaacatcctcgcatattatcagcaccaaaaaacagtcaaatttcgctttgcttacagattgcagaaacttctatagtatgaaatggctttttcagataccgcttctgagtttggtggatttttttcccaagaacttgtggttaggataatttgagggattacagtgtagacagtgacattcccttgtatttgagagaagtttgtgcaattcagacatgactgtgtttgcttttagcaaacatactgttcacattttgagaaaaactgctgatgcagtctggtgaaagtgttctagcaatgccaaatcactgacagatgtgctgtctgccaagggatttccctaggaatgttctaattttcttctatctgtttagagaaagttcgtttaaaatctgttaaaatgtattaatgtgcagtgttccattgtatcttgctgtgggcatactagcaaaagaaaagttacaggaagattggtactggggtgcctaccaaaaacttgatcccgccagatcagaaacctgcccaatcctcgatcttacagaagggagagctcatatactctgtaataacttgcattgtctataattttattgtgttagaacacaaaggggctcactattcttccaaactcatttaaaaatatacctgctgttgaaactgcagtctagagagattaggtgatatatccacagtcacagtcaattggccagtgacaaacaatgtggtcacctgcaaatatcaatagaattaagaaaacaaaaggtagttcttaccagtgagttttgcatgaaggatgtgaggctcaaagataagatactttgagtacggatctaaaatttttatttgttaccaaatcaatgttttctatatttcctaaggtgactattaagtcggagtcaaatatcagaaacatcatcacagttataaacttaaccattgtggggaagattaacatggctttcattagtgaattaaaattgacttctgcatgttggtacaacagtaagacaatatcacaactgtactcccaaggaagtaaaatgctaaaaaggacaagttaaaaaaaaaaaaaggaatgcaatactaccagaagtcctaatggtaccagcacatacacactgtcccacatcaatgagaatgctcacctactgcctgagaagtataataatgaacagctatcgttcttgcccatctaaactccctttctttagggcaggagttcttgacctcagcactattgacattttagaccacataattctttgctgtgaagagctgtctgtgtactctaagatatttatggccactacttactagatgccagcagcatctccttcccagtagtgacaaccaaaaatgtatccagatgtcgctaaatgtgttcagatggggaaaggggagatataaaatcactcccttttgagaaacacaactttaaggaagcagccacttcctcactgtactggtagggctgccattcacatcatatgcccagaaggcacttagagctcagtaatctcatggccatggccttcccaatatccacagatccatcctgctaaaggcaccaatgatcagctcttctctgggacttgttctttaattccatatcctacacaacactctcccaaacctcttttttccataagttattcaaagttgggtctgctacttacaaacaaggaagcctacttgattaaaaaaaaataagcagcaaaaataattgttttcatttgtgtaagaaaaaaatagtgcatctgtcataaactaatagtagagtaaggcaggattacagaatcacactccccacctccaccctgcaagaaactaatttttaaaagtaagaaaatgataaggattttaaaaagctaataccttacccaacacctataaaaccaataaagtggtataagctttgctataaattttgaaagcctaagaaaagaaaacaaagattctgatacgtcagccccaccaactcaccctaatccaaccctacacacacccagaagcggtactaatcaaagaaggtaagtagacagatttctgaagtttctcagaactaccctaaatatgaaaaggtatggactgacagaaggggagtgatgaggcaaacccagacaaattcgagaaaaacaactttgttatagaagctcctacatgtccttttgagaccttatcaggactacagtacatattatagatgttctttttatgagaagatgccccctctgggcagaccaaattagaaaaatgcatccctctcatgagcggatgcaacagccctgcaccaagcatgcttttttggaggcagagcacagactggaattgagctccccttccgggcccctcacctatgtttctccattcaaggacaacctgcacacagcagcagttcacagcagccctgccagcagaggctggaagggtccccagagtttgttgacttccacagcaatgtgccaagtgacagaacctttgaaagcccaaagactgcaacaatgctggttgaggaatgggcccagggacagaatattaataggatctcggaagatacagcagggatcaggtcgcccagtgtgggctgcaccctgcttccccacagccttctccaccctcaccctccacatttcctaccgcagtggcttcctaatgtcagcatgtttcagagctgcctgaaagccttgtgataaaacaggttactgggccacatctccagagtttctgattcaatgtgtatgaggtgaggcccacagattccccctgttaaatgatgttgctggtctgaagaccacattctgaaaatcagtcatctttagaaaagtatgtaaaaagcagcagctagccctcaaaccatagctcagaatagggaagacaaactagtgtcaaggaacttgaaatcaaggaagatgaagatcaactcacaccagttaagaaaaacaacaataacaaaaacataaaacacccatcttaatagtgagcaggataaaaataaaaggcatgactaccatgcaaacttactacctgaatgaggagagggtggggaatggcagaaagaaaataacagaatgtaaaagacagatgaagaactcagctggaagaaaatgtaactgaaattaaacaacagtttcctcataagtgttttataatattaaggaaactaaaaagaatcttcaataacagctcaaaattgagaagataaaacacaaacaaggttttgaaaaggaaattccagagttaaggaagtactctgaatatattacataccaataaaaacttaattaattcattagaaacagaaatagaaaaagtcaaagctgaaaactaaattaccatgatggagaaactcaaaataatttcactgaatacctgagaaaaaaggcaaggaacttgttcaagcaaacaaagtaagcattaatttggaagacagatagagtaagccaagaaaatcatcatcagtgtccctgaaacactggaccgtaaaaagaaaaattctcagttttcacacaaaacatttatctaaagtgaagaaagaactgaatccatgggtggaaatgatacagtatcctgagaaaaatttaatgatcagcattgtcatcctaattaagctattacacatcaaggataaaactagagctgttcaaacatctaagaagaaagcaagtcaattacaatagggaaaagaaaatcagcctggcctcacactttctacagcaacagccaatctcggaaaaccatggagcaatgtctaaacttcagagaaaaagaaaaggtgacccaagaatgtcctatcagccaagttgttattcaggtataaaggtaataggtagatattctcaaaagtgaaaaatctcagagaatataaccttcatgaaaccttcttggagagaaaaaaaattgcttgatgatgaaaggtacccagctaagagataaataaaaagaaacaatcctggcatctagaaaccatggtaaaaagactaccagagctggatccaaataaaaatacaaccaggactaaacaaatgggagaatgacatttgcaaaacagaatgaggatgttatgagcctgtgcaatggactgaatacttatgtcttctccaaattcatatgttgaaatcctaacttccaaggtgacagtattaggcagtggaagtcatgagggctccattctcatgactgggattagtgcctgtataaaaaagacctcagagagctagctaatagccccttgcactaggtgagaaaatagcaagaaagtaccatctactcatgagaaagcaagcctttgccagacaccaaatctgccggtaccttgatcttagacttcccagtctctataactgcaagaaatatatttctgttgtttatgagctacccagtttatggtattttgctacagcagcccaaacagactaggacagcctgtcagggtaaaaataatatgagcaacatagtttgaaggtagtaagagaggtagctggaaagaaattagaaatcaatcatgtaatctctcctagtgaataacatctaaaattggtgtagttaaaaactcataaaaactccaacttttgaatgtttttatattttttcttaacctttagaaaagtctttaggaacaaatagctttaatggtgaaaaaatacatagctgaagctcaacaattccttggatttcactttcagtttctttttcttctgttaaattcaggtaaaattaaatttaacatctttattgataaagcagatatattatgatctctgaattattctcatccttacaatgttaattcttactatctatccattttactatcttcctatctgtacatgtgtattaagagatgtttagaacgatgctcttcaactgttcagagggtatttctcggtggtgggatttagggtattgtgttgctttcttctgtataattttgtatattgcctacattttttaatgatgagcataagtcacttgtaaaaatatacaatcaccactctaaaaaggaatacatgaaatataacaccacttttctgacacagtgagtataaatgtatctctttcaatgagcaacatcataaagtgcctctctgggtaaggcatcattgtgaatatccaccctcattgcaaagtacactagaagtgaatgatacgtaagaatgagtagaatgtatccaaggcaataacactataaggctctgtttcatttttgtaaatagatctctggcttaggctcctttaattagcagtacctaacatttcctgagcatttgctatgtgcccggctgcatgccaccatactttataggtattttgttatttaattctcacagtaactataaggtaataataataatggtgacgaagagactaagaacagctcagagttgttgagtgtctactatgtactaggcactgctccaagtgcttttcaggcaataacattcttcagtaggaagtacttatagcaatgggagtacattgtgcagcagaagagaaggctatcaaggccagcttttaaaaatacaaggatttacatttagtacagtgagagaaagtgcacaggtgagtctggccttgtgtagagagaaaacataaagagaaaaaactggcagaaccacgcaattaattaagtacttttgaccacaaaagtgaggggaatccagggtagagcaggactccgaccaagaagatataaaggccttggtcagcttctggttgtcgtggaaatgggatttcaaccattataatgagatcaaatcatatgctaacaaagaaatcagtaattagagttggggccacccacagagctcacctccatcttgggataagatctaggaagagccagacatgcatttttgccgcagataaaatcccaaaaggaaaggttttaagtatgaaagggttgggctgaaataacatactcaagaatattgctattctgagtgttgcttctgcttccagctctgaccaggtcactgcagataacaaattatgtcatttcttatagctctattccactcatcagctccccttctatgcaggaaggagcatgaaatgggaaaaaaaccgaggttcccactcttggtgtcctaagtgatcagccacaggaagaaaaagatctctgctcattttccctctcacttactattgcccaggaatcttggatctcttcagaatagtgggcaaactgagagaaagcaagttcatttaatcctcaaaacaaccctatagattccattctgttatcatcatccccatttcacagatttcacaatggacagggaggagcagcattgaagggatcagtaacctgcccaaggtccattttaacacaagagctttctgacttcattcaggctcccctctctgtgattgtgatttctctcatgtctaaaccattcacattttttaaaattaggatttctatgcttaagtatgtacctttgttcacaactaagttgaggattctatactcaaacacacacacacagagagagagagagagagatgcagttgattttccccaatactaatgtccatgaactgaaagcttaggcaataacttagtatagccacagctttggtttggttcagttctagggtactgctttgcaaattaaaggtgtaatcccttcaaatcactgcaataaaagtgatttgaaatcatactatttgcagtcataatagaaacaaatgcctacttaactactcatggctcagctctggtgagaacacatcaatagagtaaaatgcttttagctttccagagaaaggttccacctgacagataccaagagatcaaatattcactccgcttaggacaaagaagtgtacggattaggacatacttgagaagtcagtttcagaaggcaccagtttagaaaagaaccctgaaagacctctaccatttatttatatttcaatgtattcattccatttcttcctatgtcttttcattcatttgtttatctccttggtctgtgtgctgcaggctaaaactacagcaattaaacacaaggtccttgcatccaggagttcttctcaatccagtaatggaaacaactaacatcatatactattttgctttattttctgctagaggtacggacaggaggtgctgtgggaacacagctaatggggcacctggttcttgcctatgagagttttgagaaggatacctgaagtagggtttagaaactgaccatcacaggggatgggagaggaggaaagataaagttataaggaattctcaaactttgaacatgtgaatgtcctatatgtatctgtaaatagtatataaaaacactatagtatctgactgctctgtcacagatgaaaaccttcaaagagaagctgatcatagacacaattatagaaaccaggggatgttatctcgcccaagtctgcctgactacttttaaggatgctaaattcctaatctctcaaggatgacattcttcttgccccagagtgtgctagagccagagggaccaactctttctccctaacttcctacccaacaaagaatcctcctctacaatattcctaatggatgtttactatagcaaacatcacttgttcagttttggttcctcagtccctattccctcattgtaatagcattttttttttttttgagatggagtctcgttctgtcacccaggctggagtgcagtgacgcaatcttagctcactgcaacctctgcctcccggattcaagtgattctcatgcctcagcctcccaagtagctgggactacagatgcccactgccatgcccaggtaattttttgtgttttagtagagatggggtttcaccatgttacccaggctggtctcaaactcctgagttcaggcaatctgcccgcctcagcctcccaaagtgctgggattacaggcgtgagtcaccgagcccagcctgtgatagcatcttgattcacttttagggacttttctcctattataagccaccattaggatagtgaattgggtgccttttcattccactccagaatttgaggtcctggagacttctggtatattttctgctgtaatggaaaaaggatgagcatgtgtcctaagctcagttaattggaccttctcttccagggctctgaatcctaagaagagtgacatgccactcactcactcattgctgtaatggcttcttaatagccaagtagactccatcttgatactttcctgtttctaagcctagtccctcctgcccgcatcttgattctgttaactccccgatatccttctatttgtaacaaattccttttctacttatattaacctcagtctctgttacctgcttccactggaactctgattctgcttgaatccttccattaatgggaatattactacattgagaggctgctcattccattgctggacctctatatttgtttcaaaagttgttaattcaagctaaagccgggttctctattactagtgtctgtcatcaggaattagaaagaataaattttagtccctcttccatatggcagtcactatagtatccaaggaagggcaaataatcattgataaccacaccactaaagcccttctcccagctgaaaaccaccagggtttttataaatcttctagaataatataaattttcagacaccacagaaatagaagctttgaattgccgatgagcagattaatcattttcagatggtctcagggaactaaacagtcacttcctcggtgggcctctttcgaagagggcactttcatgtttattacttgcaagggttggcaaatggtagaattcttttttaggatgataaggatttatatttctatctagtctgccactaattaaaagtatattatcttccctactgaagttggggtaattggtggttattttcagagcaactcatcagggtgagacagattctttctgattgaggtagcagaggtgttgaacattcattgtgtactgagttcacgtttctagtatcacaatttcccacaccacatgcgtgatagatgtgtcttcaacatttgcaaacaattccaagtcatttctcccttcaattattccctcttctctgacatcctaacaaggttttcattttgtactaatttcactaatttaggaaaacttttgtctgcaatacatacatatacatatatacacacatatacatatatacacacatataaacatatatgtatatatattcatattcttgagaagtaggccagaaacttggcttgctgtgaaaatcagaggggaaataaaaaggatgaatggagaatagtgtctattccctttggcacttcttacctaatactcaagccccttacttgctgaaactcaagtcttctcctccctgctcccacttgccttatatcttctctcaatgagtgaggattaagggcaggtacttctcccattccagagaagcagcagctccatctggagcactctgcctctttctgatggagccctcaggggtgtacactgtaatgtccatcttccctcgtctgctcacgcagaggacaagactctcactctcaccctctttctttccctatctaattttctctcctttctctctctctttcctcttcatttctagtggccaccagctctgaaggtaacatcccagcctgagtaggcctgagccaattattctagaccagaatcagcgggggtaaacacaaacactctcattctctagctgtttcctcaggtgctatggctgttctggactgttctccccttccactgctcagatgatatatgacactcaattacagttgaagagaaatggatcaactgctctagatccaggcccctgaagctactttaatatgtacataagtgttcaccagaggttcagtccagctctctggggtgctacatgggtgcagaaggtccaaagacccagctaataacgaaagttgacttagcttttatttagcctcctttattttttttcccaccaggaaaaaaaggagttgggtcaaacaggaactgggcccaatatcattacaacaatactgcaaggtcccccttcatcccaatgccacaatctagactttgtttttaggaatatattttaggaataataaatacaaaagaaaaaataaatcctaaattatgaacatcgttatttggttttgcaagtcagtcaaagtcatgtaaagagagagacctagtcattatcaggaaataactatcttgaattagtctgtaacaatttcttctcattgagtatttttgtgtttcccttctcttcataataggtaacatgatttcctacttaaaacggtggcagagtttcccttaaaaacaaatttatgttttaaaagtcagttgattcaaataaatattaaatatatgaatgcatatgctggtcacgcacaatttggaaaaaaaaaaaaaaagtatataaatgtcctggagacttctggtagattttctgctgttcctactctgaatggacatggatcattttcatgccactttggggattgatgcatgactcctgttgcttccaaactgtctcaaaagaaaatagcattccacctgacagctgcatgaactcaagtctttctcatgtatgggaggcataagtatgtccatccaacaaatctgccagcattgcctttattctggtactgtctaaggctgcctattcccttctgcacagagttcagccttttgcttccttttttatttattttttttttgagactgagtctagctgtgtcgcccaggctggagtgcagtggcgccatctcagctcactgcaatctccgcctctcgggttcaagtgattctcctgcctcagcctcctgagtagctgggattacaggtgtgtgccaccacacccagctaaatttttgtatttttagtacagatggggtctaaccatgttggttagactggtcttgaactcctgaccttgtgactcacccacctcggcctcccacagtgctggaattacaggcatgagccaccgcgcccagcccttagccttttgcttcttatggaaaagcattcttcattgttttattcactaggcttaggcaagtaccaccctaactctcaaatagcctttccatctgggcacccttcttcatgatgtctttgttcctggaatgtgcctcaaaggtctgatttcttaggtgccaagcagagtaaaacttctaatcttccttctatcaatccggagttcctgctatctcaacaatatactgcatacccaaagcacatgcataaaataaagtttattacaacaagactttgtttacagaagaaagattagactgattgaatacattgttctacactgattttaattggtgctataatctgatctgtctctaaccagctaatcggtatttaatcggttgctttaattttattacaaggcagctagaatgcagctgtagctagagaccacacagtaaataaactacattattattatatttatgcatatgagttttattctgcttgtgtcaaaattatactcacttccactcccctcctaatttgtttgtattaaaccattgctgtgcacttgcatagtgggaagagttaaaaaatgcctttttattgccaagggtaagttatgtgataagtttccagatgtacccaccttcatttgccaaacaatcttgtgattgatttaaatatttatacagtgcttcaattactgacattgtttctattaattaatgatattagggtttaattctacagaatacagaaatagaaacagaacaaattcatgcacaaaaaagcatctgatatgatcaccctgaatgtagtttcatgctagagtttctacgcaattccccagagaatgaagcataccagcattaataaaactctaagtgttttaggggctttgaacatgggtgcgataggttccaaagccctatgtaagtatttgaacaacttgaccttatttcagcttcttgagagaactattagggacagtcacagaatcaacatgaaaaattattaagtacccacatactgcctgcctgaaaggactcagacaactacagcaaacttcgaaaaaatattaataatatcaaaacaccttgcggctgctcttttagatcgctgcacatttttaagatgtaatttactggaagctctcttttgctctttcctgtcatttcagttatgcaagaacacaatgctctcaccctacgccagtctggagagctttgcttttctcttgggaggaggcatggtgcaatgatgagaagaagggcttagcagcaggccgaccctggctccagtcccagcttttacatactccctgaatgacatcaggccatgtactcttaagcctaaatttcctcatctgtaaaataggagtcatcacagctactctgatattagtgtgaggattaaatgagacaacaccataaggctctagccaaggggtccagctgttcctttggctactgtgatctcaggctcatttagcccagtaattgtggctcatctcatagttgtcttctcatcctgctgagattcatttatttaacaaatgtttattgggtactgatgggggtgccaagcatgggctagaaacctggaacacaacactgaaggtccagtttgcaacacaaagtccagttggtccaatgaaaaagaggattagatttgccttttaacaaaacattcctaggtagatgtttatggtaaagctaacatcgagccaagtatcacagaaatatatggcaggacattaatgcctagtgttccattataggaacgctaagcatgtgggagttatttataacctacagctcaaggtcatcaccaaggtctgatttttcactcatgcaaaaattcaaaaaactgaaacctctggcataaacgggttaaggaagggaaggccccttagtccaagcctttccttataaaggtatggaaagaaaccattgttcctcatcagcatgagagcaatacgtgttgtttacatagtattttgccatctgtgatgatttttatgtagtgtaggacaaggactttctaacgctcggctctatactagaccaggtccaaaaatctacctgagtatcactacctctgtcactgaactactgtaacccaataacaggataagatggctaacaaaagatgccctcgtaggaggaactatccagtagtttgatttcatacttgtcctaaacctttaaacttgttctacccacatgtcacagatatggaggttagtgaaaactacctgtgtgtgtacagagcagctgggaggacattttggctctgttctaggcagtcatgtagggcccccttactttgctcctgcagagggtcctgatactgtcactgttctgctcagcttcaaaactctcagcaggatgtcccattcctcacctagccctcacctgctctacctaatgatgctcaatcactgaactggcccagaaataatacctgcctatcctgacttcttacccaaacctggggctacctccctgactggcatcctaggggggctctccatggcctttagtgaagtggtcaaagagaagggtcaactctttatacaaaagaaaaatgagtcatgagctaactgtgaaactctcaataagtcacatattctctgatctccatttcccaaatcacacaaattgagagccatctaaattgcctcccaactctgagactctatggatatacatatatgaatcatcatagcaaatatatatctattatagaagctaaaggaatcttctcactttctccaattagtaccaactagattactccacaaaagatacttgaccttgttaaaacaaaaagcaaaacaaaaatactcttttacactattatcaggaaatctatgcctggctttagcagcagagtataaatatttggttattggatacttttcaatttaggggaaaaggtatatctattgcttaaaaacatttgtgcccttcttatagccaggtcacccattccaagtctgaagaaaataaattgaagtggtggtaaaagttagttaaatttcagaatttttaaaagaagggatatcattcatctctggctagataactctgtaaaagatctatctgtaagaacagaaaatgctcttataagaactttgagactagataaacaaatgcatgccacacagaccaccactcccatctcctcaggctgtggcagacattattaatcaataacagaatccttcccactatgtctatacacagccttcaaatggctctcaatgcagtatctcaggtaactgccagcaacgaatcatatttggcatgaatgataaaaggtatttggaatccctggctttatgactttgactgttaccctgactgccatttagaggattaacagccaagaatgtcacagtgtcattatttaaataaaatagaaagggatcttgcctgcaggaacatgcctctgaatattagtaggggatttcaagcttgaaactctccagaagtttctttttcatcactctaatgcttgactttttcttcctctgccccctccttccttatgaactctcaaggatacttacaggtcagaagggtcttcaggttgagttctggccaaaatttgtggcatttccaagtctcacttcactgaatgagtacaaccctgagacctgtctgggaacatggagtgaaacagaaactaagagagccaccactgctgaggcagggagggatggcctggtgatacacaggaaaggtaagtgtggcagtgcagtgagagatgggctggggagtaaggtagacaaaaggatctaaagagtggagtccaaaagcacaatgatacaaagtgagtgaagctcagggtttagcaagttaacatgaaaaccctagctcctgaatgaagagtaccttttgcatggagcctggattatcttttctgcttatatctttcttttctcctccctccagcccttccctccttcctatatgctccattttcaactccctttatattccttcatctttctctccctacttccttttctttaacttccatttctttctttttcagtcattcctacatttccctttttctctcattctcctttgtctaagctttagacaaccctgctcactagctccttggcctttaagagcttataagggctaaggggctactagtagcttctccccatgcaacatatcacacaggtgtcttggagggacaaagtggggcttgagactcctggatgctacacagcagaggtaagggctcaggtacccaagagaagaaatcaatgaagtaggaagcagaggtgaaaagagtatatcagctcaacaggatcaacaaagtccaggaacactgtcaaaataagcttggcagaaaatcaacagagcagagaacagcatgaaacatgaagtgatacaggttgtgggtgggtggagaaagagaaatacaaggcaagcaaagtggcagcattaataagcagccatgactggacacagacctgaagatggatattaggaagtaggtgcccactgagaatgagagtaaaaaccaaagtgatgaactatgcctttgtaacacctgacacaaaagaaaagaggtatgccagttaaatggcagcaccatgtacagaaatgagtagatatttcttggttttgcttaatatcgctctggaagcacagaattcatgttctaagacttaagaataacctaaaccagcccagtgtggtggctcacacctacaatcccagcactttggaggtggatggatgacctgaggtcaggagtttgagaccagcctggccaacatggcaaaactccatctctaataaaaatacacaaattatctgggcatggtggcagatgcctctaatcccaactactcagaagcctaagtcaggagaattgcttgaacccgggaggcagaggttgcagtgagacgagatcgatcacgtcattgcactccagcctggacaagaacaaaacacctcaaaaaaaattaataaataaataaataacctaagtctatttgggtgccaaaaaatgtgtattctatttggacattacagtggattgacagcatagaaattatttattaaacccatcctactggacctgaaggtgaaccccatcgtaacagggtgcctggtagagtcattcttaactagccatcgatttgtaaaaaattgcaaaagttgttttttttttgttttttttttgttttttttttgttttttgagatggagccctgctctgtcgccagactggagtgcagtggcatgatctcggctcactacaacctccgcctcccaggttcaagcaattctcctgcctcagtctcccgggtagctgggactacaggcgcccacaaccacgcccggctaatttttgtactattagtagagacagggtttcaccatgttggccagaatggtcttgatctcttgacctcgtgatctgcctgccttggcctcccaaagtgctgggattacagtaaaaatttcttatatcaaatgaccgttcttgaattgttaccttggattaacagggagcaactattggcatttccatacagcaatctactatctggggataatctagctttcctggagggatggaaacaaagtgcataatggttgtttaccaatcatataatatcagacaccaataatttgtcattcactctagtgttctacaatcattagaggagctattcaactgctctcagacataccagctatgatcatgtaggaaacgtgattccgtgggctgaatgtaccaactcttcactaacatctcaatactctagactgaagttaatgaccagtgcaaaccaccagagtattacagtaaaagaacagcagtaaaaaggccttaataaatcagaaatttaaattggctattcattttagttacagccattcgtcagagcaaagtgatggtccaattcacctatgcggtaacttacattgatcataacagtactttaagtaatatcatccattaatttattaagcaaatatttgagtaatacctactatgtgtacaaccctctgccagatgctgcaagatatattcagacataaaagaaacaatcttaacctttaagaaacttgtaatccagtaggagaaaaagacattttgtagaagtcttattcaaataaaatatgattccataagataaggctccatctaagctctctgcattgcaaagctgatggcaagaactacatttcccagaatactcttccctggatggttcgagtgaagtttaccaataagaatagagtgagatgtggaagaaaaagagataaagaaactgttctttggaagtcagacaaatgtgcacaaatgaagtcttcctcattgctgtacattgagagatgtccctgctttccttatcgaaactctgatctgtctatgagttattaacacccttgtcagtaatatcacttgtcattaggtcacaattcttgggactaccattgtctaggttcttctattccacatgctttgtttctgtgcatgttgagtccaacatgtgtgtatattttaggtagtgtcacctgtttggatatccacaagacctatttacacaacacctgttacaaaaactcaccccagatgttttcttgtttgttcagtttaatttattatacaaatcttcacatttgaaaatataagcaaaagtgattctaagccactacaggaaattcacaaaagcaacacctggtgtcaacatatttcatcacattttaatgattatgatgtgcacaggtgtgctgaaagtttctcctccatactctttgattcttttttaaaatttttttaattatacaagtaatacacttctagaactaataagcaatcatagcaagcttgtgggacaaaagttaatatacaaagtcaattgtcttcttattgctagcaatgaacaattgggacttgaaattaaaaacacaataccatttacattaatgccaaaaatttaaatacttaggtataaatcaaacgtgaaagatctatataaggaaaactataaaactttgctgaaagaaatacaaaagatctaagaaaaaggaaagctatccacatacgcagacaggaaatctcaatattgtcaagatatcagttcttctcaacttgacctatacattcaatgcaacctcagttttaaaaatcccaagccaaagtaaaagccatctacggcacacagcattccgaaaggtttgggctacctgactattatggcaccaagaaatctctggtatatgagaactttcactttaattcaaaatgttggatgacctgattttcagcagaaatgctcttcaaatcagtttcacttaggctttttggtgtgaagtgaaacgatgcagacaatgagctttggagaatgaggaaccactgaataacttactatggaagtggatactgacatggcaaagaaacgacagcctggagtttttaacagaatgttcccaatgagcaggacctgaagatgtttcttcgttccaaaggagctagcaaagaagtgattgttagcatcatatcaaaataactaaaagctataacacacactcttgaacgtctttcaaaacaatgggatctatgaaggattatgatatcagatcttgatactgtaaatattttgggccattctcctgaatgctttcttttgtcccatgaaaacctaaacttagggattctatgagttcctctactcagctggatttacctgtaaatgcctttgttgattgttgaccaatgtcccttgtaccttttccaatagtctcgatctgaataaacagatggttaaagttttgcaggaagtatatttttcattgggtcacaatgatcccacagattttgtaagaaagatgattttttaaaaccctttcatcttaattcagggtaccaagcaggtaaaaactaacattgaatttttacaggcaagtttcaatttgaacagtagggaattgctattttaatatgtggtccaggaaccaaaatcctagacctttccaatgactatgccaaaacaaactacacaaatatcaaacagaagctgttttctctctgaggtactgaagaagaggtacaaaagcttgccttaagttatccagatgtggggaaaaaaagttatccagatgtgatcttttggcagagaaaaagtttagtgagaagaatattttagcttggtgcaaaagtaactatggtttttgggcaaaaaccatagttacttttgcaccaatctaatggattgtctcatagaataataaattagccttctgtgaaagtaatttgtgataactgaaaaatccttgggttctggattcaagcataagtactttataaagtcaaatcaaagaattagtaaatgctggctgtaacttgaggacatcaagcatcactcttctactctggagttaaaaaaaaaagatacaaagtaaatttaaaaagttaagcagaacactggggaatttttgaaagccagtcatataatgtagtggtatcttttcattttgaatttgggcctttcaaaaaggaggggtatgatttcttaaccacagatatatatatgtaataattctttggctattttgttttacaggtttatggaaactcatggttgatatgctcaggtgcagtcctcctagctacctattttccagtttgaattactccaacataccattatttgatacaggctgtgctgctgtagagatggtagtgccatggtgatttgctacacagatcatcccatcacctaggtattaagcccagcatccattagttactcttccttatgctctccctcccagcagcacccctccaacaggccccagtgtgtgttgttccctccatgtgttgacgtgtgctcattattcagctccctgttgtaagtgagaacatgtggtgcttggttttccgttcctgcgttaatttgctgagggcaaaacctgattactttgaaaacaagttctactgtggcaggcagaatcatggccacacctaaagatgtcaacgttttaatttgaagaagctgcgaatatgttatgcaaaaagattttgcaaatgtgattaagttgaaatttgattaagttaagggccttgagatgaccttgaatcatctgagtggacctaatataatgctaagggtccttaaaagtggaagaaggaggcaaaagaggtcagaatgatgctgtataagacagacttgaccactttgaaggaggtgaaaaggaggctttgaagaaggaagggaccataagccaaagaatgcagggggccacaaagaaaactgaaaagccaatgaaacagaatctcccctaaaggccccaaaaaggaatgcagtacggctggtaccttttcagcccagtgggcccagtatcatacttctgtcctacagaaccacaggatgataaatttgtgttgtttgaagccactgagtctgataatttgttacagcagcaaagattaacatagcaactaagtagatgatttgttgcattataggtggtcacaaaatacaatcctttagtatcatgtattttttcctcttacaagagtaattacatttaaaaaagctatctactgttctagaatcactgtcgttgtttacaataaagtcctttaaatgtgcgcataaaaaactaaatgtgaataaaatgtaaataaaggaatatttttgcctaataaatacaaagaaaatgaaaatcccagcaacctattttttgtggatattaacaaactgattctaaagtgtacatggaaaagcaaaagattcagaatatgcaagacaatattaaatgagaagaacaaagtaggagcactgacactatccgacttcaagagttagaacaaagctatagtaattgaaacagtgtggtattggcaaaagccaccaaatacatcagtgaaacagaagagaaagcccacatagtcttttccacaaatggatctagaacaaatggatacccacatgcaaaaaaaaaaaaaaaaaaaaaaaaaaagaatctagacaaagacctcacactattcacaaaaattgactcaaaatgaatcacagacctaaatgtaaaatgtaaaaccatagaactcctagaaaataatgtacaagaaagttcagctgatcttgagcatgaaagtgactttttatatataataccaaaggtgcaatccatgaaagaaatcattgataagctagacttcattaaaattgaaaacgtctccttgatataagacactgtcaactgagaaagacaagccaaaggctaggagaaaatatttgcaagaaacatgtatgataaagaactgttatccaaaatattttttttaaagtcttaaaactcattaagaaaaataatttaaaaatgggcaaaagacttgaacagacacctcaccaaaaaatacatacagatggaatacaggcatatgaaaagaagctcaacatatattattaggatattgcaaattaaaacaatgataccactatgtacctattagaattgtgaaaattcaaaacaatgacaacaccaagtgctagtgaggatgtggggcaacagaactcacattcactgtggatgggaatgcaaaatgatatagcaacctcagaagacccgcaatattttacaaaatgaaacgtactcttaccatacaatccagcaattataatccttggtatttacccaaagtagttgaaaacttatttctacacaaaaacctgcacacagatgtttatagtaactttattcaaaattgccaaaacctggaagtaattgagatgaccttcagtaagtgaatgaataaacaaatcatggtatacgcagaccattattcagccatactaaaaagaaatgagctgttgagccacagaaagacatggagttactttacaggcatactgcgaagcaaaaggagccaaattttaagggctgcatactgtgtgattccagtgatgggatacattggaaaaaaaaaaaaaactatgaagagaatacaaagatcaatggtttgcaagggctcagaggagggggagggaaagagggatggctagatagaacataggagattttttagggcagtaaaactattctgaatgatataacagtggttgcatgtcattcaacagctgtcaaaacccataggatgtacaatgcagactgaaccataacataacctacagacttggttaataatagtgtatcaaaattggctcatcaaatgtaaaaaatataccacactaatgcaagtgttaattataaaggaaactgggggagtggtggggcgtaggcaaactctgcactcgttgctcaatttttctgtaaacctaaaattgttaaaaaagaaatagtgtattgatttcttaaaaccaaataatatataaatagccttataaaaaatgtcaaaccactcagaagtatccagactaaaacatttaactcccaagtgatgttttcacaccaatcctttcattcctggggcaaatgctcctcacagtttggtatttatgcttccagtctacttttgattttttttttttttttttttttgagatggagtctcacatggtcacctaggctggagtgcagtggcactatctggacacaccacaacctccacctcctggattcaagcaattctcctacctcagcctcccaagtacctgtgattacaggtgcccacgactacgcctagctacttttttgtatttttagtagagacagggtttacattacaatggccaggctggtctcgaactcctgacctcatgatctgcccgcctcagcctcccaaagtgctgggattacagccactagctaccgtgcccagccccagtctaatttttaatatgcttactattacacttatttccaaaaagtgttcaaacataaatggaacattttataaatatcattctgaaatttggacagttccttaaagcaactactagtgactgcactgagcattatgtgaaaaaaaaaagactccagaaaatacatgtgcaaggtggtcactatacaaacacacttttggctttccagagcattgtacagcaatagtcacatagtatgggctctagaaatacttgagtggttggcaattaagtcaagatgaaaaggaatcaggccattaaaatatagctacaactgggaggctgaggagggaagatcgctggagcacaggagattaagggtacagggagctatgatcatgccactggactccagcctgggtgacagagtgagacactctccaaaaaaaaaaaaaaatacaattacatggtctgacagttaaattctagagagaatcaacctttcatccacacagctagtatgccaatgaggtgtccactgtgtagggagaattaaccctctgcatttttcttaaggatttgagctctcttagctacacaaacataggaattgttatccccatcttagaggcaagaaagctgggagtcagggagcttaaataacttgcttgagatgactcaatgattggtgatggagtcaagattgaaaacccgggcaagcctccatgtctcacggtgcccctaaaagtactttctacaggtaacaagcacccaagtggtcttttcctcatcagtcccaaattggccgaaaagatcatctgtgaccaactggaacaggattatatccatatctcaattaaaaccatgtttccatttgccccttccttaaagcaaatcacagttctttatgtggattttttgaaacgtacaaatctagatttttttttttaacacattctggtgctcagttgcttaggaaactgcttttgtcattaggtgggaaggactaacacacttaagagagagaaaggcaaagggggaatatatagtaaacccagtgctgatgtgaattgtatccacagggactataacaaaacaatcagaactcaaagggaaaaggagcttttgagtgggttgtgaaataagctattaagtcatgcaaataaatccaatgtcaacacttcagcctgggctgattggatgcatgcattaaaactcatacttcataagaatttaaggcctctggtgttctcagtttttcttctttttcactttggggttttttggttggagggaggcatttctagagaaagcatgcctgctttacgctagaatcgctcatgaagtagagaatttgtgcatcaaggtttgaaacaatacattattccaagaccttgtccttcatcagtagtttcagcctttgccacatttctgagctccgtgctcaaaagaagcatctcttctcccaggctcctgcacccaaccaggcagggatccaacattcagataattcagacggtacacacattcatgacttcaagatgctgctgttgacagtcgtacaccttaacttgcagtgggtgcaaacataatcagccttttctcccacgaagcccatctttagaagcactgtgagatttttgcctgtcttgttcaagaccatacctacagtgcctagtgcgggacctggcacacatagtagatacgtaacaagtaatcactagtctgttacatgagcaagaaataacttttttaatgcaattgcgtggctgatctatttgtcaccaaagtgtaacctcccctgtccaatatgccatcactttattttccactgcaagcacaagatcttgcagctcaagaaagaactgtgctacatggcatgctctaaattcgacatgccatctcaatttaacatgatacttatgtaagccaatagtcccactttacagatgagatattggagctttatagaaatcaagtaatctagccacagtcccagagctaataaatgataggacaaggatttatatcccatcattttagctgtaaaacatgttcatttttttctttttaaatctgtgctgggctgtgttctgacctcaagtgaaatactgtgtgtttgtatcactcaactcgcacataccaaagtttaagtcaagagcctttatgacttataaaaaacaattgcttgagaggcactgggtgatacataggctcagttaaagcagaaggaacagcactagcatgtcatattggtaagatacaaattaaattgcagttagaaatggactgtcatggtagtaaaactatgggaagagcaaggaagtcctcgtttcggcgtgtcttcaggaacacaccggttaaccatctatttgcccaacccgatttggtctttaaacttgcctgaagaagccagttggagggaacagaaggcttctctcaaggtcaatgtctccctccataccccccacttcaggatctcctatgcatcaggcactgtgctatacaacgagtaaaacatagtgtttgcttttgaaaaattctacaatacatgaacagataattatggcagaacatgctaagtacaatgttatagtaatacagagaaaaacagaaaaactgactcagagcacattcaaaagggctgtttaatccatgcctaagtggagtaaggaggccaaaagttaatgaggagagcatcccagagagaagaaatggtagagccagtggtgtgaaggcaaaagccagtaggacgtatgcagagaagtccatgcagttcagtggtgccagaatgcaaaatgagaagcaaggagtggtaagagacagcaggaaagcttagcttactttttaagtcagccatgctgagcagcttgggcttcaacttgacaatgatgaacacatatttggcaagatttggcagaggacaggttggatatgaagtttagaaaaatccctacagctggtgtggatttgaatggaattggacagaagaccagcccaagttaggaagctgatggagagtcccagcaaaatacaggaatctgagcaagttttatagttttataaatataggaacatgaatgagaataggaatgaagagagaggactgctttgacaatgattccaaaagtaaaatattcaagaagggtgggaatggagtctaccaagaagaaaaactggataaaggcagaataaaaacttggaataaataatattactgaaattacttagcaatgttaataatgttaaatgtgtctgtggtaggcctgaccctctggctgtccattattccatatgtggtcttttctgactggcttctttcacttactgtaatgtttataaggttcatccatgttgtaacatgtatcagtacttcattccttttttttacaagatgatattgaattgacaggatatgccatgtttgtccattcagaaattgataagatatttggcttgtttctagtttttttttttgtttgtttgtttgtttgtttttgagacagtcttgccctgttgctcaggctggagtacaatggcacaatctcagctcactgcaatctccgcctctcaggctcaagcaatcctcccacttcagcctcccaagtatctgggactacaggcacatgccaccatgcctggcaaatttttgtattttttgtagaggtgaggtttcaccatgttgcccagactggtcttgaacttctgagctcaagtgatccactcgcctcagcctcccaaaatgttgggattacaggcatgaacgaccacgcctggccttgtttctagtttttagcaaatttaatgttgctatgaacattcacgtacaagcttttgagtggacatatgttttcatttctcttgggtatatatctacaggtggaattgctgaatcatatggcaattcgtttttcaaccttttggggaaatgatagactgttttccaaagtggctataccatgttacattctcaccagcaatgtatgttcaagttcctctatgtcttcttttcaattatagccatcctatgaggtgatgtggtatctcactatggttttgatttgtattttcttgatgactagtgatgctgagtatctttttatgggcttattggtcatctgtatatcttctttggataaatatctattcagaccttttatccattttttaaattgggtttatacaaatatttatatattctagatacaagtctcttatcagatatatgatatgtaagtattttatcccattctgtggagtttcttttcagcttctggatgttatccatggaaacacaaaagtttttaatgcttgtgtctttttccatttgttgcttgtgttgtctttttccatatgttgttaagacatcatatctaaaatattttgcctaatccaaggccatttgttatgcttatgtttccttctaagagttttatagttttagcttttacatttgaggccaagattcattttgagataatctttgtatatggggtcaggtaaggatccaaattcattcttttgcatgtggagacctagttgccccagaatcatttgtttaaaaggtttttaccatgaattgtcttggcagcacttttgaaaatcagttgatagtaaatgtgagtttatttctggaatctcagttctatgccattgatctttattgttatgtcagcactacactctcttgatcactgtagagttgtcatgagttccgaaaccaggaaatcctccaagttcgcactttttttcaagactgtttcagctattctcaggatcccttgaatttctgtatgattttaggattatcctgtcaagttttacaacaatatctgctgagattttgataggagttgcattgaatctttatggcactcaacaatttttggcacttttaacaataactcttccaatccccaaacataaaaagtcttgccttgtatttagatattcttcaacttatttcaaatatacataaattcagagtttatattttttgttgcttttaatttattcccaagtatttattctttttgatgccctcataaatggaattttctcagtttcattttctgattgtctatcacaagtgaatagagagaatgagtttgtgtatattgttcttgtatcctaaaaacttgctcaacttgtttatttctgataggttttttagtggatttaagatcttctatatataagattatgccatttataataaagtttttcttcttttcaaatatgaatgcagtttctttttcttgcctaatttccctggttagaactgttagacaatgttgaatggaaatggcaagaggggatatctgtgccttcttccttatcttaggggaaaacactcttttttttttttttttttacgttaagtatgatatgagctgtgaatttttaataatgctttttatcaggttgagaaagtttcatactattctatttccttgagtgtttttatcatgaaagggtgttaaatgtttttcaaatattttttctatgtctattgatataatcatgttgcttttatcctttattctattgatatgctatattacatttattagttttcatatgttaaaatgatcttgcatttctgggataaattccacatggccatggtacaaaatatgttgctggatccagtttgcttgtcttccactgaggatttttacatctgtattgataagatattggtctgtagtttccttgcattgtgatgtctgtctgttttggttaacaggatgctattggcctcatagaatgtagtgataatttttggaagagtttctgaaaaactgatattaattttttaaatgtttggtagaattggccagtgaagtcatctgaacttggacttttatttgtgggtagttttttattataaaaaatatatattcagtctttttacttttgatgggttattcaggctttatatttgtagaatcagttttgtttgtatctgtttaggaatttgttcatttcatccaagttatccaattcatagtcatacatttattcattgttttcccttgtaatcctttttctttctgcaaggtgagtagtaaggtccccttttttaatttttgagatggagtctcgctctgccacccaggctggagtgcagtgacaggctggagtgcagtggcgggatctaggctcactgaaacctctgcctcccaggttcaagcaattcttctgcctcagcttcccgagtagctgggactacaggcatgtgccaccacacccggctaattttcgtatttttagtagagacggggtgtcaccatattggccaggctagtcacatactcctgaccacgtgatccgcccacctcagcctcccaaagggctggaattataggcgtgagccactgcgcctggccaggtcccactttttattcctgattttaataatttgagtcttctttctttcctgcttagtcagtctaggtaaagttttctctggtttgttcatcttttgaaccaactctggttacattgattctatttttctattctctatttcattaatttctgttccaacctttattattttcttctgctttgtgtggtttactcattttatagtttattaaggtgaaacataggttactgatttgagattttttaaaaatacaggtacttaagctatatgtttccctcaaagccctgttttagttgcattctatcagctgttatgttacatcttcattttcatcaatgacataaaattgtttctcattttcattgtgattttttaaattgactcattggatatttaggagtgtgttgtttaagttctgtgtatttgcaagtttccaaaaatatgttagatttctaatttcaccttattgtagctagagaatatactttatatgatttcaatcatttgaatatattgaggcttttatggcttagcatgtggtatatttggaaaatgttccatgtacacttgagaacaatgaatattgaaggttttatctctttctctgatatttctgttgtctgcctcaattggcctcacacccagctgttatgcttcactaattactggataatcattctattgttttgaaaaataccctagaggcataaatttctccacagtctgacccaattaaattcaagggcctttgggagttagatcttcaggccaatttttcgttactccaggagggctctcttacctttacctttctttgattctctctgatcatctaggtaatcgatgggttagcttgtagattttatagagctaccagcctccttttaatggcttatcaccacaatgtctattgctttggacaatgaccttagttaggcttgacattccccccactgtttcaaatgaaatcaattcctatgagcttcagagttcttatggactgcttctacccctagcaaaatctgagcctggagctccagagctggcaggcagagtaacacctatactttctgagtaggggacttgttgggggtggcagcctctggctttcttagcttgcctctctcagcttgcctctctcagcatagaatctgcctatgagtaagctgaggcaagggggactggggcctcaatattctcagcctcccatacccggggtagaacatccacctaattagttgggggtaggtggaagaaggtaattcctaaactttccgccactctcaccaagaacttagcctctgcagtttagggcagagggaatgagaaattctagtgacctgttcctcagtgagataccatatcccttgactggaagctgaggggaaaggcagcaccatctctttggccacatctgcccagagtggaggctccatctcacagagctacatgaaagggatagatagcaggctgtgtctgacatgctacagactctcatgttcttagggagattcttcagatttgctcacataagtgcttttgatttgtcatattccattacaataatttccagagactttaaatgagtttctttatatttttcatcagttatggatgttttctgggaaatggtccatggaacaccttattctgccattctggaaataaaactccaagaaacttctctttaagcctctgagacttagaggttgcttattactgcaggaaagcctagtttagcatgatgaaagccgtgtctagtattaaagcagaattaaagtcaactcaaggaaagtaaaatgattttccaactctatctttctctgataggttcttgtcccttaaagctgagtagccgtcactggccagattctagaataatgcccttcctgtttttcttttgttctgttgtccccacttgattgctttaatgtatctaggtagactgcctctattaagaagtcccaagttaatgtaggctacttgcagtctttgaaacacagtgcccatttaaagatgacaatcctagaatcataagagcagggatacaaactattttattcactctagtattctcagagcctaaaacagtgtctggctagcctgacacttgatagctgctcccaaaaggtattttttgaatgacagtgtcaggaccttgctcctgttcctttgttacactggctgccctggggatcaaagcgtatgggagggctatttgtcttatgttatctttctgaaagtatcctcccagagactggttcaaacaggaaccctacctgactcctatgtcctaaaggactctatcaataaagtattccaagattcttctagccaggaggtctggcttcattttcgaagttatctcagaaacctaaagtgtgtactctggtatcattaactgatgtgacacaactagtgtgattccatcagttttataaatgacaaccagtgtgaggaagtcgacaccaaaagaagacactactggacagaaggcaaatgattttgaataatcagcctctaccctattcccccagggagactaaaatgcctaagcaatgctctcgttgatcacaaaggatacatgtttgtcctcttgtttagagttgcaagaacccactctttccaaagcaatcaaaatcctatattaaggggaccatgtctagaagctctggaaaattcctggaatagtaacacaaaaaaggagtcactgtaccaccaccacaagcctctctgggaactaattgtgttctagatgcaagagacacttaacccagcatttgtcttagcagtgtctgcctactatgtgagccttacgccatccctgagactctgccaggcccctgcccatccactcaacacttacagttgaactttgccaggaaatctagctcatctagttctccagctttctaatccttcctctcacccaagactgacccactccttgtcctatcttgacgtccctctggtttatacagagtaattaaatcactggttaattgatgaattcaattaaatcaatgtcttacctgagtccctgttaggattctttaaccttttttggaaaatagccacatgtcaaatttactcacttcttcccaggtcattaaaaaaaaaaaaaaaaaaaaaacacacagaaataactgagtaaaaaacactctcaatctttgccctcttggtatcagctttgagacacctggccaagtacagcctgtgctaagtttcaaagaggaggcagataactttgaagattttatttcacaggggacaacagataaaagtctctgtcaagttgtcattagatgcttaatgctattcttggtggggagcttgaggcgcccctcctcctctgtagacttctagcagattaggtttcagagctttaatttgaggaaggatttacagctgtgaagaggtataatatcattttgatttgggttgtactaggctggggaagccagattacatttgtatgaaactgtattagaccatatgactgaaaccaccaaaatcaaataaagggaaaattttccagagagcctaaaaacaagagcctgtctttccagcacctgagcattgtttcactaactattattctgatttacatctaggggatccatgcagaaatgcggagggagatggcaacaatgcctgtgcttgctggacctatccattcattaatctgtcatcaacctaatccaggggcccatcccctagaacaagaggaaaaaaattaacacttagagaagaggggaagttggcagggggaggggagataactttatgaaaaatagccttctttcatctccggaggcactgtctaattcagagtctcaaagaaatccatcaaattgtctctctgggcctcagtccatccaccgccaccatatgctaccatgtgcgtgtgtcgcacggcatccccagataatgacttacgtgggcaccgtgcctttcctctagaaccatcttaatgctattttaaaatccgactctcatttgcatggaaaacaataaatcactttgggtaacacagaaaacccagtttcttctgagatgaaacatgaaaaaaagagttagctgttgtttgtaccacacagctacacagaactgggcagactaccagcatcttctactgggatttagagatggacgcaagaaacaccacgggtaggactctgaaaattgaaattatttttgtgccagtctctagattcaactagaatgtgctcttggctggggagaatttgggaaagaagtgttttttttttgttttttgtttttttttaattgcaactactaagtttcaaaaatgggggaaaatcatgaagacagccacagacatcttcaggggctgactaattcttaaatgattggttcctctaagagtggttagtggtgaaagagtaaatgatgtatgagaacgatttctctgatttctgccaggagttctactcactcagtaaccacagggaatagaaggatcaggttttccacagaaactacttttagcacatgctgtgtttctacacctgtacttctcttccgaacaactatcttagctccaagttgacatggcccgttaccaaggggctccatgtcttttgtttttgtagtaaagatgacttgaatacagaagaggtgttgtaggagagcgcgtcttctccaaatgctggcagatgacagtttccgcagggacgtaaagaggtgacaaaggcacagaatataatttagtcctgatttccaggtctggctcacaaaactaatcggatgaaaatgtggccaaaagaatacctcggagataaactttctagaacaagctaacgccataatttgaccctaattccaaaaatcatgggaaggacatacttcttagtatctttatcttattctcaattaatcaacaaaccttaatgtaaataaattttctaaaattcattgtcaccgaggaaagggttaaaaaaaactaaagttctcttttgagaatggatttctttccctcactaccttcttagacaatacaacagaggttatttctagacccagaggagacaatgcaacatagcttctccagcctttggacactaagcaagttatcaataatgcagaatcttgaaacctgacactaaactccttcagaggtaggtatcttgtgagcaaaagagaacagagtaaaaggggcaaggatgggagagtgtaagaagaaccatgctgtggacattttacttcttggggtgttagtttccttctatgcaaaatacaactgtagattgccacaagcctaaacaaaatctgtaagaaataaataaccttcaaagcaatttaataaaaagaaatgtgcccaaaatatcctcaaagactttattaatctagggaggcaatagttaggaatatgagacatgagtcaaaccacctgattccacatcccgattgcacgatgaactagctgtgtgatattgagcaagtgacttaacccccagatttcctacctgtataagaggaataatgaaagctccacaactactgcaaaagctaaatcaaataatatgtgtaaagctgttagtacaatacctgcccccacagtaaacacacaataagtattagaaatacaacaaattattatatttaagtataaagcggtaatctgtacatacttggaacatttctgacttgagaagctataaaatcatggatcaaaacagttgtacaaaagatggtgttatgtgaggtcctttggatttaatataaggagccaaataaaagcagtccaaatttagaaaaatctttcaagctattccgcgatgactgtgtctgtcatcacttgggaaaggaaactgtatgctactcgcattctagagagctgttaggaaatgctagctgaccctcaacaaaccttcagcctccccaggaacacagttaggcagcttaatttgggcaagcgaggagaaagcatgagcccgtacccaagcactgcctggtttccatctgcgcgatttaaccacaagccacagagcgcctctgcggacaccaagtccagctgccagggaaaggtttcagacccacggtggtgtcccaacaatttccagttcagtggaaatctggggaacgcacaggctcatagcatatgatttcttcatgtttcattagtttccaggttttaaacaattttaaccttctctctggcacagagctgctgtactgtaagtagaaatcactggactttgagtaacatgagcctgtttcacgtttgtgggtggacatccaattggcacagtgaccttggccatgtcctgactcctctgagcttcactttcctcatctgtaaaatgggtgaaagccaacttcagtgagttctggggacacaaacatgtttcacatgtgcctagatagatgctgttagtctcaactcatttgctatcctgaacttaaacgggttgccaatctactctcacaccactctaaaacaacaaaaaaaaaatcttttcaaaagctaacaaactgaactaggagacgaagaaagaaaattcaccgctacataaattagccaggagcaaagcaagaagctgcccgagtagggcagttggcttcccacaattgattctttaataacttctgtaatatttctgaggcacatcaaaggacagtaacagcccagtgttggtaatccctctcacatataaaaactttcattacagagtgttaaaggcatcactctgcttgagaaatcgcaatcaatagacgttggccttttttcttcttttctatcctggggtaacggcaccagcattttctctccagtaatgcagtgctgtgtggccagagtttcctctgatgctgcagacgagcaccaagatgaaaaaatctttgtgataaatgagaaagaggagaagaagtttgggagaatacctctctgtgttagaaacccgaagtgttccatgctaattcaccctaaatgctgtttgcaaatattggcttagacatgcatttaaaagtcacagggatttgttttaacatgatttcttttgcattcccatgtggaaaataccttattttagagtgagacgccatctctatttcccaggctggagtgcagtggctattcacaggtactatcctcaacccacaacagcctcaaacacctgggctcaagcaatcctcgcacctcagcctcctgagtagctagagctactgcatgccccactgcgcccagcctataaaagatttcaattgaaaaatgtttccaattagcaccctaagagcaggataattttggaatactgcagcagatcttagggacacaaactaaaaggacagcaggcagtcattaatttctttgttccttattatctataatacaattgttagagtcagaaatataaaattacttgcagaagtttttttaaattcagcctatttgtttcctttgaaagattactccaggttctttaaaaagccagaatcacatttttctttttattatgaatgcataaaggccaaaggccactcatagcatctccctcgtaaaccgcatcttgccaaagcccgtggccaatttctggcctccctttactgaaccacttagtggcatttggccagttgaccactcccctccttcataagccgttttcttgcacataaaccccccaaccacactaccctttccccacctctactacctggctccatttgtcttcatagttttataggaatttaagtcatctatttgtgtgtatgtttattatcttactccatgtcccatgcctagaaatccctggtaagttgtagatactccataaatatttgctgcctggctgactcttagtattttcttttgacagattaaaagctcagaggagtgaagccacttgcctaagactgcatagtaagtggccgagtcagaattggaactctgagcccatactcatgacctttatataatagaaaaagcagcctcgggataaatgtccaagagcagggttggcaaacttttcccttaaacgggcagacagcaagtatttttgcctttgtgagccacatatatatatagtctcttgcatttttaaaaaagaatactttaaatacataaatctattattagctcaaagggtcatacacacaggccacagctgaatttggtcttagtttgtcaacccctgctcaggagaataggagcattttctactggattcatgactttaacccaggcccaagaatcctgtgcagaatcaattaagctttgtacaatgattttttttttttgagacagagtcttgctctctcgcccagactggagtgcagtggcgccatctcaatctcggctcactgcaacctccacctctcaggttcaagtgagtctcctgcttcagcctccagagtagctggaactacaggcatgcaccaccacgcctagctaatttttatatttttagtagagatggggtttcaccatgttggtcaggatggtctcgatctcttgacctcatgatccacccgccttggcctcccaaagtgctgggattacaggcatgagccatcacgcctggccagaatgaatgaattttaccttcatcctctagacaacaagatcctcaaggttaccagacttgggcatgtcctacagttaaaaaacagttcactttccacaaaagggagctggataaattcctatggatggacacaatgatcaagaggaggaagaatcctgataaattcctatgtagtaagagaaaataacgcaagatcaagagtggcaaaatgctgaaaattttgtgttattctttttccaattaagaggctttcccccgctatgaagtaagcaggcatcaccagaagtgagaggaggaaaataaccgctctcacctctccagcgtcctgtgctcctatcctgctgagactgtcttttggctactacataaaaagccaaaaaagtgagtccttcacagcatgaggatacttttagctgttggacacggagaaggttttctcttggtcttttattcaatcattcacagaaagggacatcctgtgacctcattttcactctaaagtaacagagaaagccaagtggcttcctgactctgggttctatagaaacccttgctttgatggtgcctttctcctcctctgaggccaagtcatggtgggggctggtggggcttccttccatttccaagacaggtggatctccttgggaaacagctgctgtctgggaatcctggcagcaccagggatagagagagaagagaagctccagtttcaaccctctgagtcactgcaaaagaatccccttcattaaaactagttctcaagggaaaggtgcttagagaaaaaaaaagactcagcaaaatgcataggacacttgggtaggagacatttcattatggccactttgatagcaccactttgaagcagtcattttgattttggtatgaaacttcttggaattttagtagaagttagagaattacctaagtaaatgctttttgatcaaaaataatttatatttgccagtttgtctttcatttctccccttaaagataagggctatgcctgtctcgtttaccattccatctctagtactcaatatggtacctcacatataggaagggtatatttatttaaaaaataactactatgaccatcactactactgcctatgtccagtgcttacattagatacataataatttgttgaaaaaatgaactgctaccatcactactaccattattgccacataattactattgtcaccatcattattcctattggctgtctattgtaaagccaatgggacaagcattatgcttagattatttcaattatcattcccatttcatagatgtgaacactgaagtgcagagaagtatcctaaaacatatatacagtatgtggtaaaaaattgaattaggttattattatgattagtcttgtcaagtaaattgggagaaatgaataggctgagagataaggataaggttgtacttagtgcctctattttggacttttaagcatttcttttcacggaaagggaccagggattcttaaagaaatgactgattccagatctgctccaggaaatagacatgatgaattggcaaattttgttgtggaaagctatcaaaacctactagagtaatgtcaaaaggacttggagctaacttgaaaggggctcccactggccaagacaaatcaacttcaataaaaacaatgaaagtggtagaatgaaatagatcaaatacacaaacattcaaacatttcttaagagtaaaaatcaatggtcacccttagaagttgccaggacaccaacttatgatttagaaaatattaacaaaaagaaactaagggaaattaaacacttaccctgcctttcctgtatggacaacctttcaaagtaacaacacgacatggagggaacgtttttcctcatagaggaatcacagttaataaaagcaggaggaatgacagatttagaaaatcaccatttcacagctcttaatgaaataatgggtctagacaaccaccattcatagctgcaaaacctttgccttaaagcttaattggaaacttgatatttaaggcatcacactgacaacatgtgaatctaggatcaatcctaacttaactaaatgtgggataatagtacattacatcagtggttcccatactttgaagcacattagaatcacttggggaactcttaaaaatcttaatgttcaggtcgtgtaccagatcaatcaaatcacaatgtctggggtaagagtatcagtaattttaatttgagatgttttaggtgattccactgtggagcaaagttcaggaatcttttcattttatggctcatggtgtgatgctccctatgatatattaatgttactatcatagggagatatattaacatcctatgatatataaccaaatatttaccagaaacagaagaaacgtgtttaagaatgactacaaaaatgcaaatcagaaatcaaatgtgtgaaaaattcaaagagggtgtgaatggcatatcttctcaacaaacaaatgtcattttaaaaaatggtgtgttgggggtgggaatggagggctttccttaaaacatgactggaaaagttatgcttctggctatgaatgaataacttcatacatcagactaatcctcctgcagaaagtaattgtgatagatgcataaattaaaaaaaaaaaaaaagctgttcaaaagcatcagagcacaaccaaggcatgcaagattcaagcatcctagatgatgtaggcaaagaaagcccactgaggtgagctctatagttaaagcaactttgtgtcctaagggcatttgcgaatttgcatcgtgagggaataaaccaagtagaaagcagcagctagagcttgatgcagtttctgagctagagagagaagtttggaagttaagggctatagaagcagcagctaggacttgagggactaagatttgtgagaacggtgaaccaaagaaaagtgatcccaatactcctaacgtaatttccccttgagatatttgcaaattcctaaactgcaaacatatgaagagaccaattaactaagcaaaaatcaatgctaaaagaccaaaaacgaaggagccattttgtcagtctaaaagggttggggagacaaaattgcaatttagaagacactaaggagaaagggccatcgtaaatgccccaaaatttcatttgagaaactcaaaaggcttgaattgttaggacaaactagaaatagaccacagaatttgaaaaatatcatttctggattaaatcaatataacttgcttatactgtatccacctgccagaatgttaacatatctctgcaagaagataaaatccacattaaaggaaacactaaaaggaactaaagggggttatttgggcagattaaaaatttcccagatgaaagcatagaatgtaggatggaagaaagagtactaggtaaattggggtaagtaccactctaacaatttaatcaagagaaatgaatacatgtccacacaaatatctatacataagcagcttcattcacaataatccaaacttgtaaacaacccctatgtgaaccaagtgaatggatacacaaaatgtcgaataaccatacaatggaatactattctgcaataaaaaggaacattaacacatgcaaccactattctccaagtcattatgttcactaaaggaagcgagacacaagggagttcatattatgggttaattcattaaaaatcctagaaaatgcaaaatcaccgctagtgacagaaaataaaatcaacggttgcctgagagctgggagtgacagaaggaaatgtccacagtgtggcacaaggaaagttttaggggtggcagaaatgttctgcaccttgattttggtggactcatgggtgtatccctcttttaaagctcaatgaatgaattttacatgggcacagtttattatatacacactataccccaataagctttttttttcctaaaagacagttgaaattccccaaagacagatcaaaaagataagttgctgtattattctattgaagtttaaaaacagataaaatcaatccatgattattaaaatggtgtatatcttgcagagcaggtgttcacttagtgaacaggaaatttctgggtactagtgctagtgagtggtattttctacatctttgagaaatagttacatgggatgtttattttgaaaatatttattgagctaaacacttaaaatgtgtgcacttttgctgtttttgtcatacttcaataagaaaatttaaaggtggaggattgagagaaattaaagaaaatccaagagacaaagcaaccaaaggcaatgcatggatgtcatatggcttatgattttaaaaactcaactgaaaaaaatgtgaggaaatgaatgaaaatcaaacatggactatttatcatatattaaagaatgcttgctcattttattgcatgctactgtgattacatttaaagtccttatctgctaaataaacatactaaagtatttataggtgaaataattgagtaggatttgctttaaacatcagcaaaaaagaaacacacaggccaggtgtggtggctcatgcctgtaatcccagcactttgggtggctgaggcaggaggatcacctgaggtcaggagttcaagaccagcctgaccaacatggtgaaaccctgtctttaccaaaaatacaaaatttagccaggtatggtggtgggtacctgtaatcccagctacttgggaggctgaggcaggagaattgcttgaaactgggaggtggaggttgtagtaagccaagattatgccattgcactccggcctgggcaacaggagtgaaactctgtctcaaaaaaaagaaaagaaaaggaaaaaatacatgtgctcaagtataggttgatcatcatggaagttggatgacagatgcatgagaatccatactattctcttgagttttgcatatatgtaagaatatttttacaaagtaaaaatacaattcaagtgaagatgaggtacaaggatgaggcagagggcccaggagggtgtgaagatgtctattgtgcctatgacctatattctattctttgcactttgaagattaaaatacccacagcatcaaaatggctatgtcaaaatgtcttgcttcagaatttgcatggcaagaattttctcaggggcccagaaacatgacaagcatgaaaagaatgaaatttacgagagtccaattaggtcctgaatgacagccaggcagatatatgatgacaaacagtgtccttcgtttctccagagactgatctactttgggcccaaagagaggaaagtgagcttgtataatcctgggaatttcaccatccttcttctggtccctagttatctccatctgaagcctattcaggttttggaagggagagaataaaatgggcagccaaaaaccagattctgatggcatcagtcagaatcctgacaggacacagatgtcatactcctctgcaactttgaagagaaataaactattttcagaggtggaggttgggttacaaggtaaggatttgaagcccctggtactagctacagcagaatgcctttagtatcctgggcctaaaaaagcaaagaaagagaacatgttatcagagcctggtgaggtaaaggtgggtgggttaggggtagggggtggggagtgggacgactatcatcactgctacagccttgaagggacacagaccctgaaaaacatgatgagaaagacttccatgggagtaaacatcccccatctctctctctctgcccattgcctggtctctttccagtacctcccattgaccaagcccaaactggaagacagagacatggaagcccaggtgacacagtcaacctcctgggtcaacaagcagggcagacaaggtcgcctaataggctaggaaggcgggggatggagaattaccagcacatgcccccaaagggtaatttacaccacactggaatacataagatcttcaaagccacagttagttagaaatgatggccatttggcaaaagctaattcagtcagacccagggttgcagatccttaatttaaatggaactgagtatttctaagcatttcacaagaggcccaaagacaatgaatgataacagattctttacccacacacacacaccctccccatgggggaaacggtaaggagctactcatgctcattctcaagtttgtaaaacaaaaatcttttcttctatattagaaatttccaaagtaaatgcacaaaaaaggggagaaatgtggttgcattttccattgggctttaaccatcactctgcgaaagagaagagttcagagcaaagtcatcacaggtggaaacaatctcaagatcagatgggagaggagtatcctcttccccccacctcccccgctccaggggtatgtggtcctctcttggttggtgatgccaaccctgcttcctctggccctgggttttgtacctgctgctttctctgcccttaatgtgctttcctcccttccttcacttgttaactcctattcctatcttagctcaattgtcactttccagaggaaactttcccatgttcactaatgaggtcaaagcccctaagacatactgtcatagcatctggaacttttccttcatgaaagcactttcacagtttttggtatggctgtttgatattgtctatctccccagctgaactggtagttccacgtggcaaggactatgtgtatctttgagtaccattgcatttccagggcctcacatataatctggctcatagtaggcacccaactattgtcgaatgaatgagtcttcactgcaagataaagtgacaacagttttccactctagagaccatctacgtttttccctttcaatgtacaacatgattttgttttctttcccccaccccccacagcattaaattactggaaacacatcctatgctcatagatgggtagaatcaatattgtgaaaatgaccatatttccaagagcaacctacagattccatgcaattcccatcaaaataccatcatcattcttcacagaactagaaaaaacaatcctaaaattcatatggaaccaaaaaagaacctgcatagacaaagcaagactaagcaaaaagaacaaatcttaaggcatattacccgacttcagactatactacgaggcagagtgatcttaactgtaccaagctaaatcctacatctagattcacagatgcaaaagtgtttaataaaaccaagttacttgcattcttaggctcatgtagatgctgtacgcagatggtcttctaaataggttttagatatgtcaaaactttctccagccacaaagtcaagaatgatcaccttagggttgcagtatactcaattatttatactccttctatgatcaagggtagtagtatctgcattaagtagtttcctccaaaccagaaaggaacgaattggcagaatatatttccttgcctccagaaataacttatcatcattagaatcatctgatatttttgggatctggaatctatgttctgtatttgtgagggtaactatgagacttgaacagtccaccagggatcttaaaggcatgttttcaaaacacagcccccatcaaaacagtgtgctgttaccaaatatgtttgggcaatgccactgtgaaatttacaacatacactaacagagagtttgagaaatcccatggctggtagagcttggcaaagggaaatgtgtttccctcacatatctaactaggaaaccgtcatttcaaatacttcctcttactatcctgaaggccatattttaggaaatgctgcactggaggaaagatgttctagaatagacaggtactacaagactgaaaaagagaaaatttaacatgctttcctgctactgaatctattctatatatcctgtttttcttcataggtgtttgccccacaatatttttgttttctcattatctctaatattaaaatgggagaaaacagtaatacaagcatgttgaaaaactgataccgtgaaatattgaaaatttgaaattgattaatgttggttcctaaagcaaattattttactgaaaaaaatggttctattaatctaaatagatacatttattaatatgtgttgaatacataggtatgtacctaggagttttgtagagagcatgtctgtttagaaataagcatacaaatacataacttcatgtaacgagtatgctgaacaagcatgatccattgcataaaacacaacattttactctccttgcccctctaaatttgattaggtggtaataatcttcctttgcccttggataaaaactacagcaggcccacgagtttgctgttcacaggtaatgggcagttctaaaacaacttcaggttacacatacagtcccaggtgagaaaacaaactccacaaccatgttgcttttgtatggaatctttccccttctcagcttggccctgcttcagactgaaagcctccagatcaccctgtggcccctccaccttattagccagcattctgcctttctcaaggttgaagaaactaagagacagaagggctcctccttgtgctagttctgttataatctagcttggctgtctctgggcctggcagatagttagggctgacactttctcttttgataagcttttatggattctgcagaggtttcctgttgggttcttttctcaaacagctcactagatcccaggtgggtggccagggatcccccatcccaagccccaggtcatctaggcatctgccttggacttcatatgctacttttccatgactccttcagttactgtattgaagtatatcaaaaacaaccccacgttggccctctcctttgcacagtccagaactgatccccaggaaacacacacatctcatgccttgacaaaaactgggaaatattggccacttcgcaagcaggagcattcctaccctaccacccaagcagttggccagcccctcttctcctggccttccagagtttcagggtgagtctcaaatgcatgggccctctaaacttcccaggcttgatgcaggcacaagcctctggttttccaactgcaagaaataattcagagctttctgattagtcctcttaatgcctcctattggggttttgggttacaagatagtacactctactttttctcccaagagggtaatgatgactcaatacatggccacagttgtctctaaagagacatcttctcttgtctcctctggactcatatatacaaaagccatggaccaggatcatgactttctatatgaggcagctgtcttttggtcgctgtattatgggtggctctgtgaaactgagacaatagacaatacaaccattctaacatcctactacctacgtcgtacacatatatatgtgtgtacgtcatattttactatacggtttctataacaacttcaaatagttaacgctataagagcctcaacactccccaattcaattataatctccagctttcactgatcactgctgatttggttataaatgacttcacaaccaaaagcttaccttgagaatttttcaatccctatgttcccagattcaaataaataaaacctacttgaaatatgtggacttaaaatagtcttccaacgcattcctcacacatgaaattactctcgaataactagctattggtgacattcctgatagtgccctagatttctcaacttttgcaagagcccagatggtcagaaagaactttaccaaatttggttacttgtttttaatggaaggattttaaatgttcttttaacaatcatctcagctgcatttaaaggctacttagcagtgtttgcagctaggagaacagataattaccggagtgaactagcaaattcctactggttataacctgaaatgggaagtaatacatggtcaagaatgtaaaaaattacttatatatatatacatttacgcacacattttttaatatcaagtgagcaaaatggtattaaatctggttaattctgcccatgtccatttgaaaaacaaccgtgtaatttgcctaagaaaaaaattctctcatagttaagtcagatgcctaattatatcatcctttatctgggactgtcaaaaataaaacattttggatctattcacaataaaatgacattttcagattcaatttcatacaagttttttatccattatgctcacagatcaaaagtgactggattcatcagccaaaaagaatattttaaagagctgctgagaactttataaaaataattctgattttcttttgtgggggaaacaatttcttttagaggagttagaaaaaagtgagaaaaaattttttgaaagaaaaagaaccaccaatgttactagagagcagagttgacatggcgttactcacagtgactggttaagggtaaaagtgggggaaaaaagcaaaactgtaaagtaactgattatttcactgtcttcacctggccttaattcaaatcagaacacttctcccacctgcattacttcaaacaatttaccagaaaagaagagaaaatgtggattacataacccagagcatatagagcgaaactgcaatgctatcattcagcaatcacagtgctctagtttatttttaaaatagctcagaattggccatgctcaagaagtggtcctacatacagcaagagagctcttcgtttaatacaatacagatttttcctaacagcttcctctactacttcacatatttcttccatatccctacatggccctcctaagaaatatacctttagcaatgaacactaggaaaacatatcgttgtggaaaggcatgggagagagtctactctctttacttgctttagcgtgaggcagaaaatatttcttacagggtagccatccaatacctgagcactttcaaatactctgcagcaggtaatttgtttttcagaagggtgggagttaaaagtaacacagaaagtcataatggggtgagagattagacttttctccaaagttacagcctttagatttagctcctgcaattctgaagggcctcagagataaggaaatcatgttgcaaatgtgagaagtgagatttagagaggtgaagggacctgcccaaggcctcctagaaagaagaagagactctggtactcgaggccctcaagtccagggttctttccacttgcccaggtttatccctggttgtcctctcctctgccccttgatctgacaaatgttcaaaggattacttaaaatagtcccctgctcaaaataacaagggcttgccaaaagaagaaaaacaccttgaaatagagattccaattaactgcctctgattgctggataactcttcaagactcccagaaaccgattctagcagtatgtgttatttgtttatagccaacctttgttccaaaaataacttgatatgttttacagaaatatgtagaatacatacaatgcagaaaattattgcaaaggaggaaaaaggatgggaaaagctagtaatcttggggatgaattgtcatacaccaagaaagcaatttatatacctggtggcttaacagcaaatattataatcaatgcaataatagtgacccagcagaaatacactgtgagttgaaataaaatgttaacaagagtttgtggggaagaataagacacaaaagtcctgataatgtctcaatatgcagggtttggacttctgaagcaggtcactcctaagccttcaagcttaggaaaaaagggaaaaatgagaggacagaggatagatgggacgacaatggggtggggagtcagggagtgggtagagggaaccacaacaggttgacgtccacctaggtatcacttatcaatgaactgaaaatttatcaggtaattggaagctcaaattcatacgtcacctggactgaactgcgcttttgttatttataatgcaatatggtataaatcaattggcttggattttaaaattagagcccaattacctgtgtaagggaatcataaatccaacttgtatttttctaacagggttaacaactcatgatgccagcttaaactcaggaaaatcaatggtctgggcttaagaacaattgtgcgtggtactttatctccctggtctagtgtagcaggtgggcagtctaggagttgggggtgaaggatttgggggagggtagaagcctaaagcaaaggaaacaaacagaaaacattgaatattgctaaaaacaccacatgccaggtaaacaggaaggggggcacttacatatagtagacagtgaaaatctggacacctgttacttgatgaagcatcgcaggagcaaaggcaaaacactcctgttgcttttcttgttctgcaaaactctccagagctaagagagctaatgtgagatgaaaagctaaaaaaggagcgagtcagaactcccactgacagctcccaaatctggcccttcctaaaggcgtttgcgcctgccttaagccagagactcccttctcaggtgcagtttgttgaccctctcttcaattggaaacatctgaggttcactcagtgataaggggcacgtggaggaataaagctgtggcagtggtggaggaattaatagtccaacttttatggagggcagttaacattgtgtatgcctgtgtttatgtaagtatatatacctacatatacacacatatatgttatatattattgacatagaaattccattttcataaaattctccttgagaaatggttgaagaacagtgcaaagatatacatacaaaattcttcattgcggccgggcgcggtggctcacgcctgtaatcccagcactttgggaggccgagacgggtggatcaccaggtcaggagatcgagaccattctggctaacacggtgaaaccccgtctctactaaaaatacaaaaagaaattagccgggcgtggtggcgggcacctgtagtcccagctactcaggagtctgaggcaggaggctgaggcgttaacctgggaggcagagcttgcagctagccgagatggcaccactgcactccagcctgggtgacagagcgagagtccatctcaaaaaaacaaaacaaaacaaaaaattcttcattgcagcattgcttctaagaaccaaagttgcacacaaactagaagtcattcaaagggggtgatccaagccaagtgtattatatttcactcatacaatgtaatactatactgaaattataaatgacgatataaaattctatggacatgatacgtggtaaaataaaacaacaaaatagtattactggatgtgtcaattgtgtgagtgtgtgtatgtgtgtgaataagaacgtgtgggagaaaatcctgcatattaatcaagcttattgctgttgtaggataactgatattttttaatatttttctgttgtgttggatttttaaattttaattgttataaaatagtcaggtattacttttataatctggaaaaaaaaacccagcaatttccattttggatcttgaatacagtaggaaggatagcagggtagcagcagttactgggcaaagcagacgtcaaccagggcctaacaacaaggctctcactgcacaaagcaccagcacctgtcccataatggcttctgttttcacacaaaattccgccaactgggtacatcttctcaaagaggggaaacaaatgcaccaaaattaattgtagaacttatctttatgttctgggggccagaaaactcagtctatactgtgcttctgagagcaaataatcctttctaggcctaaaatacagtctgtcttctattttgggcttgtggtacctctgttgtctcattgttcaagtggatgtaaaagtattaattcaaaaaacccatgttctctgcttaaagcacagaattgtcaacaaaacatactacagaacacatgcctctcactcagtcatttctttgtcttagtttcttgtggtctattccatagtaaggaatttgcaatgttggagtaagagacctaagaggaccttagagatcaccccattcagcatcctcatttttcacaagagaaagcccagactagtcatcaagtgagctagccaggactaaagccgagggtctggtagtcagtccactgtttatcacttcagctctaattccattcaagacacagctatagcttcccccttctggacaatctgaatattcctttagctaatgttgaaataaatcagactttcgacatctgatgtgacatacagagagaaaaaggcaggaaatctaacataatgtactagttagcttttccaaatgcatgagaaatactttcaataatggaaaacactacatatactactttatgcagtcgacttttgcttctgtgatagaaaagggaaaaagttcaggggaagaaaactacgcgggtcatttggtgacgtttttaagatttttactttcagaggcacataatttaaagtgtttttctttttcttctatcaaaaccaaacatagttactagaaaacatctgaaaaatgcaacaaaattttaagaagcaaaaaaagaaaacatgtcacacaattcagccaacaaaaaaaccacagttaaaatgttagtatagttccttctaggtttttttcctttttgaatggttgagcacttcatatatataccatttccaagttttgttttgttttttacctaaattatacctaagcattttatgaattcattaaaaactatttataaacattatttaatgtatgaataatattccatggtatagagtgccaaattttattttttctttatttatgtcatttagggtttttctattatacattattctatgatgagcattgtaagaaatccatcttgatcttaatttctgattattttcttgtcttaaattcctaaaatggggaattgccagattaaatactatgagcattttaaattaccaggaagtttataacaaattttgttgttcctaccaaaagtacatagaagtacccattttataatcctttttcagtaaaacatattttcaaacctttgttaattttacaggtggcaaaattaaaattaaaatttattttaacttgaatctttattattgaaaaatttggtatacccattggccattgtggccatcctttggcagatctactcttgaggtcttggcccatttatttactgagaaaaaaggaaagcattttgatagatccaatctttttttttttcaataaataaataatgaatttttaaaataaattaataaacttatttaattcactaaagcttaagaaacacaaacttctgggctgatcagttggaggctgtagaaaaatgaacggaacacactttttttccaagtatattttgtataagctctatctaattaatgaaaccttcctgcaactttctgcatctgctcattccaagcattagattaacaaacggttgacataaaatgaagagctacatggtatttctttgacatgtggcatataaaaatcacaaactctgtctttaaaaatagagtgttctggttcacactggtccactgagcaaacctatttactgcctttcccacccaaaatactttctaaatgatactaaagaaatgcaaaagtgcaaactcataaccacaaagagaatgggaagaagccattagaagataaatgatttgaataaaagtctgttggcttctgaaccacacagcaaaggaaaccacagcctaaaaagggattgcggcaaaggagggccgacctgcctggttattccagaaagaatcgagcctcagaaatagcaggtacaacacaggatggaagagattggtggggctgaaaaggggggttaattacaggccaggctgaatatgtaacattgaccacccttcctcctggctctccatgtggactagcctgaggccaagcaccagcttcaaggcaataaaaaagtggggagaaccatcacagttatcattagtgttaaaacctcactctaggccaggcgtggtagttcacgtctgtaatcccagcactttgggaggccaaggcaggggggatcacttgaggttgggagttcgagaccagcctggtcaacacggtgaaatcccatctctactaaaatacaaaaagtagggccaggcgcggtcacgcctgtaatcccagcactttgggaggcccaggagggcggatcatgaggtcaggatatcgagaccatcctggctaatatggtgaaaccccatctctactaaaaatacaattagtcaggtgtggtggcaggcacctgtagtctcagctacttgggaggctgaagcaggagaatggcgtgaacccgggagcggagcttgcagtgagctgagattgtgccactgcactccagcctgggcaaaagagagagactccatctcaaaaaaaaaaaaaaaaaaaaaaaaattcaaaaagtacctcagcatggtggcaggtgcctgtaatcctagctactcaggaggctgaggcaggagaattgcttgaacctgggaggcagaggttgcagtgagccaagatcacagcattgcactccagcctgggcaacagagtgaaagttcatctcaaacaaaacaaaacaaaacaaaacaaaacaaaacaaaacaaaacaaaaccttactctagcacattgcgattccccagttcccatgcacacaccctaaactgaaactcttcaagcttgctattcacaagacccacccacttaaaaatagaccgcaacaatagccttcttattgcctcattctttcacacacaccacagatcaccagaaatttaatatgacaagaaagtctaccacagaaaagaaaatgagcaagtaaaacaacagaaaacatgacactggagaaaacagtttaggggaaagacacaaactttaaaaataaaatctagttaatatcgtcaagaaagatttgaggagatttggtaactacaaaacaaaaacagggttctattgaaaaggaataatcagataagaaagagctctttggaattttataaatgcgtaagtaaaaaattcaatagaaagtttgtaggcaacgttggaaaaaatctcctagactatagaccaagtacagaagtaagtgagaaaaaaataaaatatatagatgaacaattcaggaggtctaaggatgactaaccaaattttcacaataagaaaaaaagaaactggagtggagggaattatcaaagagattgcatggtaaaattccccagagttaaagagaaagatgaatgttcaaagtataggaatctacttgataccaagaataattaactgtaaagtggtagaaaaatgaaattcctaacaatttcctgaaaagtaaaaaaaaaaagaaggtggcctacaaaataagaatcagagtagcatcagacttagcagcagcaggattgcatactaaaagacaggaaaaaggattttcaacagagaagtctacacccaaactatcaattgtcttttgagggcaaaataaaaaattctaaacctgcaagcatgcagaaagtttacctcccattcaccctgatatggcttggatatttgttcctgcccaaatctcttcaaaatgtaatccccggtgctggaggtggggcctggtgggaggtgtttggatcatggggacagatccctcataaatggcttgggctatttccttggtgacaagtgagctattgctctgagttcacatgagatctggtggtttaaaattgtgtagcacctcgcttccccactctctctccctcttgctcctgtcttcgtcacattatgtgcctacttccccttccgccataattgtaagcttcctgaggcctccctagaagccgagccagcaccgtgcttcctgtaaagcctgcagaaccatgagccaattaaacctcttttctttataaattatccagtctcaggtatttatagcaatgcaaaaatggcctaatacacaccctttcttaggaagttaatagcaaaatcagaaggcaaattagaaaagaaagaaaacccattcaatccagcaaacagtgactccaaccctggagagcaatggggacatctcaggatgattctacacagcatgtctacagagccacctgtccaaatgggagcaaaatggaggtctgtaagagacaggaccaatagaacaaagagtgtaattatgagcttgaaaaaacttgaagatattattgaggtatatactcagaaaaggcaataggacatcagaaattccagcaaaaacaaacaaaaataactttataagaaaaacttgaaatatatattacagaaactaaaaggtggaatgattttgataaaatgatttaaaggaagagaatccatttgcacctgattctagacacaatgtctttgagtatcacaggaattgtgacagagaccatgtggggctgcactaaataatttagcaaatcttaattgtgcaaatattttcattatttccaactttggaaaaatcacaaaaaaagactactctggtgacagagcaaatgtcaattaaatttgacaatgcaaaaataatggtatatagctgaccgagaatggaaagtggaaggaaaagaaaagcagtgaagaaaagggtattgagtgcccatatctcatcctgtgatgtgtggaggcaagagacacaggctagattgatggaccaatcaggggaggtataaatacaatttagaagtggcaagcccaatagaagttgagaataatgtcatgttatggtgggagcatgtgaaaagtttagtgtaagttagtgtaaggcaaatacttcttgtctttagaagaaaatcagtagataacataaaaaataaataagtgttaactagcaatatggaagtaagaccaggaatgttgaaaagtgattgcatttagggagctcagctggaggtgggaagggtgggactgggaactgttactttgcactacaggtgtttcaaaaccatttgatttttaactacgtgcttatttttgctttcataaaaaacaattccaaattatgattataaaaagcaagtacattgttacaagctcttttactaaaaacaacaacgcataattgagcctgtatgaaatgctgtcttctaagccactggacacgctggaggaatagcgaataaagtataactggatttatttataacgaggagagagcaaatgcagtgtacggaaatgagacacatcattttatctcgacagaacaattaagctttcattagggcttaatgacaggatgacattcgggggtttggagggtaagcacatcaccttcattatcaaatcaaagattatccagtatcaagaggaacagttttatttattctgtattctcctcgaactccccaccccaagctctgtcatgaccctagataagatgggaattgaacaaaagtccccaagtgctaattgcatattctctcacatccccaagattgctgtctcctagccatttgatgttaatatcacagaaagcagacagcaagtgtatatttggatgcacagctaggtacatttcccagaatgtattttggaaggggttagttgttggaaggttggcaagacactagtgactccacgttttggctactacgcctttctgtcctgaaagcctggtgtccatgttatttagaacagcctgggtaaacttattactgcaccctgtgttcacagaaaaggttggttctgagttcaattacaatccctagcagtttaaacgatagctgctgtgctataatctaaaataaattgcttttctcaagaagccatgtaagcctttgcactgcatcttagcagagctgctggttttatctcatctgaaactcaagaagggtacaaaagcaggacctctgaactcctgttgttacctcaaatgtcattcttctacacttctggggctctctcttcaccccaaattcctatcccagaactagatttatgggaaagcaacagtgttttcattttttaatgcaaatcatcattttgtgtttattgttttctatataagctgcatactttgcctggggtcttttgaaagaactctattactgggggcaagatttgtttttcctcttcccacagctagaaggctaacctgctaccatgggccaagatagcaagtatgaggacgcccgcacccaaatgaattggggcacctctacagactctccattcaaacgcacatcctcctcctctctccaaagggaatggaggaaaaggaaacaaacttgtcaagcgctcaatacgtgaaatgataattctggctttctccaccctccacctccccaggagtttttcccaaaggtcccattggcccaagctcaagcctcagcacttctctaaacaagatgcttgtagatccctttgatgtctttccacaaaggcaattagaagggtttccaacgttaactatgtacattctttcagatttaacaaggcaacttaattaacactgctgtgtttctgctagtcaacaagagaaaattgtcctttcaagagattttgcacattgacaaaaataatccagtaatacttttccctttcaaatatttttcttctattgagattgaaagaggtggtttgcagagtgctatatggtatgtgctcagcagcatttttctgaaagggaatttttttatgtccacacaaaaaaaaacatccaggacaaataaaagccaaatgaatactttagacaaattcaaactcaaacttagagccactcagaaggcaaggaagtcctatttctttttataacatacatgcaaccatgccacgggaggatatgaaatgtagctcatgaattatgtttatccttaagttctcttggagctataataattagaaagagacaaagtgctgattctcaaccagtatccctaggaggcactaggaaatggaggaggtgaggacatttctttgatgtctcagcaattggagggcaaaactgacatttggagagttctcaaaatgttgctaaaagttctgtagtgtgttagcaccacagagcgaagacttttcctgcccagaatgccaatagatcccccttgggaaacactgacctcaaatgggaggttgtcaatgctgcactaaggcaaaatgagctccttgtcctgggtcctttgatttctcattttgcaaacttaggtgtctggcagatagtcaatgactaaaggaatcatctagtggtgaaatgatggtaagtcacttatccattcaataaatatgtattatgtaccatctgtgtacagtgaaagtactgctattgaccaagagtctctccttgaccaaacgttaatcaggctcctctgattctctccctaatcaggccttaacttttggacttctgtgtctttctctgtattgcccaattttagcaagaatcctcttagactggtttatccagaacccttcatcttcaatattggattaccctcaatatctgatcagattccatatccaccaccatcccttaggtggtttaatcacatggcctgcctttaggtacatttcataacaatgtatccaattttcctgatccaatttttctgcatccttgccagcatttggcgttattattatttttttccaatttttttgtggtaaaacatacataacataaaatttagcatcttaacaattttaagtgtatatttcagtagtattaagtacattcatattgttacaaccatcaccacctatctatctccagaactcttcatcttgcaaaactgaaactctataccatttaacaactctcaattcctacttctcctcagcccctagccaccattctactttctgtctctacgattttgaatactcaaagcaccacaaatagatgaaatcatacagtatttgtctttgcgtgactgtcttatttcacttagcataatgtcctcaagtttcaatcatgttgtagcatatgtcagaatttacttcctttttaaggccaactgataaggagggacttccttctgtcccattttgctattgattttctacacaccttacagtttttttctgtccctcatttcctgcatcactgtcttcttgtgtggttagtttattttttgtagtgaaacatttaaattcctttctcatttccccttgtgtatatctattttctttgtagttaccacagggattatatttaatatcctaaagttatcgattctaatttggaattataccagcttaactttaataacatacaaaaacattgctcctctacttctctgtccccacttctttaaattattgatgacaaaaaattaacatcttcatgcaatatgctctaaaatataaactgatattttaaaagatgtattagcttctcaaattatgtagaaaacaaaatgtggagttacaaaccaaagttacaataatactagcttttagactaataatttaaaaaaattagtctcatatcatgtagaaaaaaaatggagttaacaaagcattattacaataatactagcttttataattgcccacatttttacctttacggagaactttatttcttaactaagattcaagttactattagtgtcctttcatttcaacctgtagaactcattttagcatttcttacagagcatgtgtagtggtaataaacttcctcagctttttttttttttttaatatgagaatgccttaatttcttactcacttttgaaggacaatttgctgaatgtaggattcttggttggcagttttttttgttttgttttgttctttctgtagccctttgactatgtcagcccattgcattctggactcctacatttctgacaataattctgataatcgtattgatgattccttctacataatgagttgcttctctcatgttgttttcaagattctctctttgtctttcaacagtttgagtatactgtgtcttgtgtcttggggtggatctctttgagttcatcctatttggaattcattgagcttcttggatttttatgtttatgtcttgcatcagatttgggaagcttttggccattatgtctccaaataatctctctattctttctctctcttcttaagcttctgaactctcacaatgggtatgttggtctgcttcatggtgtccagcagctctgttccttcttcttcaatattttttctttctgttcctaagactcataatttccttgtcctatcttcaagtttactgactctttcttctacctgttcaaatatgcctttgaatatctccagtgaatttttcatttcagttattatacttttcaactgaaaaatttctcgttctatttttactttttctgaatctctgtattgatgttgctagttagttcatacatcatttattttttactttttccatatcttttagttttttgagcatctttaagatacttgttttagactctttgtctagtagatccacaattataactttttcagggacagacctcgttggttcattttctttcctttgaatgtgccatacttgcctgtttctttttatgtgctgtgattttgttgttgttgttgaaaaccggacattgaaataaaataatgtgataactgtgaaaatcagattctccttccccttccccagggtttgctttttcattctgaattgttgtaggttgtctctgtgctgaggataagcctgagatgtaaagttaagtccttctcacatcttttgtgagcctgcatctttctctaggtatgagcggtgactttctaatttcccatgtatatgtggctgctttaaaatgtactagtctttaatgtctggctccaaacacaaaaggggaaaagaaaaaaaatgaaaacaaaaggaaaagagtgctagccctttaaatcccctggaagtcacttcagctggagaaagaagggcttgcaacaatggaaggaaatgcaacaacaatggcccctggctctgtctgcacctttgtaatcagaagcaacaattagctatcagagaacagattcctgatttttgaatgacagtggcctttttgcacaccctggctcccataaactgtgtgcaggctactcctggaatctgtgcaaggatgcctgcgagtggggtatgagtagctgatattattctaagagctaaagtcaaccacagttaagggcaatttactgcccaagccttctcttggaaattaaaagccttcaatagactctagagttctaaaatagttacatcagacagattatgccatgcagttgttctctaggtgaggagatacattcctggtgctttctactttttgatcttcccagaatcccctccttatcaattttttttatttagccattttaatagatgggtaatgatatctcattatggtttatatttgcatttctctgatggctaatgatgtggaatatcttttattgtgctctttttttttttttttttttttgccatctgccattctcttcagtgaaatgtctcttcatgttttttgcccattttctaattggactgtttgggtttttttactcttgacttttcagagttctttatatattgtaaatactagttctttgtgtaatatgtggtttgcagatatttccaaccagcctgtaaattgacttttcattccttgtagttgggctttcacaaagcaaaagttttaatgttgatgaagttgaatctagcaattctccttttgtggattatgcctttggtgttaaatctaaggacactttggtttgtttttttatttttattttttatttctataggttttggaaaaataggtggtgtttggttacatgaataggttctttagccatggtttctgagattttggtgcacccaatacccaaacagtatacactgtacccaatttgtcgtctctcatccttcacctccctcctccctcacttgaatctccaaagtccattgtatcattcttatgcctttgcatcctcatagcttagctcccacttatgagtgagaacatagaatatttgcttttccattcctgagttactctacttagaataatgatctccaattccacccatgtaactgtgaatatcattatttcatttcttttttacggctgaatagtattccatggtatatatgttccacaatttctttatccactcattaactgttgggcatttgggatggttccatagttttgcaattggaaattgtgctgctataaacatgtgtgtgcaagtatcttttttgtataatagcttattttcctctgggtagatacccaatagtgggattgttggatcaaatggtagttttacttttagtgctttaaggaatctccacgctgttttccatagtggctgcactaatttacattcccaccagcagtgtaaaagtgttccttttcaccacatccccaccaacatctattattttttgattttttgattatggccattcttgcagctgtaaggtagtattacattgtggttttgactcgcatgttcctaataattagtgatgtcaagcagtttttcatatgtttgttggttatttgtatatcttcttctgacaattgtctattcatgtctttagcccagtttttgatgggattgtttgttttttttcttgctaatttgtttgagttccttatagattctggatattggtcctctgtcagatgtataaatggtgaagattttctcccactctgtgggttgtctgtttactgactgtttcttttgctgtgcagaagctttttagtttaattaagtcccatctatttatctttgtttttgcttttcgtttcgtagtcatgaagtctttgcctaagccaatatctagaagagttttccaatgttatcttctagaaattgtatggtttcaggtcttagatttaagtctttgaaccatcttgagttgatttttgtgcaaagtgagagatgaggatccagtttcattcttctacatgtggcttgccagttatcccagcaccatttgtggaatagggtgtctgttccccactttgtgtttttgtttgctttgttgacgattggttggctgtaagtatttggctttatttctgggttctctattctgctccattcgtctccgtgcctatgtttataccagtaccatgctgttttggtgactatggtcttatagtatagtttgaagttgggtaatgagatgcctccagatttgttctttttgcttagtcttgctttggctttgtgggctcttttttggttccatatgaatttttggattgtttttttctagttctatgaagaatgatggtggtattttgatgaaaattgacttgaatttgaaagaaaaagatttctttaggcaatataggcattttcacaatattgattctatccatccctgaacatgggatatgtttccatttgtttgcgtcatctatgatttccttaagtagtgttttgtagttttccttgtagtggtctttcacctccttggttaggtatatttctaactattttatataagaacattttgccttgccttacatacagagattttctcccacatttattttttaaaattgttattattttacatttaattctatgatccactttgagttaatttttgtatgaaggtatgagatttagatcaatgttcattttttttcccaatggatgtctaatgctctagcatcatttgttgaaaggctggacttccttcattaagttgcttttgcatctttgtcaaaaatcatttgagcctatttatggaagtctatttctgggtcctctattctgttccattttgtatattcttctgccaaaaccatgttggtttgattactatagctatatagccctaatattgggtggagatatatatctctttaatgttgggttggttgattcttcccactttattttatgtcaacattgttttagctattgtaggtcctgtgcatttccatataaatggagatcaaataagtttgctagaattttgttagaaatttaatttctcaaagatcaatttgggcagaactgacatctttaccatgctgagccttccaagtctctactcatttaagtctttaatttctttcatcagcattttgtaatttcattatataaactctgtacctgtttttatttacttatttatttatttatttctgagacggaatttcactcttgttgcccaggctggagtgcagtggtgcaatctcggctcactgcaacctccatctcctaggttcaagtgattctccagcctcaggctcctgagtagctgggattacaggcacccaccaccatgcccggctaattttttgtatttttacaagagagggggtttcatcatgttggccaggctggtctcaaactcttgacctcagcctctcaaagtgcagggattacaggcatgagccactgcacccggcctctgtacctgttttattaagtgtatacctgaatcttttattttctttggaactattgtaattgatacactgtttttgatattggttcctacacattctttgttagcatgtaaaaatacgattaactgttgtatgcatcctgcacccttgctgaactcacttgttctaggatttttgttgttgtagatttctagggattatatatgtagacaatcatatcatctacaaagagagatttatttcatttatttccaaactgcatgccttctattttcttttcttgccttattgttttggctagactttccagtactggttgaataaaagtcatgagagtgaacctcctggccttgtttctaatctcagggatgctctttagcaagtcgagataattcatcactatttctaaattgctgagaatttttattataaatagatgttggattttgtcagacgcctttttatatgatgatattatttactttttttatttttaatttcttccagtgtttcctcaatgaattttcttctgtagcttatttctatggtatattacattaattaattttaaaatgttgaaccaaccttacatacctggcatataataaatcctacttcatcatattacataattctttttattctttgctattatttcattaagaatttctgagtcaaaatttacaaaagacattgaactatagtcttctttcctccctcccccttcttcctcttcctccttcttcttctttgcctggttttggtatcagggtaataatgagttgaaaagtgttcctgcctcttctattttctagaaaagataatataaaattggcattatttttttttaacatttggtataattctccagtgaaacaatgtagtcctagagatttcttttttgggatatttttaattattaattcaattttttaaatagctataggactaggctagggctgttcatttcatgttggctgagtttagctagttttttttttttttttagaaattggtctatttcttctatgttcgttgaatatatgagtgtaaagttgttcatagtatttttattgtgttttagtgaccacaggatctgtatttatatttcctatttccttcctggtattggtaattttgttattgtcaattttgctagtagtttatcaattgtattaattttttagaagaacctgttctttgtctcattgactacctttttcttatttttaattccattgatttattcttttatccttattatttcctctgtctacttgcttttactttatttttctcgtttctcaaaataggaacttaggttattgatgtgaggcctttaaagacttactctttgacctgttgataacttagaagtgtgttataaattttcatgttttagagatttttctgctatttttttgttatggataacacattctgtaaaaatttgctaagcattttttatggcctatgatatgatctattttggtgaatgttcttcggttgcttgagataaaaagtatattctgctgttgttggatggagtattctatatatttcaattagattctatttgctgattgtgatggcgcaatcttctatattcttgatgattttctgtatagtagttctatttgttgttgagagaggacattgaagtcctgaaatataattgatgatttatttgtttctctttcagttctatcagtttttgctttgtgtattttgaggctctgttatttggtatgtacataagatcattttgtcttccaggtggatccattcttttatcattatataatgttccttcttgtttccagatattttctttgttccaaagtccacttttatcagatactagtataagcactcctgtttttttaaaaattaatatttgtatgatatatgtttttccacccttttactttcaacttaactaatcatagaatttgaagtgagtttcttgtaggcagcatacagttagattatgttctattattcactttgtttatctctgtcttttgatggtgtttagatgatttaccttcaaggtaactattgataagttagcatttcactataccatttcattacttgttttctatttgattcctctggttctcattcctctgtttctcttttcttgccttcctgtgtgtaacctaaacattttttaggatttcattttgatatacagtgttttgggaagtacttctttgtatagttttcactgtggtttccctgagtactaaaacctaatatgtgacttgttacaggctacattatcaacatttaactagtttgaaacttcactcccatttaaatctcttgtccttcccatttttcaataacattgaattgagtatcagatggtattataatttttgttttaatcatcaaacatgatttataaaactcaaagagaaaagaacagtttattgtatgtacccacaaatgtctttccaatgttctttcttccttcctaatcctctaagatttcatcttgtattgtttcctttctgtttaaagaactttctttagccaatctttaagagtaggtctgctagcaacaaattcatttacttttccttcatctgagaatgtttttatttcctcttcactctggaagtatagtttttccagacatagaatttacagttgataattctttcagtacttgaaaaatattgtggcatttccttctcatctccattttatgagaaatctgctgtcatttgaattggtattcctctataggtaatgtgtcatttctcttactgctttcaagatttcttcagtatattttatttttaaaagattaattatgatatatcatagcacagatttcattgggattacgtgtggggttcattcagcttcttgaagctgtaggtttctgtctttcaccaaattagttaagttttcagtcatcatttcttcaaatactcgtgtttatttgtttgtttgagacaggatctccctctatcacccaggctggagtatagtggcacaatcacagctcactgcatgcagccttgacctcataggtgcaagaaatcctcctgcctcagcctcctgagtagctgggaccacaggtgtgcatcaccatgcccaatttatctttttcttttttcttttcttttctttttttttttttttgagacagagtctcactttattatacagggcagtgacataatcaaggctcactgcaacctctgcctcctgggctcaaccaatcctctcacctcagcctcctgagtagctgggactacaggtgtgcaccaccatgcctggttaatttttttttttttttttttttttttttttggtagagacagggttttaccattttgcctaggctggtcttgaactcctgagctcaagcaatatggccacctcagcctcccaaaatgctgagattacaggcatgagccaccatgtctggctgtcagctaatcaaatactctttcagtcccattatctttatcctcttctgggactccaatgacatgaatgttgggccatttgtcattgtctcacagatctctggggtcctgttcattttttcagtctatttttggtctattgctctgattgggtggattccattgttttgtcctcaaatttagtaattctaccctctcttatctctaattaacagtagatagtctaacctatcgttaatactatccagcactatttttatttctgttattttttatttctagaatttttattcagttgttttataacttctatttcttttctaatattttctattttaaaaaattgtatcaaaaatttgcagctgctttataggtcatttatatgacagatgctttaaaattattgtcagataattccaatatctgattcatcttggtgtttgtgtcagttgattgtcttttctcattcaatttgtgattttcttggttcttggtatgaaggataattttttattgaatcctgggcattttgcctattatgataggagagactaggtcctatttaagtctttcgttgtaagtcagtaaccctgttaaattaatcatgtgggtcttggctacttttatcagctgtggctccagtggcactctaattttcacagactttgaggtgttattttgttctgcttgattaatctggttgcaagaggccactggttcctgcctctaccccactgccttgtggggcagaacagatttccccacactgggcctcaggtatctctcagtgggagaggaatacggtggggtctgccatctgcctcagtgtctttgggcagggaaggagagtctcaggcatgtgagaacaaagaggcttcctagaattggccactttttgtggttgcatccttgttgctggttatgtcttcttgccccagtgactctagacaggggaggatcatttgaggcacacagagaaaaagaggcttccctgacagtattatttgctatagttcattctttttttacgtgttctgcctgcccacttcagtatttcttggtggaaagggagagtctcagggctgagggagagcagagtccttcctctggccaattatttttggcgaggcttccaattaatctctttggctggtagcgttgaacttgtctgatagttccagagggacatccgctcaatcaggaaaaaaaaaaaaaaaaaaaaaaaaaatcagcctccctgagctgcttcttgttgccaggcttggacttaggaaacactcagttaggaaacactcggtctaggtgaccatcttctgttgggttgggacactctaaacactctgctactgtgctgttcctccaggcctagggaggccagctcattctttttttttttttttttttttttttgagacggaatctcgctctgtcgcccaggctggagtgcagtggcacgatcgcttctcactgcaagctccgcctcccaggttcacgccattctcctgcctcagcctcccaagtagctgggactacaagtgcccaccactacgcctggctaattttgtttttgtatttttagtagagacggggttccaccgtgttagccaggatggtctcgctctcctgacctcatgatccacctgcctcgccctcccaaagtgctgggcttacaggcgtgagcaaaccagctcattcttactgtctttcagcgctctcatttggttgtctcttgtaccattaccagagttggtagttgttcttagcaggaaaaagcaggggaaaatgggtctacatcatcttttctggaccagaaatctgtttattatattttaattgcatatttccattcattttttggcaattaacccttttagatcttattataattatttgtgtacatccacggatttgaaacatcttggtaatttatctttgtgtattttacagtgccttgaacaaagcagattcttccttaaaggtacttatacatgaatgaatgttcatgcatattttctctggggctgtacaatggaacaagacctacctgttaaaagagtggttgttggtagaatgtaaacatgacttataagtgttcatccttgcaaatggacataggagtaacagggagaaacttgcttaatgtgatttacagaaacctggttcagaacataggctcacttggtcatcacttccctctggtcatcacaatctcacaatcatttttctgctttcagcagatgggaacatgtgataatgctgtgacagatttccccaccattacttcctaaagccattacccgcttctagcttaaaaccttgaacacacaaacacacacatatatacacactaacatacacatacatgtatgtttcaagcatccaagataggaagtaggggaacatgatgaattttcttttctagaaataaaacaatcatttgtccaatgaaagatgagcataaaacacccatacctaataacaaatggcacagaacaacattgctgggaatccccaaatagacctcacgaaaacatcactgaagattgcatgtgagagctagaaggcctcaggcagggaatgccatggaatgtaagaccaggcccctgctggggctcagaaataggaatgatagaaaagcaagcaggaagagaccctgggcaattgagttctcccactgagcaagaaagaattgaaaataacagcattaggcaggaaaacaatggatgcctgacctcccatttaaccattgtaatcatgcattgttatcaattggcttggtcttttaagattcctagtcacttgtccctcatatctgtggcacatacttatcactgtgtggatttgctttttggcaaacagaagttttaatttttaatggagtcaaatctattactcttttcagaaacgatctttctctttgtcttcaagtttatgaagtcccctctcactccagtagggataaatactcatttctattctgggtttctaatgattgattttatacatttatttattgctttaatccagctggaattaacattagcatatggtgtaggaagactgtaattcttccaactctaatgcattcttgataagtaaaaaataggatttcctacagtagaaaactcagcctagaaacctgcctttcagtatcctgaggcaggaatggagtgaatgaggcactttcctcaaacctaaaaacctcatcctgttttactggggacttgggataaccttctttatttctcagtgtctcctcctttgtgtacagtagcgacacaaatatccactgtgtttccaaagagaagtcaagtgcttaagctcctcaaattttctgagtacattctatgtagaggattttccattactggttacacttaatacacagggccttgctggagaatgtgaccaggagaactagaacttcagaaaacacaaaatgagctatcaaaggcttggcactttgtaggggtgtaatcagaagaaaaacgagtcctaatatttagaacacattagatgtaacctcttaaactccaaagttctcttcaaatcttacctatttaatttgaaagcaagcaatgttccagtgttaacatttctgatttgggggatgccagatagtgaaatttggattaaacagagggaatttatagtcttattctaattaataaatggacttaacggggttctgaaaataaaacaacctcataattagttggtaattaacatagctaagagccaggtagaactgtccaacctgtgtcatattctcacaggtgtgcccacaaaatacaatattatatagaataaatacattgcccaccttcattcatccagcaagatgtactgacttttcactgtaggcatgaacctgaagggaattaaaaatgaaggatggtccttgctctcacaaaagctgccaaattgggtacactcactcagtgtcttcaaggaacacatggtcaggtttctagattatgcttaactagattgggagagtggattaccctcagaatacccttgataaaagctttcaaaattttcctttactcacaaaaccatgttttcagggaacctaaacagaagtccaatatataagatagaataatagataaaagtataaattatttggtcaaatgaggactactagtgttctcaaaacactaccccacttccaaaatacacacatacacacacacacacaattcctggaactttacagagtagagtttcaaaatcactgcagctgatgaattgacaaatagaaagaaggggtaacagataggtacaaatgtaatataataaacacaatagaatgttaatgttagacaccaagcggtggttacacagggtgttcactataaaattacttcagttttcatatacgtttaattttttcataatacaatattgaaaaaaaaatcccgctcttgattcctatatctgaaagttcttaaagttttagttgagtaaacatttagaattattggccgggtgcagtggctcatgcctgtaatcccagcattttgggaggctgaggcaagtggatcacctgaggtcaggagttcgtgaccagcctgaccaacatggtgaaaccccatctctactaaaaaaaaaaaaaaacacaaaaattagccgggtgtagtggcaggcacctgtaatcccagctacttggcaggctgaggcagcagaatcacttgaaaccaggagaagaagattgcagggagctgagaccatgccattgcactccatcctgggcaacaagagcaaaactctgtcttgaaaaaaaaattggaattattatttgttcttaattgacccctttatcattatgatatgtccctctttatctttggtaaaccttcttgtcttaaagtttactttgtgtaattgatgtagccacattggctttctaaaaattatttctataacatatatttgtattccttttacttttaactctttgtgtttttgtatttaaagtgcatatgttgtagtcagcatattattgggttttatttattttgtatctttcatgcacgtccgtgtgaagagaccaccaaacaggctttgtgtgagcaacatggctgtttatttcacctgggtgcaggcgggctgagtccaaaaagagagttagcgaagggagataagggtggggccattttataggatttgggtaggtaaaggaaaattacagtcaaagggggtttgttctctggctggcaggagtgggggtcgcaaggtgctcagtgggggtgctttttgagccaggatgagctaggaaaaggactttcacaaggtaatgtcatcacttaaggcaaggaccagccatttacacttcttttgtgatggaatgtcatcagttaaggtgaggcagggcatattcacttcttttgtgattcttcagttacttcgggccatctgggcgtatacgtgcaagtcacaggggatgcgatggcttggcttgggctcagaggcctgacagtatccatattgacaatctatgactattaattgggacatttagtccatttatatttaatgtaatgatataattcagttttaagtctaccatctgaatatttatgccatctttttttgtttccttcttccttctttcttgccttctttctgttaaaatgcatatttctaaagtttccatctttataccactattagggtttttaattatacctctttgtagcgtgtgtgtgtgtgtgtgtgtgtgtgtgtgtgtgcatgcatgctctaggactaacaatatgcatccttatcttatcaaaatctacctaaaattaatattatactatctcatgtaaaatataagaacctgacatttattacttccttgtccattatgctgtcacatgttttacttctatttgcattataatcctttcaatacattgtcatgagttttgctttaaatagtaagttaccccgtaagagcttaacagaaaataaagacggtttaaaaatatatatattattccatatatttaccatttctgtgctcctcattccttcctgttaatctgtttccatttgctttcactttcttttaggctgaagaatttgctttaacatttcttataatgcgggttgactagcagtacattttcttaggttttgtttatctaaaacttaggttttgtttatgcagccataaaaaggaattagatcatgtcctttgcaggggcatggatagagctggaagagatcatcctcaacaagctaacacaggaacagaaaaccaaacactgcatgttctcactcataagtgggagctgaccaatgagaacacatggccacagggagggaaacaacacacactggggcctgtctggggtgggatggggggcagcggtgggagggagagcatcaggataaatagctaatgcatgtgtggcttaatacctaggtgatggtttgataggtacagcaaaccaccatggcaaatgtttacatatgtaacaaagctacacatcctgcacacgtttcccagaatttaaaataaaataaatttaaatttaaaaaaagaatttaaaaatgtcattctattgtcttctggcttgaatagtttttatttaggagtctaaaataactcttactgttgttctcctatatgtaatgtctctccactcctcccatcctcagcagcttttttctttacttttggatttttatcagttggccgtcatacatccaggtatggttttctttgtttttatcctgctttggtttgctaaacatcttcaacctgtagtttgattttttcactatatttgggaaaatttgttcatttttttaaactattttttttcctccctcattctctctatcctcatttctggacctcaaattgtacaaatgttagacttctcgcttttgccccacagatcactgaagattcatatattttttctattttttcctcctgttcttcagatcagacaatttctactgatctgtcttaaagtttcctgatcttttctgtagtttctaatatgttgctaaggccattcagtaaacttttcattttggaaattattatttgcagttctataatatagatttgtttcttttttatagtttacatttgtttctctgagatttcccgcctcttcattttatgtcacccattttatgtcaagtccttgaatatacttatctagttattttaaattcctcattttctaattctaatgtctgagttatttcaaagtctgtttctatttattgcttttttctgattaatggagcttcctcttcacacatccagtaatttttttgttgtatgctaaacacagggcgacacatttagggaatctgcattatattgtcttccttatagggtactgagtttttttctggcaggaaattacatttctaaaatattctcttgaacctttcattgttagaactggtctagttcaaatttgtccttagttgtagaacacagccttatggtagtgtacaggtctcactcctgaggctggcctttctggggtttcaactgaatgcccaggttctcagggaaatctgccctctcagactaagaattccaacgtctcccatctctgggcaaccactagtgtctttgttcggctcttggtcccacagtgaaccctctctgctaggcctcatggtgtcttgccctgcttatacatagtcaatccttcagacaatgacctgcaaagaaacctccatgtacactacctccacatgccctacctcatgcatctctcttattcagtaccctactctgctaattccagcccctcagcagcaacaaagtacaaactctgccttatcagttcattgaaacaagcatgtaatgcttggccccacctccttactagccagtccagtgaatgcacccctaggcagaaagccaaggtgaatgcaaggcttgcctcaggggtttaccttgtctcaagggtcacagccctgcattgcctgttagccaatttctgaaaacagttgccgcatacattttatctaattttatagttattcatgaaatgaggtcaagaatgataccagttacttcattgtggcttgaaaactaaaatgctttagtatctctctccactaccaccatcaacacttgaactttacaaatgatcctatttattctaccacctgctactaaatgatgaaaaataattatcaagtgagttgccgaggcttcctgctcttatttctcttaccatgttctcagatatctgactgctagctaatgtctctgcccgggaacaaaagaagccagagaaggagaaagaggaagctcaagttctcccatattctctcttttcaaaagttacgaagagtagaaaatagtttaacaaggaagtttagagattacatgaaaattgtaatgagtctgatgcaccagcttccaataccgtcatcacaaccagcccttccttggtggtagttatgtattggttgcacctgatacctaagcagtagtctgctctcttttgcaataaatcacatctgtctctatgatagactctgacctcagcctaccaacagcatgttttttaatgacactggcttgcaaatgcatctgatttgaaataaactttctttgtaccatttttaggttctgtacttttgaataaaggtgcaatcacagcaaatcaaattctcagaagactacaataagtaaacattaagcagtgttcctttttgaaagcaggagagagtatatgtttaggaatgttcaaggattagtctggttcttttttaagtttttatttattgattttatcttaacagcaaaatacaatgcctggctagagcctttaaatacagataaacaatccaaacaagctgcaacttacgtatatcaatcttctaagatcacctcagaaaagagaaggtggctcccaacttgtcccaagttaaatacatttaagagaagcaaatgggaatagcagctaaagctgacggacagggcaattcgaggcatcagatgctccctttcaggttgctgagatgcttccagatggttcctgtatctgcatggccaaagtggtataatttattttcttagctttttcaatctctctgcatattacatcacaattttagctcaagtttatttttgttgtgtgtatttgacaatcctttggtggtgtggaacttaaatcatcacttcccagagcaagaaaacaaaggctgacacttctgatatagaaggctgcaatctggaaaggacgatggttggaagggcaggtggatgattgggaccaccactaggtttattctttatttgttcaacatgttttcattaaattagggtacagaggtggacaagtcagaagcagtctctctcattatggagtttacactctaccagaggtgagaatggaggacttaaaggtagacaaaaatgcctaatgtgtcacctagagaacacaaccaaaaatgagttacccaacaacttcatacagctgctacctgcagttagtatgtacatgccaggtaagctaggaagaggcctacagcctctcctggaaaatcttgggagaccaaataggttttgatcttgaccattccctgaaaatcctcatctataatcttcaaatgcaagaaggaaccaggaggtgccattatgtttcaccacaagaactcattttttttaattactgtttttttcttttagtgagcataattttttcttttgttgttattgttgttattgttgtttttgagacagggtctcataatgtcacctaggctggaatgccgtggcgccatcttggctcactacaacttccgcctcctgggttcaagggatcctctcacctgagcctccatagtagctgggattacaggcatgtggcaccatgcccagctaatttttgtatttttttggtagaggtggtgttttgccatgttgcccaggctagtctccaactcctgggctcaattgatctgcccgcctgggcctcccaaagtgtttggattacaggcatgagccactgtgcccagccaattttttaattacgtaaattaaaggggtacaagtgcagttttgttatatggatataccgcatagtggtcaagtctgggcttttaatgtaatcaacacctaaatagtgtacattgtactacctcactcccctcccaccccatcatcattctgagtctccagtgactattattctatactctatgtctacatacacacattattcagctcccacgtgtgaggacatgtggtatttcactatgtttctgagttttttcacttaagataatgacctcctattccatccatgttgttgtaaaagacatgttttcattcattttctgtggctgaatagtattctattatgtatacatatatacacacacatatacataaataaaatgtgctgtatgtatatatgtgtatatgtatatacatgtggtgtgtgtgtatatatgtgtatacatatgtatatgtgtatgtgtgtgtgtatatatatacatatgtatacacttatatacacacacagagcacattttctttatttaatcatcttgatttttttggaagagtttcagtaggatgagtatcagttcttctttgcacattttgtagaatttggctatgaagccatccagtcctgggcattttagggggaaggttttaaaattattgattcaatcttactattcattattggtctgtttaagatttctatttctttctggttcaatcttgggcagtcatatgtttacaagaatttgtcaatttcctctacattatctagattgtgagtgtacacttcttcatagtagtctctgatcatcttttgtattcctatggtatcatttgtaatgtcttctttttcatttctgacttttatttggatcttttcttggttagtacagccagaggcttatcaattttgttcatcttttcaaaaaaccaactttttgtttaacttatccttggtattgttatcttggttttcattttcattttatttttatttttaacaaccaatttatatcattcaaacagatagaactgccttgtgcttgtttcagccttgttttctggttattaaaagaagacctgaaccagatacaaattcaccatattttccttcaaggacacttctcataaaagctactaatatgcatattttggcatacaaaatcacatttgctaaaacttttttctgcttaaatacaattcttttttcatttagcaactgcatgttattatagaggtcaattcattgggttataagagaaaagaaacacttattgaagattcacaacatacattccattatatatcgctgttcaatagaatgcaaaattagtaaatatcacccctacaattggaccatgtaactgatagattttcctgtaaggagttaccaaaatgtcatcaaaatctagagtttgacaatttccaggccttatcctgaccttctcaatgcaagttgcacaaatgaaatcagttatccaagagaaaaactgggatagaaataggggttaatagattatgatcctaagttgaaaaatacagagctctcagtttccaagatttaccattttcaagtgtccctaattttgtcccaagagtggctccagcctgggcatgacagctggctgtaatggggacagatagctctttctttctaagaacaagatttaccatttgttttgtctgctctctccacaagctcttcctgaaacatatcagtggcataataaatatcatctcgttttccatcttaaggactttagtactcaaaggtaactgttttgagtccttaaaaaaaaaaaacaagcaaaaaaaaaagtggtttgcaaacttttgtctgtgacataacaccaaagccgtagtaaagtcaatgataataataataataggtacttacttgggctagggactgtgctaggcttcttttcattcattatctcatttaatattcacagttcctacatggcttagtatttcttgcagaccctttaaatgcttacatatagaaatctgccctactatttcaagtataggcagaagttggcaatacaagaaaagacaaagggataagaatccgtccaactggacaaaacaacttcaatccttaaaaagtcctacccattttagaaacaggtcaatgaagctacctgttatgattgtagaagtcatgtctgcttactgcacctaatttgagaattacagaaaaacatttttaaaaatcacatattattctatcactcagagataaacattgatagtgtttttatagttcccagtcttatttatatatttgccttctttttttgctatttgtttaatttttaaaccaaattcggattacatagcaatgcaattttcccatattattagatataatttttgaaagattttaaaacactaccttatgttccataatttatttaacaatttcactgtttactgacagataatttagagtacttaattattctataaatactataataccaaagtataataatgaatttttgcctgcatctctatttctttaagaaagatttctataaatgagattactagatcaaaaaacattaaaaaattctttttctagggagaatatccccatgcccaattccactacatttgccaactagctgaaaatgatggggttttttttgcatgttttaaattgttatataatggtattagattgcattcttctgaaactcattttcaaaacatctttactcaacatatatttatagttattcttgttactatatgttgtttttactcattctttttttgcttttcgaaaatcgtctcttagttgaataataatatttatgtattagctattggtgaacatgtacgttttcctgaattatcaaaaagatactattgtaagtatgttgtgcacattccccttggcatgtgggccatgggagttgcatgtcttcaactattctggatgatgccacactatattccacagtggctgtaccagtttgctctgtgaatgataatcttcattgctttacaacctctccaacacctagaattgttagatttatttttccctttaattttgacaattggatagatgtaaaaagctatactgtgctgattttagaaggcatttcctgattacttttgcagttgtacattctttcattcattaattgtccatttctgttgcttctccaatttatgtttcttcagaccccttagttatttttctattgatttttatttctgattacttgtttgtattaactctttttatatttcatattaattttctactatgaaacattctgcaaatacaggcataacctgaatgatgttgcctcgattaacattttcatggtaaaatgactcttggtttttaaaatccaaatttcatcatctatttttttttttttgccaatgttcatgtagcaaaactttagatttataataccaaactctgcaaaactttcaataaaaggaaatataggaaaatcatcaagatattttcaaaacatattcagtagaacatcagaataatatatagatattttggaaagcaagctgagtgacaacacacgaaacacccatttcagaagttgctgatgctaaaaggccatcataccatcagtgtgagccacacttggccaccaggcactagagcacatttcccagtgccttccccattttactttttttgcttattgttgaaatccccaaattgttgagaaaacactgaagacaattgtagagaagaaaacaaaacaagtgagaatagctactacgtacaaagcaaacattttataacatgttaattgtagaagtcatcaaggatataatttttttaagtacaagtgatcgaggatataatttttttaagtacaggcataccttgttttactgcactttgtttcattgcacttcacagataatgtggttttacaagttgaaggtttgtggcaactttgcatctagcaagtctattggcaccatttttccaacagcacgtgttcatttcacgtctatgtatcacaatttggtaattctcccaatatttcaaactaattcattattattatgtctgttgtggtgatctgtgatcagtgatcttagatgttcctattgtaagtgttatggagcccaatataagatggtgaactttatcagtaaatgtttgtgtgttctgactgctgcactgactagccatttttccctctcctcaggcttccctattccctgagacacaacaaattgaaattagtccaactaataagcagacaacagcttctaagtgttcaagtgaaaggaagagtcccatgtctctccctgtagatcaaaaattagaaatgattaagcttggcgaggaaggcatgtcaaaagctgagctaggatgaaagctaggcctcttgcaccaaatagccaagttgtgaatgcaaaggaaaagttcttgaaggaaattaaaagtgctactccaatgaacatacaaatgataagaaagtgaaacaggcttgttgaggatatgggaaagtttgagtggtctggatagaagatcaaactagccacaacattcccttaacccaaggcttaaaccagagaaaggccctaactatattcaattctatgaaggctaaaagaggtaaagaagctgcagaagaaaagtttgaagatagcagaggctgattcatgaggttcaaggagagaagccatctccagaacataaaaggcaaagcaggaagtgcttatatagatgctgcagcaagttatccagaagatctagctaagataactaatgaaggtggctacactaaacagcagattttttttttttttttgaaacatagtctcactctgtcactagggctggagtgcaatggtgcgatctcagctcactgcaacctctgcctcccgggttcaagcaattctcctgcctcagcctcccaagtacctgggattacaggtgcccaccactacgccctgctaattttttgtatttttagtagagacatggtttccccatgttggctaggctggtctcgaactcctgacctcattatttgcctgcctcggcctcccacaatgctgggattacaggggtaagccaccacacccggccaaaggcagattttcaagagagatgaaacagccctctgttggaagaagatgccatctaggattttcctagctagagaggagaagtcgatacctggcttcaaatcttcaaagaacaggctgattcttttgttagctgctaacgcagctggtgactttaagttgaagccaatgctcattgaccattctgaaaatgctaaggcccttaagaatgatactacaccaactcttcatgttctctgaaaagaaacaggaaagcctagatgacagtacatctgtttatagtatggtttactgaatattttaagccctctcttgagacctattgctcagaaaaaagattcctttcaaaatattactgctcactgaaaatgtacctggtcacccaagagttctgatggagatgtaaaaggaaatgaatgttgttttcatgcctgccaacacagcatccattctgcagcccatgggtgaaggagtaattttgactttcaagtctcattatttaagaaatacatttgtaagactatacatagtgatttatcagattgatctgggcaaagtaaaatgaaaaccttctggaaaggattcaccatgctggatgtcattgagaacattcatgatttatgggaggacaacaaaatattaacatgaaaaggtgtttgggagaagttgattccaactctcatggatgactttgaggggttcaagacttcagtggaggaaggagctgaagatgtggaagaaatagcgacaactagaatcagaagtaaagcttgaagatgtgactgaattactgtaattttacaataaaacttgaatgagtgaggagttgcttcttacgggtaagcaaagaaaaggatttcttgaggtaaaatctactcctgaagaagatgttatgaacatcgttgaaatgacaacaaaagctttagaatattacataaacttagttgataaagaagggttggagaggattcactcattttgaaaggagttttattgtgggtaaaatgctggcaaacagtgctgtatgcaacagagaagtcattcgtgaaagcaagaagccactgatgttgaaaactttactgttttcttactttaacaaattgccacagccacttctgccctcaacaaccaccagtctgatcagtcggcagccataaatatcaaggcaagaccctccaccagcagaaagattatgacttactgaaggctcaaatgatcaccagtatttttagcaaaaaaaatttttaaattaagataacatatttttttataatgctattgcatactagactactatagactgtaaacacaacttttatattcactgggaaacaaaaaagtttgtgtgccttgttttattgcaatattcactttattgtgatggtctggaagtgaacatgcagtatctctgagatatagatatgcctgcattttaagtctcagtgtgacattattgttctactatggttattttactgtgttttacttacacttcaagaaattcactagagggttggtttgacatataacacattttttcccatttaagtaatggcaaactgtctcaaggaaatcatttttgggtaatacatctgatcatcaggaatcaattagtaacatcaaacaaggggtgtctatatttttttctcagcatgttccttatcttttctttgtttgcttgtttgtttgttttctattttacatgtctcatttaatcctggaaaaatgctataaagtagctagctgattctatcttacagatgagggcactgagattcagagaggtcagtagctggctttattatcttcttcactgtggctgcaataaaaaataaccacaaactttgtggctctcacagctctggaagccagaagcccaaaattaagatgtttaagagcaaagatccctccagaggctctaggagggattccattccttgccactttcagcttctggtggttggtgggactcttgtaatagcatttaggtctcccaaaataatccaggatgatttcctcatctcaagatcctcaatttaatcatatctgcaaggaccattttttttgcaaacaaggtcacattcacaagctctagaaatttgatgtggatacgtttgcagagccaatattcaacttggcacactcaccgaaggccacatagcagaatacggtgtcaagtccagatataggagttccagactccagagttcatgttctttccactccatgtgcggttttccatcacattgtgtgacctgtcgtctccatccctcctcacacctcagattcccttagtcttcccaacctcagagtgaggttaatactctgttctctccgtgccagggtctcttccaaggagagtattcaagagctgtgccacccctttacaaattccattgcgcatccgtgacttcctttccaatacccagacagtttcctgagtctagttcacagactagatcaccaaagcaaccttcctgggagtaaatattacatctttcccattcatattagtttctcaaaagtgctcaagagcctgaagaatgacagaagagaaatgctaaagattgaaggagttcagaacacaatactccaaaatatgttgctctagtatattgactattttgagcttaaagacacttggaaaaacagcagatacaaaaaatatactctgagctttcttcttttccttagaaacaggagataacttgtcctccctacgccagagggaaagtagcgttcttatcatcaaagacgagaagttgatgctgagagaaatctgaacaaacacaccttattaaagtaacccttatcttcctagttacttctctacccaattaacctccctagcccaagcccgttggctttgtcacatactcacaattttctattcctttcccaattcagtacataggtgttcaactttcaactctgtctttgggtttcatttccttaagagggctcttgtgctcacataaaaattgaatgaattaaatttgtatgcttttctcccgctgatctgccttatgtcaattcaatcctcaggcccagctaaaaaaccctaagagagaaaatttggcctcccctacaatgtcatcctctttcttttttctggaccttctatctgctggtacttaagatactaaaatggacgggagaaagaaagcaaaccatgttatgtcttctgcattggcctggtacactccgtttgaaggttactcgaagccagcttgctttttgtcaagagattgcttgatctggagccatatagaaaatggtgacatctccaccccgtgacatatgggccagtaagggcttgcaaagttccattctgcacacttctcttcattctaagaacgagtattcattccatttaaacacatattaccaggaattcaatccaacctctctttttacagtctacctagaattactattatactatttacatacaatatggaaacctcacacatgtatgaatctatttacaaactccctctaaattcaagttgtcattgaaattacatctacctgtattataaatcccataaaaatgatgctatagtttttacttaaacaaacatacatattcttaaaacattaggaggaaaaaattgatttttatatttatcttactatttatgatttctttatttttacataaggatctgagttttcatctattttttcttgtcatcccaaagaacaaagcattttttacagtgtaagttggtctgctggcaataaatattctgtttttgtttttctgaatgcaactttattttgactccgttcctgaagtatgagtatctttggatatggacttcgggattggatagtcatatctccttacagcacattgaagatattgtttcattgtcttcttgctttcatagtttttgaaggtaggttggcagtatttagcagtgcagtttcatgtatatagtgtgttgtttttctccggctattttcaagatagtgtcttgggttttcagcagtttgattacaatgtgcctcagcatcttgaacgtgtacatttatctctcaccaattttgggaagtgtgtggggccactgtttcttcaaatattaggttggcacaaaagtaattgtgggttttgtaatgaaaagtaattgcaaaaccacgattacttttgcaccaacctaatatttttatgacccattctctatcacctttccttctggggaaccaattactcatatgttaaaagaattatcccataggaacctgaggctctggttgctttttttttaatcctttttaaaaatacaatctctgttcttcatagagaaaatctatattgatattatcaaattcactgactgctttggtctgcctgtgtatgtatattccaaaggtcagccagagatttgagcagaatttacaccaaaaatttgtaatgctccttttctggccctctttttaatgacattcctcccttactttccagtagctggggttgctccaaactctgtcccctggttcataaggccagaaagactgagcttcctacaggagtttcagccactctgtgtggccctacctgtggcttgacctcaggataatagtcataagaaatttaacctatactacttccaggtgtcttcaacccccttcgagaatcttgctgcctttgttcattcttcagatccctcagagagttttgttgttgctgctgtttgtgttttgtgagggtttacagactacatgggaagcagaaattgttctttgggatttaacttttacaaaaatcacaagcactcatctcatttgtggcagtgaaagtaatatttacaatgttaacgttaaataacataccttgctacaggtttccagtaaatatcttgtattatgctgcgtaagctcctcctatttctagctcattaaataaatattatttgcttgttggtcttatttaacagaaaaaaaaggagtctctatttattaattcattagttttattttccacagattgattttgttactctcctttaataatgaaagttctcagggctattaattttctgctaaatacagctttagccatttaaaatattgatacatagagttcttactctcctaacagtttattatatagtttcctttcctgtttgaatctggagtttttagaaaaaaatttggtttttgttatcattatttctcttttccaagctactgatttttgcatttaaacttttgctattaatgtctagctctatttcagtgtaggcagaacatggaggctgttaacactttatatttcataatttaatatggtttctttgagatataatatatgatcaatttttttctaaatgcttcatggctccttaaaaaagtgtattgcttatttctagagaacaaaatttaataaatatttattaaatcatctttgttagattattaaaatattctatcaattctgtgtttatttgacccatgaaagatcaataaaagtgtattaaagtgtcatacaacaattctacttccatcaatttttccttatatttctaacagcctttgtttcatgtattttgaggctgttaccaagtcaataaaaattcagaactgccttatcttcattgtgaagtctatcttaaagaaaatataaccttcttgattgcatttaatatttttatagcctttgattctatttcatctaaatattgccaagattacttttttttttaatttcgcttctgcctaataaatcttgtccattctattgttctttcttttttaatctaatgagttactttgttttaggtatatttcttctcagtaccctacagttagattttgctttttagctgaaatatacagttgttgtattttaatagactagtttaataaacatttcacaatgagattcagctttacacaatgctttcacatttatatttcctcttttcaacatatcaggtacaggggaaatgtcattcctatgttatgcataaggaaattcaaagccagataggttagatgcatttcccaaggtcattcaggtaatatatggcagtggcaagacttaaccaaaggatgataatactaagaaaatggctttttacaaacatatactatccccttgctgaacatcaatattcagatagactatttggtcaaattatgttttgtgtttttttttttgtttttttttttagacagagtttcgctcttactgccccagctggaatgcaatggtgcaatctcagctcactgcacccttcacctcctgggttcaagtgattctcccgcctcagcctcttgagtagctgggattacaggcactcaccacaaggccaggctaatttttgtatttttagtagagttggggtttctccatattggccaggctggtctcaaactcctggccccaggtgatccacccacctcagcctcccaaagtgctgggattacaggtgtaagcccctgtgtccggccatggtcaaattatctaatttttcttccactgggggactttatactatttatttttattgccgtaaatgatatgtttgtaacactgtaatcttatttcatgctttgtgtagtttatgctttactcttttttctttgttttatatactattggccctccttgtctgtgggttccacatctgtggattcaaccaatcatggattgaaaatgctcagtgatatggtgtggctctgtgtccccacccaaatctcatcttgtagctcccataattcccttgtgttgtaggagggacttggtggaagacaattgaatcatggggggtgggtctttctcatgctgttctcctgatagtgaataagtctcacaagatctgatggttttaaaaacaggagtttccctgcacaagctctctctttttgcctgctgccatccacataagatgtgacttgctcctccttgcctttcaccttctgccatgattgtgaggcctccccagccacgtggaactgcaagtcaaataaacgtctttgtttgtgaattgcccagtctcaggtatgtctttatcagcagcagtaaaaaggactaatacactcaggaaaaaaaaatggcatctatactgaatatgtacagacattttattgtcattattccctaaacaatacaactatttatatagcatttacactgcattaggtattataagtagtctagagataatttaaagtagtctgtaggttacatgcaaatattatgccattttattccagggacttgagcatccacaaattttggtatctggaagcaatccttcacagataccaagggacgacagtacttggtgatttagatcaggctgcacattcttttctctctccattggtttggaagtcatgcatcctacttttgtttctaatagtggcacctggtatatcaaaaagaatattaatatttgttgaacgaatacattttaaaactttcaaatatttagaatatttgagtctacccctagaaaaatgagaatttgtcacaaatttatttctggaccttgtaaatatgatcctgggtttcttattgcttagtgttaaatattaaggtattaaatatttaatgcttattaaagcattattttgtgtgacatattttctctttcaaaagcatagttttacatttgcattcagtattataattaaagttacaatcacttaaatctcactttttgttaacttggtttaattattaacaaccagccacttctctgttactgaattcttttgttgttgttgtggttgttatttagtttttatttcataatcataaacttaactctgcaatccagctaggcatggaagggaacaaggaaaacatggaacccaaagggaactgcagtgaaagcacaaagattctaggatactgcgagcaaatggggtggaggggtgctcccctgagcaacagaagaaatggtctggtggttaagataaaacacaagtcaaacttattagagctgtccacagtcagcaatagtgaccttcttgctagtcttgccattcctgaacacaaagcgctccatggcctccacaatatccatgccttctttcaccctgccaaagaccacttgcttgccatccaaccacttggtcttggcagggcacatgaaaaactgggaaccatttgcgttgggtccagcatttgccatggacaggatgccaggacctgtatgcttcaggatgaagttctcgtcatcaaatttctccctgtagatggacttgctaccagtgccattatggcatgtgaagtcaccaccctgacatacaaaccctggaataattctgtgaaagcagtaaccctcataatcaaatcctttttctccagtgctcagagcatgaaaattttctgctgtctttggaagcttgtctgcaaacagctcgaaggagacgcagcccaagggctcgctattgacagcaatgtcgaagaaaacagtggggttgaccatagctggtaatacggggctcccagtggcagcaccatctgtgaagtctctgttactgaattcttaacttcaatttctctctcagttacctgggcagtgcttcctaaatgttagtatgtttaagaatctcctagagagactgttaatgcacagattgctacagttcatccagagtcctaactgttctaagcagtaggttttatagcaatattttgtaccatatagtgtggccaaaaaaaaaatatctgattttttgctcctttataaggctaactgttttgtttgcctgtgtgtgtgaaggattttttttactttattctttaaaaaattaccaagttgaaatgatataaaacccttttcattaatgttgcctggagtacggaaagtcccttcaatttttgttttttggtatcgggttttgtttttgtttgttcgttgtgctccgaagagcttttattaatctttcactactatttgtgttctaattgcttctgcctcaagaacatctgtgattcttactttggttctgggtgttcaaatctatgatctctattttctatatttttaatcatctcttttgttattttaatttttattgcacctgttcatttcaacagaaattatcaatttttttcccctcttgattttttctttttcttctttttttttttcttgagacagggtctctgtcatccaggctggagggcaatggcacagccacagctcactgtagcctccacctccccaggctcaggtgatctacccacctcagcctcctaagtagctgggactgcaggtgtgtgccaccacacctggctaatttttgccttttttgaagtgacaggtttacatgttgcccaggctggtctcaaactcctgggcttgagcaatctgcctgcattgtctcccaaagtgctgagattacaggcttgaggtaccacacctggccatgagtgttttttaaatagtgatttcttttcagcttccaacacagacttcaattgtgttatgacattctggtctctttacaatattttcttgactaatccatctccttttccaaataatcctactttttacaatctaaacttattctctcatttcactttctgtttcctgatgctgttgaggatgacaaaaaatcccttcagatttctgtgacatatcatcttgggaggtcaacatttactctgagtctctgagatactgttcccttttccttgtccataatgatttctttttactttagtttatcatgaaagagaccgtgtttgccaagaaaaagatgaagattgtctttatgtgtcacttaaacataaatctcttacagctaaatgacatgttggtttacaaaacttatatcctaatttccatcctctagcaggttttccacctagcatacctgttgggattggcatagactcatcttgtatcactacctgcatctgtattatgaaaaacaacaatccccaaggccctcgtagtttcagcatagatatagtgctttaactgtgacagatcctgacaaacatatttccaaaaatattactgccctatttagtaagcaggataatggtcttccaaaggtgtctacatcctagtccctaaaatctgtgaatgtgttagattacatggcaaaggaaaattaaggtagcagatagaattaagtttgctaatcgtctgaccttaaaacagggagattatcctccagtaccagggtgggaccaatgtaatcacaagggtcattaaatctcaaaaacagaagtagaatagtcagagcaatgcaataggaaaaagagttgactggccattgctgatattgaagatgaaagggggccacaagctaaggaatgcaggcagcttctggaaggtaggaaggacaaggaaacacattttcccttagagacctcagaaaggaattcagcctaacatcttagcccactaatatccatctatttcaaacttctgacctcccaaactgtaaaataataaatctatgtcattttgaacctcaaagtttgtgttaatttattacagcagccacagaaaactaatatatgaccatttatttgagtaaccactatttgcattcttcacatgcatatgcaaaagatgtcttcattaaaagtgatgcttcacaaaagtacttacatgcatagtaattcttgttcacttttctgattagcgtttgcatgtttctgaagcaggggaaagatagcagccaaatgattaaaggtcttccctctgtttggccacagcataagggaatcacctgttgaaattgttcattctagttccaccaaacatctcattagtagaattctctacaagaatcaagactagcttgactataaaaacaaatttttagtggcagcgacttctttttggcatatatcttcttgagtatttttatagaaagttgaaccaggtataatagaggctactactccaatatgaatttaatttcattcattcttcaatcccttcttggataaggtgctgatccacctaagtcactccctcataagtgaatgcaaacttaagaaattataccttcataaaatgggcatatttttctaactgtaaaaatgttttctttaaataggcatgactatggcctgtctattttaatttcgtatagcagtaatttcccttggggaaggagtaaaagacaatattttttaaagtttctctctatctagataggatgctagtagaagcaagatttctatatgttctgatgtgaccaagtagatatttctctactcaccagcctctgaaaatccctgtgtttacccaagatttaactaaagaggctaaactcgtgggtaaatattaagagggaattgacaaaggcatattaagtctaaggagtagactatacttttctaaaataaacacataattacagagttaacacagcagcaccttctgccttgtcagtgctgaaggccccatggcagccagtactcttcacttgacctcgtcctgcaaactttctgtacagcagataaaggcccaaagtacactatagtttagtgaatagcataaactcattcatctgtaagtactagatattacaacatcaggcttctcactggtcctactataaaaataattttatgcttgcacattggacacaattgttctggtggcatagctctttagctacaccagcactgaatagaaagaggcatcctctactattagtctgcaacagaacccagcatttccaccattgcaaacatcaaactggatgaagactttttattcccagcaggattaagtcaaaacatagattgacctaggagaagaagcattagcccttgtcaaataagtataattacttgatgacattggttagtaaagctgcaaagaatactgaggaaattaaaccagctaatttgggaaagaccagaaaggcaatatgaacaccataaaaacatgggtaaggaacagtaagatgctgacctttactgttttctctgggcatgatcctgcctggcagagctatgtttaggctcctcagaaaacccgatgctctctttgcattactagccaatgtgaagcaacattaaataaaaaaaaaaagaaaggaaagaaagaaagaaaacaatcagagaaatgcaaattaaaaccacaatgagatatcacctcacaccagttagaatggcgatcattaaaaagtcaggaaacaataggtgctggagaggatgtggagaaataggaacacttttacattgttggtgggactgtaaactacttcaaccattgtggaagtcagtgtggcgattcctcaaggatctagaactagaaataccatttaacccagccatcccattactgggtatatacccaaaggattataaatattgctgctataaagacacatgcacacatatgtttattgcggcactattcacaatagcaaagacctggaaccaacccaaatgtccatcaatgatagactggattaagaaaatatggcacatatacacaatggaatactatgcagccataaaaaaggatgacttcatgtcctttgtagggacatggatgaagctggaaaccatcattctcagcaaactatggcaaggacaaaaaaccaaacaccacatgttctcactcacaggtgggaactgaacaatgaaaacacttggacacaagaaggggaacatcacacaccggggcctgttgtggggtgtgggggtgggagggatagcattaggagatatacctaatgtaaatgacgggttaatgggtgcagcacaccaacatggcacatgtatacatatgtaacaaacctgcacgttgtgcacatgtaccctagaacttaaagtataataataataaaaaaaagaaaaccattaaaacactttagaaatatataaaggtaggccgggtgctgtggctcactcttgtaatcccagcactatgggaagccaagacaggtgaatcacctaaggtcaggcgttggagaccagcctggccaaaatggcaaaagcccatctctactaaaaatacaaaaatttagccaggtgtggtggcgggtacctgtaatctcagctacttgggaggctgaagcaggagaatcacttaaacccaggaggcaaaggttgcagtgagccgagattgtgccactgcactccagcctgggcgacagagtgagactctgtctcagaaacaacaacaaaaaagaaatatataaatgttttcatttgtatgagaacttatgaaatagtgattaagagaatgggctccaaagtcaaactgtgagggttcagatgctggtcttccccttgtagaaatgttatgtaaattatttatgcttcatttcctacatctgtaaactgggggataatactgttacctcactggctgctttgggaggatcagctgtgataattcatgtaaagcttgtagcagagtgcctaatccctaacaagagttcaacataattgctgctgctgctagggagaggctgcaaagcattctgggtaagaacagggacgctgggacaagattgtagaggctctgccattgacaagctgtaatcttgagcaacgtatttaacttctttgtacctcacttccctcacctacaaaatggaagtaataataaccattatgagggttgttgtgagaattaaagagttaatatttgttaggtgtttagactagtatctgatacatgtctgacaaactattcagctgtacatgaatggttttaaagctgtgattatggaaaaccaagggctttgtacggaggaatggagataaggagagtgtgcagcccagtcccactctgtatgcaaacaaagtaattctagctcttttacatatttaactttcaagcaagattttctttgagtaaagggtaatgctgctttaaaagaagaaaggaaggaaggaaggaaagaaggaaggaaggaaggaaaccatggctctatatgtatgagcctcatataaaatatatcagtacaggtcttacaaaacactgaatgtttttatacacattccctagcagatttaaccagatcagttttaaggttccttctagaaaggaagttctccatacgttgaaaagtgaatttcagtacattcaaattttaaagacacgacttcccatacttcttcagggtaaacaaaaatctcaataattctaatttaacatgcaaaagccatgaatattcactacagtcaaatgaataataaatcacccctgggttcaagtgcttgccatgcaaaattgcctatttcctagaacatccagaaatctgtttttaaattgctttttattacttttgctcttgtgatggttgctcttcaaagcaacttggaaaaatgtgccattctcagcattaaggcgataaaggagaagtgaggacagcagaacacggtgccatccacaaaaggaaagagagtctgtggatcagagggctgggctccggaagacagtttttaaatgtcactagataaaatttatgagataaaagggaatgttccttagtcatcctgagcattgatatctacatgaataataaatcaaaaggctctttatccatttactggtaaacattacgaccttaggttgaagatgtgatttactccactgatatcaacacaacagaaatccagtgaaagtatcactggactggccccaagttctggaaaatcaatgatgcgtgggagaacaaacattttgaggggaagagtatttttttaaaagtaaatatttgtggcactagcaacatgagtgcactcattaagatttcttttaaaggattaccctttagtctctcctacatggaaaactcaagtatactcaagttgtcaattgtataatttgatggaaagttatccctagtattttcccccaaattggattgaattattaatatttcacctttacaaatacatgcagtataattcaatttatataaaatttaaaatatacagaacttacagtgattgcaagtacctaagctggtaataaaggtatcaattaatgaaggaaaatggatatgtcaaaggacaggatagtgactacctctaatatgatcagagagagggttcagatcagggaattttcagaggactgctggggatgctagaaatacaatgtattgacttgggtgaaccttgagataggtgtttatttatagttattcattaaactgttcatacatgtcatatgcacttttcctgtacaaattatatttcacaattttatttaaatagtatgtttcattctgagatgactctccaatctattacatgagacacacttatactcaaaaaggtgttcattctttttctctgaaattcagatttaactgggcatcctgaattttatctggcaattgtaaaccaatcagaatagcatggttagattacaaataatatatatattttaaaagacaggaaaataaaccacagataaaatgcattcttaaaagtcttagtcatttcatttcatattctattaatatgatacatttgtgtttcatggtttctgaccccttgtgtccagcggactataaacataagtatgctacctagacccaaactaatttacttaaaggaaggcaaagaagctgaccattataaatacagcatgccttagaaaggagagtttcaagtcaaaaacaaatctggaaaaaaaattaatttgcttcttttttgtaaagcaatgatgtgtcgtttttatgtgcatttgtttacacagtaaaagaaaagacaatcaaataggtaaaatggatgctgtattgctcccttatacacacaaggaattacacatctgtctaacaatgctaaccactctgagcgataattatggatcaatgctttaaaaaatatcctgaattgcctgcagaaatggcaaggagaatacaattaaattatttgtaaaagccagagtctttttttcctatccatctgctacttgaaatgggatgacctttcaaatagtgcttgctgttctcaatgcaaactctaaataaagaagtggagtgtggctttttttttcctttccaggttcagcatagatacagcatttgtactgacattctacaccactccataagaatgcagatttggcttctagaacataaaagaggcgtttcaggaatataaatcaggcttttgtcccataccttcagtcatgacatttggcttctatcagaaaggtgtgcggcttctgagataagtgtttgagaacaagctacatgaagtaatttactccctggagaaaaattgcaaacctcacccccaaacaaaccgcataaagtaaatgtgttagtgaagaaccttttgttaaactacctatggctggggagctaaatagaaaaggtcagatatttaagctaacaatgggctcaaaacaaaccttccaacaggtctctcaataggcctacattatcaactaacaacttgcactattaagactattaatagtaataagccatgctttcttcactgagtctatatatattttacattgttttattgctcccctaccctttttaatttttaaagcatttccagtttggtcctttgtgtgcttttttaaaaattaggattttggacaaactttcatgtatttttcttaataaaagtgtatcaagcacatttcaaaaagttcaaaaaatacagaaatataaaaaataatctattagcacatcacccagagaaactgacttttaacagtctggtgtttatactcccattcatcttaatacataagcgtatcacaaaattagatgatattatataacaatcaaaactaatcaactgttttatgaacatctttctatgccataagtaacaatctgtatcattatacaaaaattttcattacaccttttaaatgttttatgggtatctctgtgtgtgtatagttgtaaaatataacttttaagtgaatttatttaaatacccaactacttatgagtacatagatttacagctttttccactactgtaaacaaaattgaaatgagcatccatacacacatctttgcagttatttccttagtattactttccagaaatagtatagctggaccagaaagtataaacattattagagccttttggttaatattgtcaatctgccttccagaaagtttactaagcaaggtaggtagatttccctctactgtataatactgagaaatatcaattttttggatacttgtcagtgtgagcaaaaatgtcattattgctctaattattattgctttgataactaatggggctgagagttttactggtgttttataactcttcctttgtgaatcattattcagatacgtttcaaatggtaatttgtaaagtattttgaattttggcccatttttctataagataaaagcattatcgttagtgggtgcagcgcaccagcatggcacatgtatacatatgtaactaacctgcacaatgtgcacatgtaccctaaaacttagagtataataaaaaaaaattaaaaaaaaaagcattatcttaaagtacaacaccattaggatttaagataaatacacacacacacacacacacatacacacatacacacacacaatgagaaaaatcattttaattttaaaaacaatactcagcataacaaattaaacaaaaatgcacacatacgccaggtacagtggttcacacctgtaatcccaacactttgggaggccgaggcaggtggatcatctgaggtcatggagttcaagaccagcctggccaacctggtgaaaaaatacaaaaaaagtagccaggtgtggggtgcatgcctgtaatcccagcttctcaggaggctgaagcaggagaatcgcttgaacccgggaggcagaggttgccatgagccaagatcacgccactgcactccagcctgggcagcagagcgagagtctgtctcaaaaaaaaaaaaaaaatacacaggtatgtatgtatgtggtatataaaataagtcaatacgctatcccagcactatttccaattccattttcccatggcaactaaaaaaaacaaaacaaaaaatagaaacaattacttgtttatccttctacatctttttctagtttcataccagtacatacaaacaggttttgatatagtcattctttgctttctaattccaacggtctcatatcgttccaattagtcaaatgattagatgctgccatatcatggacatgctggacatcacatatagatgtatttagttattattattagttccataatatttcacagtatggttatagtataaatatattcaacaatctcactattcatgtgctgtttttatgttaatgttatttgtcttgatttttttttgccactactaaaaatgcagccatctttaaatatacattttcacatcagagattactgactcccaaaattaaggttgcagagtcaaagagcaagtgtaccattaattttgataaatatatccagatttagcaatatatgaaactcttccatttctaagcacctttaacaagcatggatattatcaatattttccaattttgtcaactacttgactggaaaagtatttatttcattgtgattttaatttgtatttccacaactactagtaaagttgagcagagttgcatgtctcttggtcacttaaattttccctctgtgaattgccaattaatatccctagccatttttctcaaatatggtatataactgtatgtcatcagtgtctaagaattcctatttttctaaaatttatattgtttaatgtacattcatatatttaattcatctgaatttttagatttttattgtaaaaaatagtggtctaacatttacaacttactgatgaaaagccaattttcatagcatcttttattagataaacatacatttcccaactgaactgaaaagacccttttttttttttttttttaagacaggatctccctttgttgtccaggctggagtgcaggggagtgacctcggctcactgcagcctcgacttccctggctctggtgatcctccaacctcagcctccaaagtagctgggactacaggcatgtgccactgtaattgcccagtgggttctccttgcctactgcctagacagagccaatttctcaagacgagggaactgcaatagagaaagagtttaattcacgcagagcaggctgtatgggagacgggagttttattattactcaaatcagtctcccccccaaactcagggatccaaacttttaagaataatgtggtggatagggggtcggaaaggggggagtgctgattggttgggtgggatatgaaatcacagggagtcgaagctgtcctcttttgctgagtcagttcctgggtgggggccacaagaccagatgagtcagtttatccatctaggtggtgccagctgatctatggagtgtagggtctacaaaatagctcaagtactgatcttaggttttccaatagtgatgtttccctgtggagcgatttgggaggtttagaatctcgcagcctccagctgcatgactcctaaaccataatttctaatcttgtagctagtgtgttagtcctataaaggcagtctagtccccagacaggaagggggtttgttttgggaaagggctgttatcatcttttttcaaagttaaactataaactgagttcctcccaaaagttagttcagcctacacccaggaatgaacaaggaaagcttggaggttagaagcaagatggaatcagtaaggtcagatctctttcactgtcataattttctcagttataatttttgccaaggtggtttcgccaccatgccttgctaattttttgtatattttatacagacagggtttcgccatgttgcccaggctggtctctaactcctggggctcaagcactctgcccatcttggcctcccaaaatgctgggattataggcgtgagccactgcatccagctgaaaagacacttttactgaatattaacttcatatatttggatctgtttctcttttttctgtttcatttataaaatgttctcgtggctaacaacataccattttaataacagtaactttatattacattttaatgtttagaagaaaaagtaaaaatgaaacctgttgccattctgataaattatattaacatatctattttataggaatgaatgacattttataataataaaaactattagggaatatgagtatgactcttttgacaggcagttttatctccataacatttttcttttttctatataggccttttttgttaaattgttactaaggattttatattttttgtttccaaagtaatttttttctatttctagataactagttattgaaagtataaagaaaaaatttgatttttatatatttattttgtgatcatccagctaacatgttttcttagtaactgtgtaacagtcataaattctctatgaatataatcatatcacatgacagtgaagagagtatcattttcttcgcttaatttttttgtttgattacaacaagcagaacccataacacagtgctaagtaacagtgctaatagcaaatattcctgtgtattcttcctgatttaatatgagtgacttttatattttactgtttaatgtaatgtttgattataggtctttataaatattccttattgtgtttaacttccttccatgcccattttatttagagtattgctagaaatttctaatacattttatcacatttcttatcagtatgcatactgagttgaatacagtcctccataatttatagtcatgtggaatctcaagtgactttattttgaaactgggtctttgcagatgtaatttgttagattacagtaattagaggtcataagggattagagcggcccctacccaatgactgttgccctcataagaagcaaaaccagagatatagtcagacacgcagagagaataccatgtgataaaggagacagagactggagtaatgtgtctgcatgccaagaaatgccaaggactgttggcagctactaaaaggtaggaaaaggcaagggagggccaccccttagagccttcaaaggcaggatgtccctgctggtaccttgattttgaacctctagctttcaaaactgacagacaataaatgtctgttattttaagccactcattaccaaattaccaaacggtaatttgttatggtggttttaggaaattaacaaagcatatgttgtataatcaaatcatttaatcttttaattaatggtataaagttccaattcagaaccagtttgtaatttttgaaatgaagcctattttaaacattttatcatgttttcataagcagatagatacaagttgctattttttaattatatacttccacatatgaaaatgaaattagcataaaatatctcattagtgttatttatctcaagttttgatataacattttgctagatttgtacagttgagccccattctattttctctatagtcttgaattgtttaagaaccatagggaatatctgttttttaaagctttcgtatgttacaagtatcttttaatcttttaaagtacctgtttttaaatatctagtttacatgtaaaactatctgggcctggtgccttttttctagtggtacatgtttaataattttccactttcttctatgattattggtattaaatgtttttattttgcctatgggaataatataatactgaatgtatatatacttttctaaagaatcatcattttcctagatttgaaagtgaatggctataaaatttttttttaaaaaaaatctagccgtaccagtattgattggcagagttgaccaagggaagctaagagggtacataccatcttcctcccacacgactacatatgcattaaatcagaagacgacagtcttccaagaataaaatgaatcatcaagggaataagagcagttctcatccctagttagaatctctaaacaaaccaaagcaaatgtttttatttgaatcatcaggactgtgtcacaatgaaacctagatggtttgtcttcaagtcatttactactcccctaaagtcttatcaaaagtatgctaaaaaagtttatgacatttccactgagctacaataaagcttctatttttttagatacttgacaaaattttaaaaagaattatttttcccccacacctgcacacattttaaaatatcttcaacttttctacaaaacaattttctctacagctctcccagacttcacaaacatattcttttattcatagcagatggaggaaattagagtaacatatttgctctaaaatcattagtgctgcatcagcacttctgatctaaatgacatttcaaggggttattgttacatagagcaagactttgctccaggcagaaagagacagaaaaacaacttgaaaaatgaacctttttttgcaattagcttctgcatcttaatttgttgaatgccattctatttggattttaaatacaaatcaaaggaagaataaagtgatccaattctgtcagggtcataccttccttactggtcagtcgtctgattaatcattatagctgcttcctaaaaaataatgttgttaaaacttaccatcaactacttgattctctggaaaactaacatattcttacttctcagagatatcttgagaggctgataagtctgctctttagcctcaagaaatgcctaaaattaaactatttaactggtgagcttcacatgactgccactctgtccaagagataaataaacatccctggctgaagaatgaaccaacccataggtgtttctttagcacatactctgttaagtccactgtggaattaaaaaaaaaaaaaaaagtttaaggtactacacacctggaaaatgcaatcttgtaaacataggagaaaccacagagaatgatacaagatagcaacaatcatactttatatttttacactgcattacaattttcaaactactttcatgacacttttcttattttatcctcacagtaaatccataatggaagcaggataaaagaggaaggagacataaacatagaacttcagagatgaaagcaacattaaaggcatcaataaccttctttacagataagaaaatggagaccaaagggaaataagaaccttcaccttgtttcagagtcaggcaagcaaagctaatgaagtgaaggcttgtcaccccaagttgcaaaaagaagtcacaaaaataagacaagaaagagaaagatgatagaaatacaggacactaatttggatttaatgtacttttttaaaaaatagaaaaggaaaagcaattctattgaattcgggtttgaaattcaacgttggtctctagggatcacttggctatggtggttttatgccattaccagatccctttgagaaaaatactattttgaaattcatggtttccagtaaatatgttcaaggctttgaagaacatactcctgtaggtgtaaatggtgtatacacatatacacaaaagcttgaaaacactacttaattactgaacggagtctaaacattctacagctcagttaagaagctacacatgcgtctcacacccaccatctctccagctgtcctccacacaccatcccagcaagtcctagctgaccctcttaatactgtgacctctctgttgtataataaaggttgaaaatcatccttcctttgaataagaatatattataactatattattttttgttacagccttctcaaaaatgtatttcaagccacacataggccattgtcatggcatcttttatttaacagacaatagctattttccatgactcagtccagaatattctttaacatctacatctaggatattatcataattataataagagacggcactacatggatgaagctggaagccatcattctcaggaaactaacacaggaacagaaaaccagacagcgtatgttctcactcataagtgggaattgaacaatgagaacacatggacacagggaggggaacatcacacatcggggcctgttgggggtttggggggcaaggggagggatagcattaggactaatgcatgcggggcttaaaacctagatgacaggttgatgggtgcagcaaaccaccatggcacatgtatacctatgtaacaaacctgcacgttctgcacatgtaacccagaactttaagtaaaaaagaaaagaaaggtgcaaaagtgaaaacattaaaagtggaatcatgattttaaaaaataaattcacagtggtgttgaaagatcatatcagggttagaggacaagtctttgggttagaatgaacacttaatttattatcagagtgaacaataattacctcgacattttaaaacagcattttgtcaccttttaaacgtttgggaacagagaaggcgaaacaccatgtctgacacactatggaaagttttataattctcctcaaaaaggaagaaaaaatatttctatttccattccagatctgcacaatatattcttgcatcccatttggtctgattcatttacattttgctgaattctgtttttgtccattttcatcattcaaaagattttaaaaattcaacaacatcaaaaagccatcaaaagatgctttcagatgaaattgcaaagaaaataagcacatgaattagtgaagcaacttccaagttatacaattgtggcacttacatcttttctcatcttgtccgagaattaattgtactgctgaaattagacatccagcctgctccatgcagacaggagcccaagccggaagaaaactctttgaataacaacactgccttctgattcttttcacatggctacatttttgacatttacttcaatattctacccagttgcagtgtgactatgacaaaatatttctgtaggcatgactggcacctctgcggtaagtggcagggaatggaataggaaacgagtccctttagtagctccaaaaagcccacaggcactctgcaaaccttttgcatacatgctgttaagtaaaggatgtgaaaaatggaaaccgtgatgacaattttaatcaccttacagatgattctatgatctactataactttataatggcaaagccactgacacaggagactgacaggcatatattctctctctgcctctaagtctattaaatgtttatttggggggtttacacatggatagagatgaacttaacagagtatttattgaatctatccacggataaattataaatgactacaactttaactaggtggaattttcatggttatttttaatttctaggcccaaatcacttccctaggctctagaactgtcttccaggagatgtcagatgtcagtaatcagagggaacccatctacagtcaatgcagccaaaagttctgcctacaaggtagcaattagagtccagcagtctcttctggaagtgccaattactgttctgtcttcccttttgaatgcctccttaatataagaataacatatcatttttatcctatcagattagaaaatattgtttaaaataacactcacagttggcaagaatgcagagagagaagcactcccaaacagatgctggtgaggatgtaaattggaatgtcctttctggaaaacagtccagcaaaatttatcatgatgtttttatcttcctgacattagtttgggtatactgttgcatatttttaaatagtcttcaaaagctagagttttaaaactctgtgtggcattttgttacgtgaatacgctatagttttcaattatttccacatttgtcagcattttagttgatttcaacttggggtattataaataatgctccagtgaacatcttcataaatacacatttaactcacattctgtttatttcttagtatagattcaaagtgaaaatacagtggttggcaaggcttatattcaagtataattttatcctagtaattatggaattagtatcagcaaacggattcctaagctagaattcaccatcatttactaggagaaagatctgtggtggtaaaacagactctgcttatttacacagccttactaatgggcaatttgccagaggaatccaaaccagagagcatgtatgattgactaaccattacatggaaagaagaaatcagctcctaccaaaagcacattcatttcaagtaatgccagcaacctgctgagtcagttgtattcagcccctatagaaacccttcccaagttcattgatatgtgacacccatgacatatttttaccatcattggttttcatgaatttgcctgtctttgagacctgaaaaacaatctgatttattgaactgaaaaaggcgaatgtagtgaaaccctatcctgtaattggcaaaccttttacctccctggtggcttgagtagagaagttactggctggaggctgttctaaaggaaaacatgaatggccctaaaattaaaattccagactttaggagccaattaatgaggacataccacttttaatccatcactttgcaatatatttaaaatgttaagactcattgttggcaagggaacagtattccccaaagcttattccatgggaaaatgtttttgtggacaaaagagtttgggaaagagtgatattggaatgaagttcaagctgaacttttaatgtgctattaccaactgtgaatctccatggggggctgtagctagtaacatttgtaaacttcttcaaccacaaattattcctgctttatattgcctttgtttctggcaactgggtttctatagcgcattgcaaggcagagcattctatggaacgtactttagagaatgtttctctaggtcagcagttctcaaacattttggtctcaggatccatttccactcctaaaaactgtggaaggccccaaagagtttgtggttatgttggttatatctatggatatttaccatgttagaaattaaaacagaaaactttcaaaacactatgaatttattttaaaatgacagtaataaccaattacatgtaaatatacatattttcccgaaaaaagagctagtgagaagagtggcattgtctcaacatcacattaatatttagcctaatagaagacaggtggattctcctatctgtttctgcattgtgttgtgatatattattagggttgaagtgtgccaagaaaatctagaaggaatattttaatagccttttcaaataactggattttttctctaatactgcatcaaaacttaacaaatggtagtttctttaaaagttacttgcagagtagaacccgaaaccacatcaagaaatttttagtgctctgttatgtgaaaaatccatggtctgtgtagcattttgaatggatcctttccccatgtgaaattttgtaacagtgcacattgctctggacaaaaatagtggttcattggattatgcagatcttccaaatgttgacacctttcattgcatgatataaaaaagaattatatttgcaatatcatcattgaccttttattagaaaaagtctttaagtattgggaagctgtcaagctcatggtggcatatccaagtttcccaaaatttgaatttttgcttagaagcttgaattttatcactatcaacaaatactggccaacggtttacttaaagcaacagactcactttgtgcattttaaagaaaatatgttaaatacttgagtttgcataattatagtttgtctttcaatgcttctttcatgcagaaaaatagtgttccatataaaaggtagctggttcatttcactacccagtctcacaagtgcttttccttgagacaaccatgatatgtcagtacacagcagcagttctttctgcatacttcccatttcagcacacagaatgctaaaaaaaaaaaaaaaaaaaaactcaacaatcaaaatgcaattaaattaataatttttacttttcaacaaggatattcttagaaaaagttgactttttattttttttaaccatagtgcatggcagtgaaaaatgaaaggccaaaagtacagttcagtgccactgtcttgattcatgctatggtgccagtagttttaaaaaacattacatttggaggagccaagatgtccgaagaggaacagctccggtctacagctcccagagtgagcgacacagaagatgggtgatttctgcatttccatctgaggtacccggttcatctcactagggagtgccagacagtgggcgcaggagagtgggtgcagtgcaccgtgcaccagctgaagcagggcaaggcattgcctcactcgggaagcgcaagggatcagggagttccctttcctgctcaaggaaaggggtgacagacggcacctggaaaatcgggcccctcccacctgaataccacgcttttccgatgggcttaggaaatggcgcaccaggagattatatcccacacctggctcggagggtcctacacccacggagtctcactgattgctagcacagcaatctgagatcaaactgcaaggcggcagcgaggctggggaaggggcgaccgccattgcccaggctcacttaggtaaacaaagcagcctggaagctccaactgggtggagcccatcacagatcaaggaggcctgcctgcctctgtaggctccacctctgggggcagggcacagacaaacaaaaagacagcagtaacctctgcagacttaaatgtccctgactgacagctttgaggagagcagtggttctcccagcatgcagctggagatctgagaatgggcagactgcctcctcaagtgggtccctgacccctgacccccgagcagcctaacagggaggcaccccccagtaggggcagactgacacctcacacggctgggtacttctctgagacaatacttccagaggaactatcagacagcagcattcacagatcacgaaaatccatggttctgcagacaccactgctgatacccacacaaacagggtctggagtggacctctagcaactccaacagacctgcagctgagggtcctgtctgttagaaggaaaactaaaaaacagaaaggacatccacaccaaaaacccatctgtacatcaccatcatcaaagaccaaaagtagataaaaccacaaagatggggaaaaaacaagagcaaaaaaactggaaactctaaaaagcagagcgcctctcctcctccaaaggaacgcagctcctcaccagcaatggaacaaagctggacagagaatgactttgacaagttgagagaagaagtcttcatatgatccaaccactccgagctacaggaggaaattcaaaccaaaggcaaagaagttgaaaactttgaaaaaaatttagacaaatgtataactagaataaccaatacagagaagtgcttaaaggagctgatggagttcaaagccaaggctcgagaactacgtgaagaatgcagaggcctcaggagccaatgtgatcaactggaagaaagggtgtcagtgatggaagatgaaatgaatgaaatgaagtgagaagggaagtttagagaaagaagaataaaaagaaatgaacaaagcctccaagaaatatgggactatgtgaaaagaccaaatctgcatgtttggtgtacctgaaggtgacggggagaatggaaccaagttggaaaacactctgcaggatattatccaggagaacttccacaatctagcaaggcaggccaacattcagattcaggaaatacagagaacgccacaaagatactcctcaagaagagcaactccaagacacataattgtcagattcaccaaagttgaaatgaaggaaaaaatgttaagggcagccagacagaaaggtcgggttacccacaaagggaagcccatcagactaacagctgatctctcggcagaaatactacaagccagaagagactgggggccaatattcaacattcttaaagaaaagaattttcaacccagaatttcatatccagccaaacaaactaagcttcataagtgaaggagaaataaaatcctttacagacaagcaaatgctgagagattttgtcaccaccaggctgccctaaaagagctcctgaaggaagcactgaacatggaaaggaacaaccggtaccagccgctgcaaaatcatgccaaaatgtaaagaccatcgaaactaggaagaaattgcatcaactaacaagcaaaataaccagctaacatcataatgacaggatcaaattcacacataacaatattaactataaatgtaaatggactaaattatccaattaaaagacacagactggcaaactggataaagagtcaagacccatcagtgtgctgtattcaggaaacccatctcacatacagagacacacataggctcaaaataaagggatggaggaagatctaccaagcaaatggaaaacaaaaaaaggcaagggttgcaatcctactctctgataaaacagactttaaaccaacaaagatcaaaagagacaaagaagcccattacataatggtaaagggatcaattcaacaagaagagctaactatcctaaatatatatgcacccaatacaggagcacccagattcataaagcaagtcctgagcgacctacaaagagacttagactcccacacaataataatgggagactttaacaccccactgtcaacattagacagatcaacgagacagaaagttaacaaggatacccaggaattgaactcagctctgcagcaagcggacctaatagacatctacagaactctccaactcaaatcaacagaatatacattcttttcagcaccacaccacacctgttctaaaattgaccacatagttggaagtaaagctctcctcaacaaacgtaaaagaagagaaattataacaaactgtctctcagaccacagtgcaatcaaagtagaactcaggattaagaaactcactcaaaaccgctcaactacatggaaactgaacaacctgttcctgaatgactactgggtacataatgaaatgaaggcagaaataaagatgttctttgaaaccaacgagaacaaagacacaacataccagaatctctgggacacattcaaagcagtgtgtagagggaaatttatagcactaaatgcccacaagagaaagcaggaaagatccaaaattgacaccctaacatcacagttaaaagaactagaaaagcaagagcaaacacattcaaaagctagcagaaggcaagaaataactaaaatcagagcagaactgaaggaaatagagacacaaaaaacccttcaaaaaattaatgaatccaggagctggttttttgaaaggatcaacaaaattgatagaccgctagcaagactaataaagaaaaaaagagagaagaatcaaatagacacaataaaaaatgataaaggggatatcatcactgatcccacagaaatacaaactaccatcagagaatactataaacacctctatgcaaataaactagaaaatctagaagaaatggataaattcctcgacacatacactctcccaagactaaacgaaacgaggaagaagttgaatctctgaatagaccaataacaggatctgaaattgtggcaataatcaatagcttaccaaccaaaaagagtccaggaccagatggattcacagccgaattctaccagaggtacaaggaggaactggtaccattccttctgaaactattccaatcaatagaaaaagagggaatcctccctaactcattttatgaggccagcatcatcctgataccaaagcctggcagagacacaaccaaaaaagagaattttagaccaatatccttgatgaacattgatgcaaaaatcctcaataaaatactggcaaactgaatccagcagcacaacaaaaagcttatccaccatgagcaggtgggcttcatccctgggatgcaaggctggttcaatatacgcaaatcaataaatgtaatccagcatataaacagaaccaaagacaaaaaccatacgattatctcaatagatgcagaaaaggcctttgacaaaattcaacaacccttcatgctaaaaactctcaataaatcaggtattgatgggacatatctcaaaataataagagctatctatgacaaacccacagcaaatatcatactgaatgggcaaaaaccggaagcattccctttgaaaactggcacaagacagggatgccctctctcaccactcctattcaacatagtgttggaagttctggccagggcaattaggcaggaggaggaaataaagggtattcaattaggaaaagaggaagtcaaattgttcctgtttgcagatgacatgattgtatatctagaaaaccccattgcctcagcccaaaatctccttaagctgataagcaacttcagcaaagtctcaggatacaaaatcaatgtacaaaaatcacaagcattcttatacaccaatgacagacaaacagagagccaaatcatgagtgaactcccattcacaactgcttcaaagagaagaaaatacctaggaatccaacttacaagggacgtgaaggacctcttcaaggagaactacaaaccactgctcaatgaaataaaagaggatacaaacaaatggaagaacattccatgctcatgagtaggaagaatcaatagcatgaaaatggccatactgcccaaggtaatttatagattcaatgtcatccccatcaagctaccaatgtctttcttcacggaattggaaaaaactactttaaagttcatatggaaccaaaaaagagcccgcatcgccaagtcaatcctaagccaaaagaacaaagttggaggcatcatgctacctgacttcaaactatactacaaggctacagtaaccaaaacagcatggtactggtaccaaaacagagatatagatcaatggaacagaacagagccctcagaaataatgccgcatatctacaactatctgatctttgacaaacctgacaaaaacaagcaatggggaaaggattccctatttaataaatggtgctgggaaaactggctagccataggtagaaagctgaaactggatccctttcttacaccttatacaaaaatcaattcaagatggattaaagacttaaacattagacctaaaaccataccatatgaggcactattcgcaatagcaaagacttggaaccaaccaaaatgtccaacaatgatagactggattaagaaattgtggcacatatacaccatggaataccatgcagccgtaaaaaaatgatgagttcatgtcctttgtagggacatggatgaaattggaaatcatcattctcagtaaactatcacaaggacaaaaaaccaaacaccacgtgttctcactcatagatgggaattgaacaatgagaacacatggacgcaggaaggggaacatcacactctggggactgttgtggggtggggggaggggggaggggtagccttaggagatatacctaatgctaaatgatgagttaatgggtgcagcacaccagcatggcacatgtatacatatgtaactaacctgcacattgtgctcatgtaccctaaaacttaaagtataataataataaaaaacaaaacaaaacattacatttgcatcattaatgaaaatattaacatagtgaaaaagaaaaagagcaacttagtattacagtaatatagtttcgaccttgcagactccctggaaggatctcagggatcaccaggagtctgtgaagcaccctttgagcattgtggttctagattcaaaatgtggccttggctgagcacggtggctcatgcctgtaatcccagcacttcgggaggccaaggcaggcggatcacctgaggtcaggagttcgagaccaacattgcaaaaccctgtctttactaaaaatacaaacaaattagccaggtgtggtggtgcatgcctgtaatcccagctactcgggaggctgaggcaggagaatcacttgaacccaggaggcagagtttgcagtttagctgagatcacaccgctacactccagcctgggcaacagagtaagactgtctcaataaaacttacacacacacactcacacacacacacatgcaaaaaacccttagtttaaaacacaaacacatcgtacagctgcacaaaaatattttctttctttatatcctttttctataagcttttttatatttttaaatatttgtattatttttttaaacttttttttgttaaaaactaagaaaaacacaaacattaggttaagcctacacccggatggtatcatcaatatcactgcctcccacctccacatctcatccaactggcaggtcttcaggggcagtaacaggcatgaagttcttacctccaatgaaaacaatgccttcttctgaatacctcctggagttcttgcctgagactgttttatagttaactgttctttaataagtagaagtacatgctaaaataatgataaaaagcacagtagatagttcataaaccagtaacagtcatttgttatcattatcaagtattatgtactgtatgtaattgtatgtgctatacagctggcagcacagtagatttgtttacaccagcatcaccacaagcacgtgagtaattcgtgacgctatgatattagcacactacaatgtcactaggcaataggaactttttagctccattataatcttaagggaccaccctcatatctgcagtctgtcattgaccagaccattgttaagtggcacatgactgtatatacaatggaatactattcagcatttagaaagaaggaaatcttgccatctgcaacacgaatgaacctggggaatgttatgctaagttaaataagccaaacatagaaagacaaatactgcatgatctcacttatatgtagaatctaaaaaagttaaattcatagaagcaggtagtagaaggttggttgccaggggctgtggtgtgggagaggaaaaaaatggggaggtgttggtcaaagggtacaaagtttgagttaagcaagataagtaagttttggagatctattatacagcataataactatagttaataataatttatacttgaaaattggtaagaggttagatcttaaattgctaagagagtagcatttaagatctactctcaccacaaaaatttatgagatgatggatatgttaattagcttgatttcatcatttagcaatgtatacatatatcaaaacatcactttttaccctgtaaatatacacaagttttatttgtcaactataccttaataaaggtggggtgaaaatgcatattcctgaaacccatcatgggcctactcaaacagagtatctgaggaggaggcagggctacccgagcagcagcgcaggttgtacactgcacaccttgcacaaaggtatacagttagcgaagatttgagcttgaagtttgccttttaaagaaattgcatatgtgaatcttggttatagtagaactttaagtgttctagagcagttgttcttcaactttatgtgcatcagaattacctgtcttggggttgaaaacacaaatttctttgtgccatgcttgaactacctaattagaaacctgagcatctgtattttcaaggaactacttagccaactctgccacctaccaaaatgtgacagccatttttctagactaaaaatggtatagctgtctacaagaaatcaactcaacaaaagctgaagacaacacacacacggcttaggatactcaggcatcatttggacagagtctattcaacagctataaatttgttgtttaaaatagccaatgttttttaaaatgcaactttccatagttttctgttgttatatttgttttcattctgtcagtatggtattggatctcaaccttgtatgttatttcaccaacatcttgaaatttatttagccatattttcatggttttatatgaatgcttactaaacatagtctgattttttaaaaggttttatcttatgcaagattcttcaagagaaaagacaaacttagtttactgtcaaattaccaaactgactcagatttttaaaaaccattcgaagtttcatgttatgcacttaacataaaaaaatgactcaatgtaaatgtcatgtctcgtaatgatcctattcctgggatctttcacatgaaacagagtgggcaggaacattctatggctgccaaaatggaattaaacacatggaaacaaagaaacaaaagcacaactcaccccttccagacaacaggaaaacatgtagataaatcagtgattttccttccagctaaccaatgaagtagagacatgtattttaacaattgtaagggcactgggcttaaggaaaggcaaagtaaaaactaggttataatgttcttctagatgcgaaaatgccaaatctgccagtcactcatgaaaagaacacagccccaggcaactgatattgatacattcaaagattatagttatgtatgattacagaatagcatttcataaactctatcagacagaacaactctttaatggaatgttaagagttgggagagagagaaaagttggtcattctaaggtccaattaatttgaaaactcatgagttatatagaattaaacaaatttttttgactgtggaacttctcagagcccttctgtactaatgtgcattacacctctccaagaagaaaaaagcatgcagcatttttcaaacttttgatactttgatgcttttttatttagcttctgactgggctagagttctctgggacacacccagggaaatattgatacagacaggtcaaacaattaaggcaaatgctcaggcatatacctgaactgtggtagaacaatctagatgccacagaaatggtgaaggcatgcccaacagccagccccactatatcaagtcccttagcctctctccattggccttagctctgaaagaaagatgatgcttattagtaaagtgccttgggatggttgggcaagaaacactaaataagaacaaattattaccctcattacagggtagatgatctaataaaccatctctattacttacaaagtttggaggcctgctatttttttccttttaactacactccaatttgaccttaaaaatctatgctaaaaataacttataggaaatatcccaaaaccataccataaactttcttatcggacctctgtctgtttgcacattctcaatgactgccaatcacctacaggtaaatgcaaatttcttagcctgctgtataactctccatctttcaggagctgtagagtttatgattaagatcatggtctttgtagggagacagacaaggttcacatgcaggctccactctactacatctgaagttatttctcttctctaagccctagattatcaaagtatggtccatgaactggcagcgtcagcagcatttggggcttcctagaagggcagaaattcaggctccattgaaaacctactgaatcagaatctacatttcaacaagagcctcacactgtagtttgagaagaactacacaaattctcatacgctttgaccagctcctctgcaaattggaggtaataatagtaaacttggagatggcattcatcgtctactcctttgaatccatcctcaagtcctaaggtccacgcaaatatccttacctgtctctttcccttcattaccttagtccaagctgttctcatttctctccagatctcctgcaatggccactcaactcattacaatgcatctcctcttgcttccttctattctgtttcacttactgcaaccagagagatctcccaggaaaagcaaatgtgatcagagcttccatgagctctcaaaataaaggccaaaagcctttcacagaactacaacctctgttgagggggtcgcttcccacctctatatcttatcttgcatgatgctccacctggtttcctctgctccagaagcactggtaaattcttttttccactccttgaactagccatcctccttcccgatacagaatatttgcaaaaccatcctcctggtcatcagtgccttcccctcaactctttacctggttaactccttctcaatctttagatgtcagctcaaatgtcatctcccctgaaagctttccctgaacctcctacccagcagccaaacacactgcctgacctgttgcctgtgccccataaatatttgttgaataaatgaaggaattaatgaatgttcattcatatggttattgtgacaatcaaatggattgaaacctgtaaatcatttagcacagtgcctggtagagagcaagagcttacttaatgcagtaccaatggtaatatattttgaatattagtcttgctaaaaactagaccccaagcagtacttaacaggggctaacaattagaatcacctgggaaatgttacacttctcaatgtccaggctctgctgcagaccaattaagtcagaatctctaggtggtgggacccatgcacctgaggattttaaaactctacaggagattctaacgtacagccaaagtgtgactgctttactcgttgtctcactgtggtctcccagccttccagagaatagcatactgggcgtcaagaagagtcctcattaatcatggcatgagtctgtggcccacagaaaggggcagtaatatgaatacatgtagtaaaaatctagcaattcatttcccctggctccttgacagcagccagatggtggaaactctccatctattacccaagccagaagaaaacctttctgggaaaatccaagttgcctgaactactgttgggaggaagtatggtaacacgtgaagatgactctggtcctttgggttaagtgatgacttaacaaaattcatcaggattccattataaatctgtcataattgttttgttgaagcaattgctttgtgggagcaattaattcctactgctaaaaaaaaaggtgagaactcctgagtgttccatcaggcaccaagaaataggtgagccgggaagcatttgcccttaccttctgtcttcttcactactcaagtatttggagtgtcaagagaccacactgtacttcaaaggcctcctcttccaaataaccaaccttctgctatgtaaaaacatgattaagaacacacatatttgtactgtatgtctcactcattttgaacttttcaaaatgtgatattgccaaagaagctttatctcttttaagggtttcacacacacacacatacactgccttggtttgaaaaacaacatagaatgcaggcctcatacaatttgagaaccatttacaattataacctaccaagtcagagctgataccaagccaacacaaaggcctcagaattgttataaaaggaacagaattgctctctggaaataatatcccagtgggctaaattccccctccccctgttcctccaaggtggtaaattgcaacaacaacaaaaaagcatgattcatgaatataaatttttcttggcttttaaaatcatacactggcatagtcctccccgaacttcagccaaatgagaatacacagataatgacaattttacaataagtggttccaggacacaggcttttcaagatccacaaatgaaaggcactataaaaaagagtattattattattattatttcaagcacccagaaaaaccacaatcaatgattagccataacaattaaactaacaatagtacatctggaatcagctccatggtaatatgtacttcatgcttaatagttcaaattaattcaatctgatggtgttagacataccagttaggagctggagagcaccaaaattcacattagcttccacttcaaaagatattatgaaaagagaaggaaggaaatgaggctataaacagcagtggtaaatacgaaaggctcagagatgatatggtcaggaataactctcagctattaggaattcagtgatgaaaatatgaaggctgatatttctatccttgcacattcctccagagtcaatgactgagccacccatctgagcgacagaactgaaaccctaaaatcagggcaattatattcaaagaagagggggccttcttcattctgcttacagcatcctttactagtagcccatttatattgcagaatgcatggagaatttctcattttcaggttatagacttcaagtaataagaaaagagagcaggagttggggcaggcataaaaggtgaggtagttattgcctgattaccttatttgtctcactcctccttgaagattcactagataactgtcttaagctgcactataaatattctctaaggcaggatttctcaaccttggcactgtagacactttggcctaggtcattctttgctgtgaagtgctatcctgtgcactgtaggatgtttagaaacatccctagtctccaccttgtagatgctagtagcatcccccacccccagttgtgacaacaaaatgtcttcagacatggccgtatgtcctcttgggggaaaaatcatactggttgaaaactgttaccttaaatcttttttttttttttttttttttttagatggagtcttgctctgttgaccaggctggaatgcagtggaatgcagtggcgcgatctcggctcattgccacctctgcttccaggattcaaatgattctcctgcctcagcctcccaagtaactgagattacaggcaggagccgccacatccagcgaattttttgtagttttagtagagactgggtttcaccacattggcgctggtctcgaactcctgacctcaagtgatttgcccgcctcggcctcccaaagtgctgggattacaggcatgaaccaccgttcctggcctactttaagtcttaattcacttgtttctgggcatcgggaggaaaatccagagggcagactcccctctagactcttcttcctcagagatgagcatggattgtattgccagctgtgtgcaaggcagcactcttcccacggcatgctgaatcctcctcctaacaccttttgcacatataggcttgttgcatataatacagaaatttggaacctggcagtcttctattcattgtgcagaaaagagttaacacagagcaggctcgagaaggcctatccttagaaggcctgtttgcaatgttggcctttggttagcagctgggaattggagctggtaaacagttccctacactaatatgacatttttcctaaattatagagtggccactatgcctcacctgtttgtacaaacagtgtggtttatgctgaacacctgctttccttctgggagtctggaatttgggtatgtgctaggcagatcagctcccagcagtagccttgggcactgagtctctaatgagtgccctagtaggcaacacttcaaacttgttgtcgcagcttgttgcttaaggaactaagagcatcctgtgtgactgcattggaagaggactcttggacgcttactcctgatttctccagactgcacaccatgcaccttttccctatgttgattttactttgtgttctttcactgtagcaaatcagaaccagaagataacaatgctgagtcctaggagtcctcctagagatttacagaaccttgcaagtggtcttggggaccaccaatgcagggactcattcagcattctatttgtgtgcctctatttctagatacagcaaagacttaaactccaagtcctcacagaatttatgtggtagcagcgagcaaagcattaattctagcatatttcaagcttctttcatagaaaacaagccctgtggcatctcttttttgtttttataacagctttttagagatataattcacatatcatactgttaatcaatctaatgtgtacaattcaagatttatattcatagagtcgtgcaaccacgaccacaatcaattttaggacattttcatcaccccacaaagaaaccctatatccatttacagtcactacccattttctcccaaccacccagctaggcaaccactagagtttctgccgctatggatttacctatttttgacacttcacaattggtcatatgatatgtggtcttttgtgagtggcttctttcacttaccaaaatgttttcaaggttcctccatgatgtaacatgtatcagcactacatttatttttattgctgaataatatttcattgcatggatataccacatttcatttatccattcatcagtaaatggaactttgtattgtttctactttttggctactatgaatagtgctactatgaacatttgcatacaatttttttatgcacatatgatttcattccccttgaatagctacctaagtgtggaatttctgggtcatacatatgtttaacttttaggacattttcaaactgttttccaaagtagctgcaccatttacttaccaatggcagtgtaacagagttctaatttctccacatccttgctaatagttactattaactgtctgttttttttttttgttttttttttttttgagacagcctgtcacccaggctggagtgcagtgatgcaatcttgactcactgcaaccaccacctcccaggttcaagcagttctgctgccttagcctcatgagtagctgggattacaggcacgccccaccatgcctggctaatttttgtcattttagttgagatggggtttcaccatgttggccaggctggtctcaaactcctggcctcaagtgatcttcccgcctcagcctcccaaagtgctgggattacaggcatgagccaacgcgcccaaacttatctgtctttttgctaataaccgtcttagtgggtgtgatgtggtatctcgtaatggttttgatttgcacttccctgatggctaatgatgttgagcatcttttcatgggcttattagccatttgcatatcttctttggagaaatgtctattcagacctatttgccccattttaactgggctatttgtctttttattattgatttgtaagaattctttttatattcatattctatctccaagtttcttatcagatatatgatttgcaaaacacttcttccattttgtgggttagttttattatttcaatcatgtcctttaaagcataaaagttttaatttttaggatgtccaatttatccatttttttcttgcattactgtgcttttggcaccgtagctaagaaaccattgcctaacacaaggtcatgaagatttatccctatggttttgtctaataatgttatagttttagcttttccatttaggactttgatactttaaggtaatttttgtatacagtgtgaggtagggggtccaactttattcttttgtgtgtggatatccagttgtctatggcatcttttgcatcactccaagacatagtttcaggtaatttttgtctatacaaattaaggtaacaggtaccaaaacacagaacctatgtatgtgacaaactgcctgaaagcctttataaaaacttttgcaattggtgttctttttttctattttcagaatatgctcagtattttgctatatcaggaagcagtaccaccattattaccactggtgctactgctgctaataataatagtaactagcagatattttgtacttagtatgtgccagacactacacttgcatttaacattcattaacttttaagcactacacatgctttaacttacatgatcttcctgccaacaccacgagataggtagaatcattatcttcattttacagatgatgatattaaggctcactgatgtaaaaaaattttccttaggtcatagaacaagcaggaaaaccgatttaaaaaaattgagggaaggaatggcactggaaagtggaggtcaagtaatgtcggatagcaaattctaacaaacagtagctaagcacgtatgcgaaatatacaaaaataaacaagccaaaatctagcactggtagatgacattcccagttctgatcaagttgctgacaacaaaggattggtctccccttctaactcaacaaagggtaggaaatcttatcactcaagatatcaatcaagatttatttgatcgctgaaagggttttgtcaacactccaaaaattgtattagtgactagatgattgatggaataagtcaattagaaccagattagaaatcgagatatgaagtcaattacttccaatctgaaaattaggaatcattaaacaataatataatagatggcatcaattttcaaaactacccttcgtgtgtttgtctatagggcaaaattcaagtaaaaaataactttgaaaagactaaaactatagagcaacttgatcttgggagtgttttcccagatgggtagtgggctgagtctggtcagttttcagtggagaaaatgtagacgagataagcagttgatgttcccaaattcaaataactttatggcagaaaagtcagtcaagtttaattctctttccctatactagctgtgtccttaatgataaatacaataataatagctgacatgtattgagtcttacattatatagctctctaggtacctaaaagatgacaactaatttatttaaaccaaggcatatgaagtaagtactattattattcccattttatataagaggaaaaggatgtgtaaagtgctaattgacctgcttaagaggtagagtgagaccttgaaccctgtagtctatgtttgtcctcctaatagtgtctctatatggtttcagaatagaagcaaatagacacataagggttaagcatggctaacctaactccaagttgagtctttttacactaggcaatgctgtcttcaatatatttataataactttatacaccaaataacattttgaagtttatttcctcccaatacagaaacatcactgcatttccactgggattttcagtactgtctgttgtggaactgatctgggcttagtgagtattgctttatcattcttaaataaaaaccattatagagaatgcagaaaacaatttccctttcagtttgcccacttctacccataccgagaaagacggatccttaaagctcagaatgtaataaaagctcacaatataataaaagctcagtatcagaaatgttccaagtccctccactctttctctatagttaggaaactaaaatttaatatagggcacaacgctccagagaattcagtgtatcgaaatgttaatacacttttatatattttaactgagataaacaagaaagagatagggaagccagagcagctatggcaaagacataattatgataagactaatccagctaacagcaatagaagcagatagtgactccactgtgatgctgtggtagagtttgtatggtcagaaaactatatcagtatacaatgttaatgacgcaggagccccattataggaaagcaaagataacttactatgtgactctataaagtaaagttcatccaaaagatcaaagagcatttgtcctattactaaaatattatccaaatgtattttatcaattaaaacttggataaaatcatttgcttcattgaacagtaatttaaaaggagcataggctgggcactgtggctcacgcctgtgatcccagcactttcggaggccgaggcgggcggatcacaaggtcaggagatagagaccatcctggctaacatggtgaaaccccatctctactaaaaaatacaaaaaattagctgggcatggtggcgggtgcctgcggtcccagctaatcgggaggctgaggcaggagaatggcgtgaacccgggaggcagagcttgcagtgagccgagatcacgccaccgcactccagcctgggcgacagggcgagactccgtctcaaaaataaataaataaaataaaaggagcatagtatgtccataaccaaataggaaggaaaatgcctattttgattttcataacagagcttaaacattgtggcaaaactttaaaatgcaggacataatgtaaaaattcttctaccagctctaaattcgtggttgtgctatcaactatgtcacatttctcagtgttgaccacaaaaataccatgagatacatacacattgctgaaatacactatttctcaaactcaactttatcttctactccaataaccctgtcaaaaggaaaactagtctggttacttcatttctggcagatccacattaactcctttcttttaatgctcattaatctttctgttaacaatacttctgaccctcaatacccaccctttcagacaggtcaaaactaaattcttcagtttaccatttaagcctttccttcaagtttttgcaggtaaaatgagataaaaacagacgtttgtattccagccagattgaaattttctactaccctctttgctcttcccattaaattctacctcgcagtttgtttgtttttgttttattttgttttgcgtcgtttttttaaaaaaaattgtttattgtttatttactaaatctggggcatattagatacttgaccaatttaaaatttacatcttttaaatcaattttgaagtgttttcacacacacatacacacacacacacacacacacacacaattggcatgcaacagttgtcctaaggtgaaacaatcacctcatcaacaaagtgtcataggtgttctcacccaaggttgcttatcctaaacctgaaaacctgtaacaaatttaaattacttatataaaactcattacttgtagttttccccttgcaaagatctccagaaatgtacaaataactaatatacatcagtcacaacataatcctggatcatccccacatcaaaaccagatgctcctttaattttaaactcattatcagagagcaagagaaagtcatttcgttttacacaaaacaaaattcacatatgccaaaaaagaaagacccaagagaaacaaaaacaaaaaccctagtgctgacactgatgttcagtgccctggttaaacagtggcccgaaggccacggatcaaaaataaaatagcggctgtatatcactgcaatgaagtttaacaggctttaaccttctggcttcagaaatccagatttttccaattacatgaatgcatacttcctacattccaagagtggagaaagtggatgcgccagtgtggaaatgaaaagagccaccattcactgggacaaccacagaactggctttaacagagactccttagaaagttacgcaaaaaataaagacaaaaaatggttgtatgcggcttgtgtcatcaattttaagtggaggtgactgagtcctaaggtacaatgtaaaatgtatgggggaaaataggtgctggggcaagtcttacctttaaaagcaaaacttgaaaacaaagtataaaagtgcccagcctggcagcatacacccaagccagagagctctgccatgagcatgcatagaaaatgtcaggattcatactattgtttctcataaggactcaacaaaatgaatccttaatagcttaaaccacagaatgagggaatacacagaatgcagtcatttcagtaaagtactatcaggctttgtgctgatttcctgaactaactgcattttattatcaaaacaaaaggaaaagaagattttaaaaatatatatatatatatattcctatatttcaattccagtgtttaatttctggaaggacctatataatggaggcagcatttaattaggaaattatgccaatcaattgtcaaattttcactatgactttcctaaaaaggtgttttcttccaatttctattaatcacaaagaaacataagctgtgactgtatagttcagaaaattaaaacatagaaattaatggcctatgacgttatcaccaaggtgtttggtaaacagtaaactatgagtttggaatcatcaggaagaggcttttgaaacaaccctctggacttcaaaaaatctcttcaggtagtagatgtgtcccaatgtcatggcaattagaacaagagcttcaaagaagcaccgaaggaccactgggctgtttgtgttgtcactaatggctctgtgtatcctctcccagattttcgtgtattcctctttgtgctgtacagctgtcatggccacagccagctcactgatcatttcttctagtttgttctggtgagcttctgtttccatgtcttctctttttgtagcctccccaatatcaatggtgaatatcactatctttggagtcatggtggacactcggtcactaaaacaaaatgtatttgttccatccatgtgagcagaaaatgtgtatttcccactggattctttgtctcctttataaatccttttattcttaggtcctgtaatctccatgttgatgcccaggaagccaccttcgaagatgaggcccatcttggtgcctgaggtgactcacttaagcattcttcagcatgtgcgtggatgctgatgaaatagcccaagaccatggtcaggagagtgttctggagcaacagcagctcagcgagcgtcaccacagtggggctggagcagaggccaggactcgcactgcggcctccagagccactgccgccatcaccaccctactgccttcgcctacctggcactttttgctaatcctaggaaaaacgcaaactcaaatgccttttgtgctgggaggtactgtaaataaatgaacagagaagtctagtgttaagaaaaataagacaggccaagtgcagtggctcacgcctgtaatcctagcactttgggaggctgaggcaggtggatcacgaggtcaggagatagagaccatccaggctaacacagtgaaacccagtctctaataaaaatacaaaaaaaaaaaaaaaaaaaaattagcccagcgtggtggcacgcgcccgtaatcccagctacttgcgaggctgaggcaggagaattgcttgaacttggcaggcgaaggttgcagtgagccagggtctcgccactacactccagcctgggtgatagagcgagactctgtctcaaaaataaataaataaataaaaataaaaaataaaaataagacagcagtacgttactggccgaacatatctgagtcatgcgtcatcaaagaatgttaccagcagtgaatctgtatgggtctgcagcaacctcagttcttacctcttcagaagaaagagttcaaccaaggggcataaggcagaaggagacaccaaagcaagttttagagcaggagtgaaagtttattagaaagctttagagctggaatgaaaggaagtaaagtacacttggaggagggccaagtgagtgacttgagagatcgagtgcatggtttgaccttttgacttggggtttcatatattggcatacttccagggtcttgcctcccttctcccctgagtcttcccatggagtgggctgttcacgtgctgggtggcctgcatgcacagtgtgtttactgcagtggtatgcatacccacttgaggcatgcttcccttacctatcaagcgtccctataaggtcatacaccagttaaactccaccattttgcctcttagtgcacatacttgatcccacgcacccacctcctgagatcttattaggaagctgctgatcaccggttttaggtttcttctgtctgttgggagactattgttccctggtgccagctgcaaccaattattatttgagagaaccatcttaacaactgcctgaccatcacctgatggtcgcctgacattcctggtgggatgtggggtgtccctttactgccccaactcatatctgactagctgactagctacctactgtaacaattacacttgattgcatttttttgttgttatttaatttttatttcataatcataaacttaactctgcaatccagctagggaacaaggaaaacatggaacccaaagggaattgcagcgacaatacaaagattctaggatactgcgagcaaatggggtggaggggtagtctcctgagctacagaaggaatggtctggtggttaagagaaaacacaagtcaaacttagtagagctgtccacagtcagcaatggtgatcttcttgctggccttatcattcctggacccaaagtgttccatggcctccatgatattcatgccttcaccatgccaaagaccacatgcttgccatccaaccactgagtcttggcagggcacatgaaaaactgggaaccatttgtgttgggtccagcatttgccatgggcaagatgccagtacctctatgcttcaggatgaagttctcctcatcaaatttctacctgtagatggacttgccaccagtgccatatggcatgtgaagtcaccaccctgacatataaaccctgtaataattctgtgaaagcaggaaccctcacacccaaatcctttctttccagcgctcagagcacgaaagttttctgctgtctttggaacctcgtctgcaaacagctcgaaggagacgcggcccaagggctccgtgtcaatggcaatgtggaagtacacggtggggttgaccatggctgatagtagggtgctcccggcagtggcagcgtctgcaaagactgcttttttttttttttttttttttgacaaagtctcgctctgtcacccaggctggagtgcagcggcacaatctcggctcactgcaatctccaccttccgggttcaagtgattctcctgcctcagtctccggagtagctgggactacagatgcgagctaccacacctggctaatttcttttgtatttttagtagaggcggggttttgccatgttggccaggtctcaaactcctgacctcaggtgatcggcccacctcggcatcccaaagtgctgggattacaggcgtgagccaccacgcctggcctgattgcatatgaaatgcactatttccccatcctatctcacccccatctttttttaacaaagacttctgaaaatgtatttttcatctttcaaactttgctggacaagtttttatgaatagtctcaacagtgcaagcatgatgctagagagcaattaacctttgacttcagtgttgggagactgcagggagaggtgaagactgcgacaaaccactcgtgtatcatggcaatcgctactccctctcagccatttcttgccaactaggaattcaggcagaatgttgtcagatctttcagttattacagaaaagtaagaaaacctgcattttatgtgaaacttccagattttctagtattttctaatttttgcttgaaatcttttattgttccaatatattttatttctatattcctgtgtagcacacatctggttttttatttgtgtggtttttgttttgttttgttttgttttgtttttaggccagtgagctgacagatcgagacctctgggttatgtcattccttggtcagtagctttcagtctttttcaccactacacccacctcaaccaaccatcctttccaccaaccgatgcccatcacttcctttcagatgttgctgaagaaactatttctccatataattttccctagatcactctatccttcattcctcattaccaaactgttttactcttttagcctttagtatgtatgctctgtggtccattggtgagccctttatctttctctaattacacctggactatagatttctaatgccgaggacccttggtctcctgccacattcacattcccttagcagaatgttgcacacccagcagacagtacatgtatactgtgagtaaatattttgtattcctagtcttgctaggatagaagtttttattctatacttgatgcatttctggatcaaaatattaagtctaagtcaagtctccatagttaaggtaatcttgaggattaaaacacttaggtggacaggcaacataaaacactttatctgaataatgaaagaagaatccgtctgttggtctgaagtatcaaagcaactgtcccaatcctacaaactttcagcattgggacttcctttcaagatgtaagcagggatggaaaatatacaatgcaagcgccattgtttcactctcctgggcctgtgacagacatcattaagtgatcacaacgttcttttcttctaaggctgaatgcagtcttagaaaccattttaacatggtatcctagatgtatcgtgtccatcttgtttatttctattaagaaatagagttggcatgagagctgaagatcctatcatatgaaggtacacatacaatttattattcaaaagccagagaacaacatacaactgctgctgcatctcagtctctctatattttaatttatttattgttttgagacagggtcttgctttgtgcaggagtgcaggctggagtgcagtgataccaacacagcttactgcaacctttgccacccaggctcagaaggtcctcccacctcagcccccaagaagctgggaccacaggcatggcaccaccggcatcccgccatgttaccaaggtctcaaacttctgagctcaagcaatccactcatcttggcctcccaaagtcctgggattacaggggtgagccatcccacctggcctcaatctctgtatattttagaggatagataacttcgaatgggaaaagttgtctctaaagttgaccagtcaagaagaaacaatgcttccactttaatgcctatgccagacttaccttacccattaacttttaatcctgtaagaaagatttgctatgtgatgaggctgcttttgttgcaccttgtaaaacatactgaaataaacaaactgtaaatgactttgcagggattgctgatttaaataaataaattgttataattgtagttacagttatagtcaaggggctatttcatttctcagactctgaaccaaagcaattaggaacaactcagacacaaaatgaccagcatcaagaattacaatgaaaagccaattacctttaactataagaaaccttatttgcatttattaaaacaaatgatctctcagtactggagaaaattatgtggattggttgattaacccttcacttgtaagagaccagaaattacttttcagagagcctgtatcttttctaaatttacagacaggaaaccagtaaatgataaatgatcaaggcccaaggaaaaaactgcatagcacaatggacatctatgagtttcacttgtgctagcatgcattcctcattgtgctggtaccatcatcctcactttcctctggggaatccccttctccagttctgactccagatggtgtagatggagctaacttcactccccactgagaatgagcaaatgaccaatcaatgtatttcaccgatgaatgattcagggagccaatcattaattcgagtcagtccagtactactcaatgctaagatttgagaactactgaaggaactattgtgaaagggaagaatttaaaaaaaatcttgctggcattctgagctggtaagataaaaactttgagcgtctagcggccatctaaccactacaaagtgagaccatgcctatgcgtgagaccaacccaatggaaagaaaactaagagatgatagagacatatttctgatgccatctttgagaagctgcatccaatcattctggaggcaaaaagctcttaactttatagataggcaagccaaaatcttcttactttcattaagccacagttagagctaggtttctgtcatttgtaaataaagaagttaagactaaatgcaaatcacttatagcttattttattactaggtactcaatgtctatgcttttgcatagctaagtgagagaacttaaattccaatactgatgggctattacctcatgcaggtaccctaataaatcttgtttcctctcagtgccattgtttcctcatttctaaaatggagattaaaatggtagctcacaaagaagaaatacaaatggcctataatcacatgaaaaaactgttgaacatcattagtcaagaaggaaatgcaaatcagctctacaatgataccacttcacactcactagaatggctatgatcaaaaagatagacaataacaagtgttttctaggctgtggagaaatttgaagtctcatattggcaagtgggattataaaatggtgcttcaaaaagcatctggcagttccttaaaaagttaaacatagagttaccgtgtgacccagcaagtctactcctaggtatatacctctgaggaaataaatatacaagtacacacacacatacaaattaaaaagtccataaccacattattcttaacagccaaaatgtgggaaaaaaaaccttaaatttccatttactaatgaatggataaacaaaatgtgtcatatccacacaatgggcattatttggcaataaaaagaaatgaagttctgttacatctcacaacatggatgagccttgaaaacattatgctatgtgagaaaagctagtcacaaagaccacatatcatatgattccatttatgtgaaatgtccagaataggtaaattcacagagatagcaagtagattggcagtcaccaggacataggaggagaggaaggacagtgactgttaatggctaggggtttcttttcagagtgatgaaaatgttctagaattagatagtggtaatggctactcaactttgtatttatactaaaaccaccaagtttcacattataaacggataaacattgtgctatgtgaattatttcaataagaaaaatatcttatagaaaaaaaatggtagcctattctgattctcacaaatgaccattataagaaatccatgatgataacaatattaaagtgacgttcttgttggagcctaaggaaaaacaatccatacaaatgcaaaggcctattgtttttaaggcctcagcaagtgctaagagaatgggaaaagaaaattaccaaatagattttcccagatcacttagcttcctttgtatccagcaatggtcaacaaatatatagcaggcatacataaaagctattcggagatctcttgaggttaacagcatgcaacatattgccactgcccccagcctggccaggaatattatttatgccaccctttcacagctgtatcaatctcccatgaaacattcagagcctccttgttaataaactacattatgagccggatgcattgtctggataaactgcattgtccaaaacactgccccattattacagaaaatgcagaatgtaattagtattcttctttgcataaactgcagcttccaaaaatggtgccatattataaagccttaattaataaacaagagttgggccatgaccagttacacttatctgaattttatattgtgaagaaaggccactgttcaaattccgtttacaaatatctaaattctggctagcctacatgaagatagtctaaacagaaagcctgagaattctgtgttgctaatagcattgtgttggtacaccaacaatagcaagccattaactgctgggacataaaccatcctgagaaatgttcagagtggaaggatgataacattgtatttcagctgcatcgtatggtgcaattcttctatttgttcatatgcatttcccatttaatagatggaggaaccagggtggcttttcatatctctgtgaaaccttaaatgtgggggagaaaagtgagctggcaaaaaaacaaaaaggataagtacgaggtattgtggggtgggagcagggttacatcacaatggaatgtaagtacacagttgctttctccatttccagctggtttttattgattttcccctaacctaaccccaaagcaaggccatttacataagtcatgagcattgaactaatatttgggaccataatattaagcagcccattttatgaacctcggctaaaggagcatttgcattaaactgcactcacctgattaaaatccatcaactctagcaccttgagaattgtagagtacctgttaagctcggctgtgggactctgcatactgaggcagaccataatcagaaggcagcaaggaatccgaccgggagaggaaagggaggaggagaacatgtgatgtgtgttgaaaagcagatcgcatgaaagaccgccagtgctcaaatctgaaaagagtcctaagcctactgcaaacacagagctgtgcgaacatgataattctttcagcaaagtccataatatggcttatagggccctgtgaaaacaaggtggatgagatagtattacagttcagtgaagagtaactggcccagcaatggaatgtagcatacacaggaggccccaaaatggtccctgcctcagcagaatgagcaagagctcagagagtccaagccgagggactttctgcagcctaaacaagccgtcttagatcactgccctttccatcagctccaggtaccaagcacaggctcagagtcctatctgtctcagaaggacctgctttaccgtgaccgcaaggatggcatttgaatcagtaataggctgtcagaggccaccttgatgcatttgaagaagagctatccctgagacattggttcaagttctcgatctgtaccacctagctgtgtggtcacggacaagcagtcttgctcatctgaccaagtggatgcagataataaacacatgtgaaatgaatgaatgagagaataagacctctgaagcagaatttctctccccagtgatacagacagaagacaaggaaatactgggtagaagagggaggttccctggcaaaggccccaacctcaagcctggagacctgcggcccctaagtggggcatttctgtttttgtacccaaacggttgccttttggcatgccacactcccttatcctgtacccatataaatcccggaccccaggctccaggagcagacaaggagaagaggagaaaagcagacaaatgacacaacagagaaagagagaggagaaggaatgtctgaacgccgagaggaactcagctgggggcagtcggagaagagtttggccgctgaacagccaaaactccaggggaagatcatcttcccattccatcccccagccagctccccatccatcccattgagagccacctccaccactgaataaaacccctgcatgcatccttcaagcctgtgtgtgacccaattcttctaggatgctggacaagagcttgggatacagaaagctgtcacactggccctctgcccttgcagaaaggcagagggagcactgagctggttaacacttaagctatctgtgaatggcagagctaaaagagcattgtaacactggggccacaggcacccacccctagacactaccatgggactggagcccaaagcactcactcttgctcctgcacctggccatctgtgtgctccctctcccacaaggggtttgagttcatggtggttgaacagagagccgcacccctgtcgcatgccccatgagtggggccagggaactcttctgtttcatcaacactattgacatttgaggtgggatgattctttactggggaggctgtcctgtgcattgcaggatgttcatccctggcctctacctacaagatggtagtagcacacatactccctcaattataacaaccaaaaagtctccagacattgccatatgtctctcaagagccaaaattattcccagttgagaatctctaatttatccttcagaatgtacattccaggatctaaattaatgagccatacacccagatagtgccccctaattattaggaaaacttacatagataccttcattatcactggaaattcatcaagacaaaaattttactgagcacctattatctgccatgtagaaagatactgttcctgctcctgagaagctcacaagtttaagtggaaagtggcattttacaacttcacatcaaagaaaagagaaatgttcaggtaaccatctttccaataaataatagaatatccttctatctgattagagaggtgaactgtaaagacaggcaagaatcagagcatatctctttgctattaaaagaatactacatgtatcaaagttgctgacatttgataaggtgaatttttggtaattttgactcattttagatgtttgctgcagttgtttattgctgggtgcagggagtctcagactcaaaggacaatcttatgaggtggtttagcctaagagcataagccaaaagagagagctctggaatgaaactgcctggttttaaatctagattctgccatttgcttgttacgtgacccctggcaattcattaaccccttcaatcctcaaatccttctctatgaaaaggagataatcaatgtacctacctcacggatttgttaaaagggttaaataacttatgtaaagtgctgaacacaatgcctcccacaaagcaaaaattgtaagaacaatagctgttagcattgttatattgatattgctgcctctccattttattatgatcttttttattgtagtaaaatacatgtaatataaaatgtgccatttcaatcatctttaagtctacagttcagtggcattaggtacattcatattattttgcaaccattaccatcatccatctctagaacatcttttattttccccagttgaaatttcccattcctccctccaccagggttgttctcttaaaccagtccttacccagcaaaataccttctaaggaaatgaggacaaagcttttgtaaatgagactaaaggcaattcaaactcaggtaccctggaaactgaatagaggtagtgcttaaaatggccatttgggccacttggggttatgttgatgagtttagtcaccatgaaccaactcctaggagtaacattctaagtgggtttttgttttgttttgttttttgttttgaggcaaatggttcctggctctgtggccttcccatcttaccatcacagaagcattcactctactcctctaatcaatattaacccagaaaaaaagtccagggacatatatattttggtagcctagaattaatgggaaaagacaagttgctgggtctaaactatcaaagtcacgtactttttaacagagaatgaacaaacctcctcccttcaagaatccacctgtttttgcaagagcattctggggtgggaggaaaaccttctgatttctagccagctcctcaaaatagctaaagagttcctaatttcacctcaaacctctgtttcagcacctactgtgttgtgccaagttatttctcatccactatcatttttgacagtggatctgaccctattgcaatcgagtttaaggagtttgtagacaggaaccctatctgagctgtcagcacgttgcctgatcatcttcagcaagtggtctggcagaagcatgcaggtaaggatgccctgaagcaggctgtcaagaaaactgaccaatgagaaaggtgttttgtgctccacagctgaagccaattctgctgggacatcccaagacagactccactcggactcaactgataatacacactttacatctgtcactatctgcccaggcatattgactttgtaacattccccccaggcacttcaagtccagtttcgactctgtgacttttgcctgtggtcactttgcctgaaatgccctttctccttctccttcttatccattcattaggatctagcaaaatgtacctcctttgaaaagcactttctgtagccctcaggcacaagtggggatggctgtgttggaccagaaaaagcaaccattgaaatttccaaactgaatctgtactttgatttatttcagtgtggtataatgtatggtataatatatggcaatgttttccaagtctgactgtacatcacagtgacctgggggacttttgaaaaatagattcccaggctcccctccaattaagacagcaggtcagaaggttgcaactcaggaagctttacttaatgtctagaagtttcccaggatattctgatgcatgaaccgtacttgaaacaatagtcagacattgctacttatcagctgtgtgatttggggcactctgagcttgtttcctcatctgtaaaatagcggggaagtaggggagtgtcacaaggtcttagaaaggaccacatgagggaatgagtgcaaaattcttaaatgatgcctcagtaagtgaaattatgatgctaattacaacgaatgtccttaaaaagctacttttcacttccaatagtccagcttgcaaaaccttcctctatcagagaaaaatttagtgaaagagtaaatgggcttcacaccaggatgatagcctggaaaaatcaaaagagacattgagacattgcccacatagaaagcaggggaagagcatgttcagtttttctgaaggtctatattcttcattcctactgtccatttctcctgattaaaagtctctcccaatagctgagaccattaacaaatataagcccatcaaatggtagctaccccactttgtaaaattaggcttttgtgtctctcatagaataatgttctaacacttcactacctgtaataaagtatttgcaccacaagaaaaaaatgtatttcatgaccagcaggctacaaccagcattctgcttttaggaacccatgcgtttgattgtatcctaagttggtaatgagtcaccacttttgcatttagttaaggacaccaaacaatgactctgtgaacctcagctcagactgcccctgagtcctcagaagatgcctaaatatggactgttctgtagcgcttaaggatatcaaatgacagtataccatgacaatcacaactaatcgaagtcccctgcagagtagttcctcataaagagatggagatggaaaagtaggaacgtttttcaatgctatgcagaaggaaaataatacctactgaccatattcatcctttcaaaggtctgccctgaaggcaagttgacaacacccaggcttggttctcccttttggaagagctaacgctaggagagttcacccttgctccctctggcgggaatcagcagaacagagcgggaggcactgtggcattaggattgcaaaccctggcttcggacacagtgctgcttgaatcagaatctacactgcagctgggcaactggctgaggtcacatttttaggctctgagctgctttctctatttgcaaagtgagaatacacagcttctaaggtcataatgcagatcaaattatatataaagcacttaacatgtgctcagtaaaaagtcattgatctaattattgttgtactttattgtcattaatatcaagggaatgacagcatagtgagtctcctagggatgcaggtcaatagatgttgaactgctattatgcagcaggtactgtgctaggtcctgggtaataccagagcaaacaagatcaacacaatctgcacctccaggaagcttatggtctagttcagaggtaggaaaaatgtgttttgtttggcctgcaccttgtgtataaacacaaaacatagagcaaacattttaaacttggatgacttcacaccacagtccagatttctggcttctctttgaaaacatcagaaattctgagagtaagggagatttctgtccacatgccaagccttctaagtcccaaagcaccaaccttccactggagagtggcctgctggctcttctcattaagaaaaatctccctctggctacacatgatgaggggcctggaggaattaagagagatgaggtagctgaggacacaggtccaggggaccagaactgaagcaaggaaggagaaaggagactcagcgctggttctctttcacggggtttttttgtctctcagctcagctcgctctgtttggctggacacagaaaaccctggaggagaattctgattccaacttgctctttgcacagttaattatttggagctcccagaaggttggagagaacaatgacttcccctgcagtggcagctggactagcttagttcccttttctgcccccaggggtcagaacccaaggaaggggggctatttgttttggccttaaaccaaatctgcctagagacacagagcgatgctctgacctgagaccacaaaagctactatttcaatgcctggtaaagctcctctctcttgccgtccacagcagtctactgacgaaaaacgcgttttccctatgcaaactgtttacttctctcctttgcaaattggaagtaatgtaaaaaaaaaaacaaaacaaaacaaaaaaaaaaaaaaacagaaagaaaagaaaagaaaaaaacctatatgcacaagaattccatctctccttgcaaataagatatttcacatttccttaggcagatagcatgcagacaagtaggggaactaattgggatggatcagtgaaaacaacgaaagctcatttatacacaacttgctaagtgtccacaactttgttctaataggggatccatgacaagtccctcaaaaacagagaaacaggagagaataatttacactttatagttgtgagccctgtaacagtagaacaaccttcctgcagtcccagagagattgtccccacatctaaccaaaaccattaccatcaatggtgtcctgcattttgaacagttgttaatgaagtcttgcctgacccaatacagagtgaaatgggtgtagttgctgctacaggctgccttctagccttcctgcatctgaatacattttctctgttggctgttctgatagagattcatctggaattcttaactagataaatccctcaatgacaaggtaaggcccatcttctgattaaacttgtattgaatttatttatttggccaatcatgtaatccatatttattaggtaccttttaagcaccaagcattgtgctgagtgacggggatatcaaggtgagtcaaaacaaccatagtccctgtccttagaagtccagaggggctgggtgcagtggctcacacctgtaatcccagcttttagggaggcagaggcgggaggatagcatgagcccaggagtttgagacctgccagggcaatataggaagaccccattctccacaaaaagggggaaaaaagcaagtccagagaaaaggaagctactaatcaaaagatctcacaaatataaaactgaccctctgaaaggtgtataagaagtattttggtactaggaggctctattacaaagagttcgtctagatatggggtggcagataatttgtctcagaagaaacagtacttgagctgacatttaaagccaggggaaaagcatcataggcagcgggaatcaaacactcaaaggccttgccgtgaggctgagcagtaaacataaggactgaataaagaccagtgagattggtgtggagaatgcaaggaatagagtgatgaagatggagagttggtagggaccgtgcaaggccttgtggagcacttcaaagatttccagcaacataaagctatttaaagatgtttaagcagggtataatggtggtagttgatgtgatcagatttacgctttgaaaaaatatagattagagttggcattttggggggacacagagtagatccaggtagatccaggtagaccaagtagtctagacctcctaggtcacaggtgtctaggaggggatggtaatttggacttggatggtatggcgctagaggtgatgtagccacattgacatattctaacaatagttactctggtaccaacccaatataccagagtcatccaatggcccaagagtggtactaactgtaattcctgattctgtgaagctgagtaaaaacatttagaaagaccaaactaaaaaggatctgaacgcatctgtactccctcatccccagcagcaaggtaccaccacgtactctgagtgatcatagctttatacttgaattgacaaattctgcataagactccacaggaaacccattaaataggcagggaagaaaatgctcaccattcagcattgacaagaaagatgataacaagcaagttttcagtcaaagtgggtaaaatgttgaatttctactctagtgtcattagcactgcacctgattttttaaaacaatattttggttaatcaaaactctgggtcaatcaactgttccacagtgacagctcctgtggtcatcaatctttgttatcgcttgaagctgacatggtctcggtccacaggagagtaagcagcaaaagacaaaggtttctcttcatttcccccaaagggagttaagcaatgagtcataaaagcatctaaattattcacatggctttccagaagtttatgattcaagatttgggagagataattgaaggaggtggggtgggaaacgtaacactggatgaacacatttattttgaaaatgaaaggatgagtttctgaggtagacccaattaccacacacagggcttcaggagcgacagcagcggcctatggttccgccacacaatgcttcattcattccttacatgggttcggacgatcattattaacctacagtcacctgagaaaagctcagtgtctgccaatcagtcacactggacttttgtggaaatggaaaaaggaagagagagtaagaagggagggatggagcaagggtatggagggaatgtgaggaaagcacaaggaggggccagaaggtgtcagctggtggaggagataaaatgttttctgtttctgttttacttgtagggtataagaaagagacatcagtgtgaagatatgccactgggtaggggctgagggttgtttgtatgtttgtttgttaataaacgtggcttgaattagatatatggctctccgttttagtatataagaaatacaagtaaaagagttcagctattgtgaaacttcattctcttgccaaatggagtttccttgactgtaatgctccaagactgaaccatgtacattcactatttataaaagctagacatgcatttattgaacctaccagatgtaggtactgtaaccaggcatgattaacagtagaaagaactgaaaaacccttcatgattcagccttagtttaccttactggttttatctcctgtgaattctcctttaaaactaagatcacagttctgtggttcttggaattcacaaaaaaaaaaaaaaatgctctacttcccctctgtgtatgtgagtattctctctgcactgaatgcccttcctccttcatctagcagcactgctcctctctgcctggaattgtctaattcctgccattcctcggatctgtttagacataacttcctcaggatgccatcctgaattctgagctgagtcaggtatcccttctcagggctctcactgagcttatctcaacagtagtctaggtagcattcaatcataattagatagtgtgcaagctttctgatggcagaggctaagacgttatcatgtttgtatccccagcccctagcacaccatgaaacacaaaatgcccaataaatttttgctgaataaataaaaaaatacaatacttgatacccaactccaaggcactttcagtgtagttagtaaagatagaacattttgaaacataacacagcacagggcaatatgaaagaaaataaaaaattaaataaatctgttataagcaacaaagcaggtatttagagaaggcaaagattacttttagctggggtgacaggagcaacagaatcaacgacaattcaatgtgtgttcatgacacaagtcctgtgttagttgttttcaacaacaaccctgtaacttgataatattatccccattaacaaatgtggaacccaaggttcagagaggtaagtgatttttcaaggttatataatcagcaatgccaggatttgaatgatgaatctaagatttcaaaacactgagaatggaaaggtgggtatcccaggtagagtaaaaacagaaacagaaaaaaatgtgcaagtgcatctcagtgtaatgtatgtcctggggattaaaaacaaatcaacttgatataatctattataggaatgctaaggatgctgatcctagcaagtaagctgtgactagactgctgggggccttgagtgtcatgctgaggaacttgggtgctgaggagccattagaagctttggagtagagaaaatgtgatcagagctgaaactctgaaagccttattagagagtgggagataggatgaactggaaagataagaaggaagtttgcaggcaaggtaattctgttggggacaaaaaaacttttcctttatcttcttatgttaggtatttgggggcctgcaaattaaactgacaaaccacagattaacaggagaaaagtttatttatgtgcatatggaagcttacaaaagaagtaactcaataaatggttaaagttagaggcttatacagtcttgcctgggtatccatggggaattggttccaggaccctctctcgccctccatcggataccagaatccaggttcacattccttatataaaatagcaaatataacctgtacacatcctcccgtataatttaaatcatatctaggccaagtgcggtggctcacacctgtaatcccagcactttgggaggccgaggtgggcggatcacttgaggtcaggagttcaagaccagcctggccaacacagggaaagcacatctctactaaaaacacaaaaattagccaggtgtggtggcacacgcctgtaatcctagctacttgggaggctgaggcaggagaaatgcttgaacccgagaggcagaggttgcagtgagcctagattgagccactggactccagcctgggcaacagagtgaactccatctcaaaacaacaacaacaaaaatcatatctagattacttataacacctaatacaatctaagtgctacataattattacattgtattgtttaagcaataatgacaagagaaaaaagtctatacatgttcagcacagatgcaattttctttttttcaaatagttttgatccactgttaattgaacctcagatatggaggggcaaatgtataactaccttagtagggaaaaaggagtgggagaaaagacctctttggaaagaataagcaggtttctacaggaaaaacaatgagagataagaaagtttgtaataatgtttgttcatccaggtacgagtggtctctctgtcttcttcaaggctataaaactcccccagagaggatatttatgatatattgagtctccttcctaggagtaaaagccaccctgaagaaggaatttatgaaagcctcatttcccagaagtttctgctattagtcaaataagagaagctctgagacggttttttttccgcatctgttgaatcccaaatgtcttcagcttaaaataatcttcagaccaactctgggcttctgagtgggtacccgacattaccacctaggagcctagcacaactctccagctccaaaggcactgatgtctgggatggagggaaagggtggattcaagccctactgtgagagaagacaccaacagcccctaacagctgagttattgtgcgtctgaaagagaaggaactaatggtgacttaaaagcattaagccaagatgacagagagatcattgtcaccactaacacaaataaggaagccagtcaggagaaagtactagtttgaagggggaaattttaaacatgctgaataagacacagcaggaaaaatctctaggagacaattggaaacgtggaaccagaaaaccagaaagtgatcagtgcaggaaatgcaacttgggagtcatttgcctaaagccataacttgaagccatagtaaatgtgggtatatctccaaggattaaggaatagagaaagaagactagaaggtaagcaacaaatcttagttaatactcaaatttagatggtctgcatgtgacattaacaagtgaaagatacaaagaattaagattaaagtgcccagtataagtctgacactaaactgggaactttttctatgtcattttatgacgtaggcactacctctatttcattaaaaccaaggctgagagtaatgtatcttgtcaaagccatataactagtagacaacagagatgggatcaaaggcatgttgcctcactcagggaccatctgactcatgccttcatggacaggactgtgggatggagggcaatggaggaagagttttcaggagtgcataggatgaacgtagtcaaaggcaatggggaccgagaagaggccactgaattctgagtcctctgagaggactcacctctcagaaatagttgcagtataaggtctaaaatcaaggcccccatattttgtgctgctttgacatatggagaaattcaggagggcctcaaatgacctaatgacaagttcccctcctgacatggtttggctgtgcctccacccaaatcttatcttgaattgtaactcccacaattcccacatgttgtgggaggaacccagcaggaggtgattgaattatgggagcaagtctttcctgcactgttcacatgatcatgaatcagtctcacaagatctgatggtttttaaaatgggagtttccctgcacaaggtctctctttgcctgctgccctccatgtaagatgtgacttgctcctccttgcctttagccatgatcatgaggtctctccagccatgtggaacagtaagtccaataaacctctttcttttgtaaatcacccagtctccgatatatctttatcagcagtgtgaaaacagactaatacacctcccagctctgctcctgcaaataaagtcccccagccaaacaaccctccctgtcatgtgaaccaggcatggttcctgcttattcctcttattccggagtagtggatttcagtttcctgccagcctgcagaattattcagacaagccgacttcatcctcccatagaaacagggataatcccacccctcttaatactaaagccttcttcccacatcccctgattgctcactgtgttcccaagtgcaactcccacgtggacctgtgtggcactcagggtccttcctccctgggctgtgagtatatgtgactaacaaactgctgtctcactggtccagtgttgttcagtcatctttctaaccctagggtgggaccctttctcaccaaccaggtaagtcgagagtggttagaacaacagaagacaccagagtgtttactgtggaagtaacatgggtgaaatgcttcactttaataactactggctttattacaactgaagaaatctgagaaatggatgattactcttttctaattttatataggaggaaactgaggaacagagaggtgttcaatggatacttagagtgagacagcaccaaattatttttctcactttaatgttgcattgttctcaaatattttttttacaagatcctttccagatgcttctatgagaatcacatatatccagtatttacagaaagccattgcaagcaataaggaaaatccaaaaagcaaaatatgggcaaaggataggaacagataatttccaaaagaagaaataggaatgccaatgatggcataatgtccaacctcactatgaatcaaagaaattcaaacaaaaattacaacaaatatttttgtccctttttggttgagaaagctttatactacccactgttggtgagattttaaggaattggagatgctcatacacagatgggataagtagaaatcagtatctctctgaaaggcagggtagcaactttctcaaaatctttaatggtagtattttatgaaaaaaaaattcattcgtaggattatatccaaaggaaacaacttgtgaaattcataaatgtatatggatgagaatgcttattcattgtttttttataatataaaaaaaccagaaacaatctaaatgcccatcaaaaggggataggctaagtaagttgtggtacacctataaaatagaatactatgcagtcttttaagtggaagatgtagatgtatatttatcaacataggaagatgatatttggttttaaaaactaggttataaagctgcaggtggaagagtacacatattatgtaaaatgtttataaaattttgtgtttttctacgtacacgcataatgagacatttgttgggaaatttgcaaagttttagtattccatagtcttcaaatttcaggtgagtcttactctcttctttagtttatcccaaaggcacatatcagtaatcaggaaataaaaggttgttttcactgggggtgggggaacacatggagaggaatgaataggtcacctcaaaaagaaagcatacttcaggaagaacttacacaaattacacaacatactttgcttttgcacttattttttatttcccaacagataacacgtgaaattccagaaaggggagaatcaattgtgcattcgatttttcacagggagctcatgaaactaaggcttctgtgcagcagcagggccatggagtggaaactggaaggcgactggggtcagtaggtgctggccagtccctctctgattgaaaaggacatgtgaagggtgccaagtgagacctcctctccaagttctcaacaatggctacttttttgcgttttattttgtgaacaattcgaacccacaaccctggatacattccacttgtgtaggtttccccttcagacagcaaatgctgctgtttccaaatccaatcatgagtgtttgctgttggagcgcttggtgtaaggcatgtgtgtcctataaaatatgtttctcaaaacttaactttttaagaaatcagtcactggtttatctcccaattctatcacccagaagaagagaaagatgccaaaacagatcccacagagagtttcattctgaaaaacagacatttaatgtagttattctgaaaaaaatacaaactgtattatgtcactttagaaatttcaaaatagagatctctaggtatcccgttaggcatctgtcgtgctcccaattacattactttcgacagccctaagagaagcaatatttattggcctactaagtctttaagaatgcaaaacttaacccatctggaactagttgtgttgttggctccagggttccttacatcagaacaaattcagacataaactctgggacagttcttgaatattgcatgaaggtgagttgcaggcattcacacaacacagcattgtcttttaaagcatttttataaagcagatccaaaggctggcaaacctttccttcaccataaaggaaatctaggctaaaggggaaaataagaagtttatgaactattaaaaaaataaagctgtggagttagggagttatggattaggttccaatccattaattcttttattctctggcagagctggctgaagatgtgcagccctctggcgggtaacagaaacattcatgtccagaacaatcacaaaaagggagagaaatggctggcagagcagagggcggatccactcatttggatgttaatttatacagaaatctggaattcaataatctcacatcccccaggtaagggagcgatccactctccaatttcatttgggagttctattacattaagcaatattctgtttggccagacatgccattcttctcttgaaggaaattaatttcttgattcttccatctaataatctaatataatcccaagtcagtgctttaagttttctcatgacactactagacaaaataaactctgaagtacctcttgtgggaactcacaagatacagatgaaaacaaaagaagaaagtaaaattgaagagggtgaggccagggacaattaggtattgaactgcctgccctgcctctgacacatgatacatgtgatttgttaagacgattttctatccttaactcttcactaagtagggctgctttacaatttccataggaaatttatttttaagtatgtaaggcctgtgaacaggataaataaaagattacaaggaaaaaaaaaagcagtgatttctggttgtttaaaaggcaactcaacaagcctttcccagcaaaaggaaaaggtcaggatcaataaaagggcctttcctttgggaggagatctgttttcaatttaacaaaaataaatccttatggtgtagtcttctgaagaccaaggaaacatcaagctatacaagggatctggccttaccaggataagaaaacttcttcatttgatattctccaataatatcaaaacaaagtaaactgtacccactttgcactctttctcggccccctgcctgttagtgaaaggccagttaacctgaaaaatgaaaaccagctcttaaatgtaaagatgatactactcattgatgcaatgttatcctgatagtggcttttcagagatatcatcttaagcgtgatatcaacagggggaatctcacatacgagtagaggctggtttagaaaaatcctgcaggatatggagtgtctttggtgacagaagtcatactcttaaaggtatcttggtcaaactcatcatctcttactctttttatattagccgggcgtggtggcacatgcctgtaatcccagctatttgggaggctgaagcaggagaatggcttgaacacaggaggcagaggttgcggtgagctaagatcgcgccactgcactccagcctgggtgagaagagtgaaactctgtctcaaaaaaaaaaaagtactggctcaactactatgatgagaagcttttgggagatactcagtggtaatgtcagccttattttctgtggcaaatctgaatctttgctgccgtaacacagttgttttcaacatttaccctttctacactcataggcacacacacaattttaactgatgaattcatagaattcataaacctgacagtgtcccattgctggaaccttagtcatacccattcctagctcttgctaactataacttctccatttttccttcctctcaagaaagtatattagattgcaaggttgcaagagagtaagagtcttaaccttaaatatgctttcatttattagaaaaaaggaaatcatctgcatccttcagcaatttaaatattattagagaaaaacctggtgggattcagcatcaaagttattctcctttctggcatgacctcctctcagcacttcttcaagtatataaatcctaccaatacctcaaggtccatctactctgtattctgaaaatactccaatctcctctccctggaatctaccaggactctcaaactcaagtgttttccagcagtcaggaaagttagttgcatgctgcaggccaattttcaggcatgtgtgtttactggatgagtgatgaggacatgacaacagaagagaacacgtcctccctgaagggggcagcagccagtcagtcccatcccattgctgtcaggtgggaatgcaggcccatagctacccgatcttccaatgttttaagataagtcgaaaatctgcattctatggataatatctcaacttcaaatgttggctcacttaggatgacaatgactctgtgatctgcattggacccatggaaccactaatttgcaacctctggtttctacaaaacatgaagctgactgataaatgacaagcttgtgccatttatcagcaagtgtttgctatttcacatcatcagtcacatcagtatttcagagagccataaataaatgtataagttataggtaacaaaaataaagcagggctttaacttaattatctttaatttagcttatttaaagtttcaaataacatgtaaagagggcctgagatatttatatttagaaatttagagacattggttaaataagttaaggaacaatgagccagactctgaagtcccagcaaggagggactgtatctttgttttattcagtacctatcaagagtgctaagtacacaggtttgaatggaactgatttgaatcatttaaggaaaaaggttccagacaaacattgcatgcattagaaactgagtatttcccgattaaacatacaccacccttacatttccaaagtgtcagcaaagcattctgttctttggtcaaatcttgtaaaagccacttactcctaaatatttttactttgtaaccttcaccgttccaagttcatctaaaagaataaagaaaatacctggcacagagaatgcattcaaagtgtattagttaaatttcactaaaaagaagtaaacaaaagacaaaaaacttcaatgcatcttgattctctgtagagagagcaccttgtggcttgggcttcttctatcaaacacatacccacacctttttgtcagataaactcatttggtttttcttgtgtaatggggtgagtattgtacaaggtttcaatgccttttttttccaactcacattgtcccttagaagctcgaagtactaacaaagtgcttcaccacacaaaagtgctgtctacatttgtctggcaaatacgatgccaaacgaaaagcctgatgagtctgcaattcgtcatgggcatgatcaagctccaggctgcttccaccagagagcaaattcaacattataaaggaagtgtggacaggaaagccttccagcaagattctcagaatatggacatgagattcaaagactaataaaatgggttggggagacggtattgatgaagaagcagccggagaggaaaaaaggaggatttgagcagatgtctgtcactaaagaaagtgaaagacacagaggaaagagaagatctatgttatcacctgtgatcctaaaacaactctaggaattaggccgcattatccttgcttttatagaggaagaaaatgtggaacagaaaagctgaataacttgtcacagtcttacccagccaattagtggcttaactggagtttggccaggtctttttgtctgtatagcacaaaccttgtgaccacacagcactaacttccaataagtcacccaaaaagtcagctgcatgtaattagctctgctgtgaaactatggactggggaaagggcattgttcatttgttagcttaatttttgttaaaggcatacaagaccaaccacaaaaaaagaaaaacaaaaacaaaacaaacaaacaacagcaaaaaaaaatcagccagagctgtagaaaatcaactctgtcattagtaagtatattttattcaagtatgtgttattaatatatttgagatctcccaaatactaaagagatagaaatttagatacattggagataaacttcaagtaagctattttttcactattgcataaatgggaagatattttcattgaaaataatgttcctttactcaatcacccaatatttattgagaaaccacctgggccagacattgttctgaattctgaagatcagagagtgaacaagaagcaactgactttgttttgtttacagttcagattgaacaaagcaatggcaacagagaaagaaagagaagccatttatggtttgtgataaatgctgtgaaggaaatattttctgatagagaatgaatggaaaacttcctttaggcaaagaggacaggaagggcctccttaggtgattgtgtctaaatgagtcaagcatgtcgagggttgaagaaagggtgctgcaggcagagagataagagtatgctaagagccggtgaggacactgaacttagctcttcctgggaagtggcagccccttgagttggtgcagtgaccagggtggacatgtgtagtataagcttcagggaagaggtgagtagaaaccagccagcccctcatgggtctggtataccactagagtgcgtttggaattaattgtaagcacaagagaaagctgttgaatgattcagtcttcaacaagggaacaacatgaacagattggtggttttattttggctgccatgtgaagaatggatgacacgacactcgcatagaagtggaagactagtctagagtttggaagatagcacttggacgtcctgctggatgcctgccattaccctctggatctgccctccaccctttcctcgcctgttgcctgcctcagaggctggcttacatggactacggcccagggctctctagcttccagttagtttggtcaatgggaaaccccagccagagatcagaagggaggagaaagaacttaggatattagtccctcagcaccctgtcacctccaagcagagtttctcacaggttggttgtatcccaccacccagggctgctggtccttcaggtggcctctgccaaggggcctgtcacacagctctccctcaggtcccaataaccttccctctcctatgcctctttcctcccctttacccttcaggagttgagtagcatcagaaaacgctgcagctagccccaaggtactgcactctgtcttgtagtttgaaaatgctacctttgttaaactctagtcaaattacccaatgtatggatgccatctgtttcctgtggggctgactgatacaggaagagagaagcaagatactattttgacacgttcagttactgtgatccttgagtaacattctgtttagcttgagttcatataactcaaaaggttatcaaggaaatcttacacccttttacctttttaggagaagcaacaaattcaccaaagaggtaaaatgccaaaatcatgggcgtgcggattcagaaaataaaataagcattagtggtcatcagtatttgatttcaggccaattgttagagctgtcgcttaaaaatttagatgtacatttctcattccatgtttcatttattcaatcaatgtttattgagtgcctactacttgcaaggcactattttatgaactagacatagagcagagaccaaaacaaaatgcctactctcttggagcttacattctgggggagaatcagaaaataaacaactcaatgatatcttatgtgcttataagaaatggttaacaggaatagagagtgggagatcagcaagaggactgctgatttataaaagacagagtaggcctttcttaaaaggtgataatctgagcagagatctaaaggaaaagatgaagcaagctacggcgatgtccagggcaagtgtgttctgggggcggaaatcatgagatgacgaggtgtgggtggcacttttgagtaccagtagaaggccagtgccactgtagcagaggaagtaaggaggacattggcagcctatgcaatcagggagacggcagggacaagatgaatagcctcaagaactttggcttctattttgagacaataagtttttatggttttgagtagaacagtgataggaattgatttaggttcaaggggctcattctggctactgtgttgcaaataaggtggcaaggatagaaatagagaacacttacgcaaaagtctagagcaaagatggtgacttagaccagggttgtagcatttatatttgatatgccatttaaatatccaagggaacatgagtaggcatgggatgtgtaaccgaagtctagagttgaaagaagaggtctaagctagagatagagatttcgaaaacatcagtatttaaccttgacagtggatgagattttctaggaagtgaggagagcattaagagacaagtttttaaggatggagccctgagtcattacagattgacagatcagaaagaggatgatgaccagcaaggagaccaaaaaggccagtgtggttaagtgggaaaccaagagggtgtggtgtccccaaagccaactgaaaaaaaagtatgtcacgaaggaggaagtgatcaactgtatcatgtactgctgatagatcaagtaagaatagaactgagtagaaaaatggatttggcaaccaaggggccatggatgacccagacaagtgcattctgagaagcggtggggatgaaagtgggatggagagaacatgtgcaggcaactcctctgatgttctttgctgtaaatgggaagcagagaaacgtgggagctggaatgaattatgcaggcttctttctttttttcttttcccttccttccttcctgctttccttttttccttccttcctgcttgcctttctcccttcttttctttcttccttcctttatctttctttcttttctccctctcttactctctttatttcttttctttatctctttctctttctttccatttctctctttccttcctttgttctttttctctctcctttcgttctttcatctctttagtttagagacactacagcatcttcatatcctctcagaattgtctagtagggagaggaacccaaatgatgcaggagagaacagataattgcggaagccaagtgtttttgtaggcatgtgttgaggttcacggcaccatgaaggccgagggtggaagcagaacagttcagagagcacatggtctaggagcaggtaggctagtgagagcatgtggaggtttcctcctgactgagctttgctcagtaaaacaggaagtaagggcatacacatagcaggaccagcagagagaagctattggagatctgagaaaagggtgggaaatagtcatccagggcaagtgggtggagtagggtcctgcagtaggattgctgagcagtgtgttgggctttaaactgcctttcatatgaatccacaaatcctactaatattaatgaaagatattaattttcatttttcctgctcccgtcagcttaaaacgaaaagtttctctacttagcccatgaggagtcagaaaagaaaaagtaatgcccagcaaatttctccttcctaagctagaaaggaaaaaataagatattcatgtaaggaaaataaagaagacatggcaacttgaaattatgaagaaattccaaatgttgcatttggtagtgttcttaagctaccataagagatcttcattctattctgggtagggagaatgtacgtggcagttgctaggaatgatcctttgcccgtgatccttcccatgtggtaccccactgtccccaatagacctgagtggcacaaccaacaaaacaacattcaaatatatggaaatgatctttattttagactctttctcatttagcctgttgggctccgagaatgtgaaaaataaatctgaagccttacttttaatagctttcttataaattatccccagtatgtaaaagcccagctcctagatataaccagaagaagggggaggggggaaagactaatgacctttgacattaaaatttaaaatgtcctgcatgcaaatacactttcctgccactcttttgtaatgcaataaccagcaagaattagaattgcaaaaattccaaaagagctacatggaaattatacaacaaagtggtttcacagtgatattgagaaaggaatatgaaatgaatacaagataacatagagacagaatggggtgttacagatgtatgagtgaacgtgcgtatgagcacatgcatgtctcagagagagcaacagataaaaaattatttctttttttatgttgctcttcatgagcaaaattttaagacagacactgttctggtcacatttcaataatgtgacacatggtttctatttacattccaaatgagttttcactaaatgactttcgaaatatttacttgcaagtataaaggagaccctttgaatgtctgatttgaaaaaagaacaaaatcaagcaattatcaacatagatgttctaatacaaactgacactattttcttccatgtcttttttttttttttttttcattcctagacaccacaaaagaccaatgctacagatgtctctctttcggctttaaatacttcaactgtgacaatgatagtgagacagactgcttcaggccctgtagctaggacataataaataattcaaacaagttttgaaaaatcatttggcccatataatataccagctatccgaacatttaccaatgcccgccccctcccctcacacctcatccttattttcattttttgctgcttccatcagcttaaaatgaaaagtttctctacttagcccatcaggagtcagaaaagaaaaagtaatgcccagcaaatttatccttcctttgctaccggcttccattaaattgaaggtgacttcacattgatcctgggttcaattcacatatccaaagagacctcagtgattaacataaagggcagtccaatcaaggatagacacctccatgtgtgtatggtgagcaatttggtgggatgtaaaacataaatgatgtagcatcagaacacctggtgtggatgatgccaccacttgcctacccagttattctccacttcttgccctgagtttttctttctctctctctcttttttaacttagataaaaaataatcagcttcttaacctcccttgcatctaggagtcatcaaaaagatatcggttgatcaataagatcaataagaatttgataggcagggcttccaaaaaagtctgttgaaaagggaagactcagataacacagtttgttagtgtttgccttttgcccaagatccttccctctttcttctgcctgtgatgcccagggatggagtagtcagtttgtagcctatgaggacaaaagtcccatggcaaggcataaccatgcagaaagatagaaggaactgtgtcccgctggcactttgaacttcttgaggcatcttggggaaaataagcccctccttggtctagcagtatgtgacagttaatttcaggtgtcaatttggctaggccatggtatccagatacttgttcaaacatatctggatgtcactgtgaaggtaatttttagatgagattcatcattaaatcagtagactttgagtaaaacagattaccctccataatgtgagtgggcctcattcaattagttgacaattagttgacagtcttagaaaaagagtagcatcccccagggaagagggaattttgccagcagtctgcttttggacttgagtggcaatatcaactgttccttgggtatttattgtgttggcctaacctgcagattttggactgagatctcagccttcataatcatgtgagtgaacggcttaaaatcgatcatctctgtctctctctggagaaccctgactgctacaccattacaccattctaactgggtttctgttcactgaaactgaatgcaattctctctgacacatctgagatcaccacttcatacactgtgtaactgtgtaggtgtctgtgaccctcagcttccagatctacaaaatgggaatatgagtactcctgactccacaggcttgttggcttacacacgagacagaatgtgtaaaagtgctgtgctgtgttaagttacaaagcccaatcgaaatgatagggatcattatcatggtgggctcactgtcaattcacgactgtaagtctgttatgattgtattcacttaaaataataatattcttcaaatctgaccataaaaagtcattatagaacatttgaaagttcaaaaacgcatgaggaagaaaacactcaaccacctccatcattccatagctactgtcatctaccaatacctagcatttattgagttattatatagcaggcaatgtgtgaagcaattcaatgcattatctctaccctgtgaaggtaggtactattttggtgcccatttggcatatgggtgaaaacttgtcaccggacatatagctagtaagtggcaaatccaggattcaaacccaggtctgaattattctaaagcccatgtatgtatccagcaacacatggcgatgagctgtgttctttaataatgtattggctactacaaaattggagtgtgatcaggtaacccttacatcaggaaaaatggggtatgcacattgctcagcatatacacaaatcaagactcatattacaaggctgctagctctcttgtcagggataacattttaatttgaaatgaagtggaagaatgtttcatatcagctactccggttaacactgctttttacttcagataaagatatcccttctgtcaggcaccctgaagtttttctgtaaaaagttgtgttcatttgtttcaaactgcccatacatccatggtctcatttcattttccctatagcccgctgagttaagaggggcaggtattattaactccatttcacaggtgaaagaactgagccctagagaggttaactaagttgcttaaggtcacacagcaaattagtggtacgacggggattggaaagcctaacgcctgacatccagcgtggtatgttttccatcatgtagtgctccatcacctgtcactcccaccattcctgaggggcttggagttgatggggcatgctatcaatttctcagggtaaaactgtcctatctgggtaggaaaatgcacacacacacacacacacatatactagacacactgtaattgcatctgccaaaatggttttataacaatccagtcaaggatacagaaaactcccaggctgcctttcagaaacaaagcccaaaggatcaatttcatcatgaaataggatttcctcagctgtaggtggatgggtaggtggggaggtggatgaactgcattaacaatggaacagtggactgcagggtaaaagctcatttgacattcactgctattaagcagtggcaatgtaaacctggggtagcaaagagcaatacccaggaaaaaatacgaagaaaagtttcaacttaacccttctgtaactttctatttataagtctcagggtattaagtctcattctttagaaataacaaatgcatattttgactcactctgtaagatatttataagaaataaagagcaagggggtattgattaagaaaaaactaggatgagattatagatatattaatatgtgttaatatacaacatataattacatataattaatatataataaatgtacaaatatataatgttatataaatgacatgtcaatatatgaatatatatatttcaagatcatattcttaacctgaaaccaaaaaaagtacaaatagaggtaacatattgcattgtctatttagcattgaaaccaggattttcagatagaaacatttgcctttcctaagctacgcaagccatcagatatttacctcagtggcactggtctcagtgaaacatcttaatgtctcttctctcagttggttagatgaatggatgtcataaggtaaaaagaggaactgcaagatttgaagctcatagaaaaaagactggcactgggaatggcagttaccgggagattgaaacaagaaggcttctaaatatgctgtcaaaaccagcaccagtgacctctcatcaagtgaggggcagcactaaaagctataccttctagaatgatgttaccttgaaaatcatgaggaaatctcaagtgtctttctactacattagcaaaaggaagtttagggagtttagacaccaagagactggaccttctcaaaagggaatttgccacagaatcatagatgttcaaaatgtgaaccaagctttctttcaaataaaagtgaatatcagggcttaaaacagaaagacacatttcatcaaaaatgattaggggcccacgagtgttgactggggaatgagaatagtgggtaaggttagggggaaagccagaaaaaaaggtgaatcaaatatacttacactaaaaatcctggggctccatgtgatccagtcacggtaccttgtcacagagagaaatgtaatcagggatccaggaagttctttacaggtttacttggtgtgatgcttaatattaggtgtcgactagattggattgaaggatgcctagatggctggtggagtattgtttctgggtgtgtctgtgagggtgttgccagaagagactgacatttgagtcagtggactggagagaaagatccaccttcagtgtgggtgggtaccatccgatcggctgccagtgcagctagaccaaatgcaggtggaagaaggtgcgataagctggcttgctgtgtcttctggctgccttctttctcccatgctggatgcctcctcccatccctcctgcccttggacatcagattccaggttcttcagcctttggaactcaggaacttgcaacagtggctcagactttggccacagtctgaagcctgcactgtcagcttttctggtttgagcctttcagactgagccactaccagcttctctctctctcaatttgcagacagcctatcctgggactttgccttgtaatggtgtgagccaactcttcctaatatattcccttatatatatacatacatatatcctacttgttctgtccctctggagaaccctgactaatatacttggacacatgaaaaattattaagaagagatgtctattcttaatgcattaagaatactgtaaaattattctctcctcattgctgcctttctgaaaattcttcatgtggttggcagctgactcaggagcactctctttcctggcacttatccaatggctctaacacccaatctgggcagcctgtccggcttactgtctccatctctccactcttgcttatgtacttcaacacagactctttatttctttacttttatttctgttttctttactttagggaggacctgggagtttaccaggaagctcaaattcttcctgtatagaagctaggaaaatagtgaagattgtgactatccatactcgaataattttatcctataacatctcaacagattttgtctctaagaattctattgtctcaaataaacccagaagttagcactttaacatgggagccttttcaaatggtagagtctcaaggccacatctgactccagagatcatggtgttcctacaacactgagatgatgataggaactacagttgaaaacagatctttctccccacatcaccttgatcaagtcaataaatgttagtatatgccaggtactgggctaggtagtaggaacacagagataagcaagacaagatccttatccctgaagaagtcacagttcagtgtagtatttctaaaattgcattccttagaatgaaagtgacccttgtaaaaataatccatggaccaaataccttttggaatgtggcatgctcaatctccttttggacatttttcatgctcatcctaatgcgaaatgattatataaacttcagttctttactccagcatttcccacatttaactcatcgctgacccatttggcttgcaaaacttacgtcttgaattgagcctacaaatgttaacagaaattctaccattagcttaaaaaacagacaaataacaggcattttaaagataaaataagaaataatgatagcattttaatataaagtaaatagtatttcaaccaaaaggcaagtgaatctgtatgttgtcttaatggagattatatttgtttgctcactacagtttataagaacagagaggatgataaagacaccacaatgatgaccatgcacagagtgtttctatcagcaagcctatattgtgggtctttactcacaatattttatttaattcttacatcccttctatgaagtaggaacttatatttcccattttcctccataaagaaatcaaggttcagagaatttgttaatttgtctgctacgatcatgtgcctggtaagtgatggaagtgagattctaatccagactatttactctgaaaacctagtggctcccaattctagttatatatcccagagaatctactgttaactgatttaaaatgtccattagcagagaaacagattaacaaaattcggtgtcttcacatgatagatgatcagatggctatcagactatctgtggcttctgaacagaaataagaaagaggctttggcaagctctagattagaatcaaagaaaggctttccctcttgttaagcaactcttgttctattgcgccccaacaagagacagaatgtttcaagataggacaccaggtgactgtgtggcctgagctgcccaacctgaattgggtgttgttttatccactgtctattacattgggtgcactcagcagcagctgtctgtatcaaatgaaagtagattacacgggattgtactattaggcttactctggctatccctgttttaacccaaacctaagacttcatggggcattttttatgtagttacctgaagaaggaaaaaaataaagcctactttacagacaacattgcacgataagctagctccagcctgaagtggaccctgaatattataaccccactcaaggtgagtagccctaaaggacattgaagaagaaaaatcccatcagtgggcaaaacttcaaataattacctcttgtggtcaacactgcctggaaaaatagttggcctgaggtattgttccacgttaattcatgggctcatgaatgaggcattaggaagaaaaagaggggaagactgaaagggaagggaacaaatacacagtaaggcttctcaaacttttaccagagtgtgaaaatatctgtctatgtgaatgtagactagaaggtccccactgtggagaaggcactcagtagctaggtaggcaaggcctctttccctgccaactcagagcttaatcagcatattcataaaagctatttagtatctacggtggccaaatacagaggtttgcatgggctgaccaataaggacttcaccagttctggccactgccactcccaaatgtaccacttgctagaaacatcaataaggaaatctgttggagagttagttttttgattcagtgaataccaatgtgctctcccacatttcctctaccttttgtggtaaggtggggccatgtgactagtgcaggccaacgggctacgaggaaacagaaacctgtcatgcctgtgaggggccctggcaaggcataccgcctgacctgcacaccaagtgatgaggtcagagaatgccagattgctctgcattctctgtatagaggaaaattgccccgcaaactgcctgattaatataccaatcctgaatcaaagatacagaaaaataccctgactggaccctccagccacctgggggcatgctgtttgtatggaccccatctatcatagaggagatgaaaatgtatacttcttggaaaagacatatactcaataagaattatttccctgtttgccaggcttctgtgaacaacctcaaatgttttattcaccttgatggtctcccacagaaccttcttgactaagaaactcattttatatgtacatatatttatatgtacatatattaaaaagtaaagcaatttagttggtgctcatgggattccatagtctcacctagtaccccatcctcaacagtggaatggccagttaataacttggctgtggttccagttaaaagacaacaccctgaaaagctaaaggactatcctacaggctgcagaatgttctcttaactagtgattaattatagtgctattttcccataccaagaatatatatgtccaggggtcaaaggggagaggggagagcagtgcctttcaccattacacagaacaaatcactcattttgctttccttaccaggaaatttgaggtctgctgttgtagaggtcttacaactcaagtgaaaaatgcttccaacaatagatatgataaaagaaaaacttcagccgagttaaatttaaaggactttaattgagcaatgaatgattcacgaatcgggcagcccccagaatcacagcagattcacagactccaggggtgcctcatggtcagaacaaatttatagacaaaaaaggtaaagtgacgtacaggaatcagaagtcgggtatagaaacagtgagattggttacagctcagtgtttgccttgtgtgaacgcagtttgaacattcagcagtctatgtgtggttgaagtatggccgctgggattggccaacactcagctattgttacaggtgcatactattaacttaggttttcaattttgtctgttaagctaggttacagttcatccacaaagactcaaatatagaagtatggccttttcaggccatatttagtttgctttagcagatgcaagagtgtttctatgaaattggaagctgaaactgtccagtggacattttggacacctcacaccccactcaaactgagtaaaaagggagttattgtgttgggaggggtcattagtcttgattatcagttgggaaatgaagttcctgctcagcaatggaggccatgaagagaatacctaccatgcaggtaaatcctctggagtattcctgctactgccgtgtgccatggtaaagggttagactccagcaaccccaaatgagcagaagcattgagggtttcctggatagaattactgatggactgtttgttcaagggtaagttagagtatgttaagtcagagcaaggtattataacttgaaagttgaaacatggagaaaaaaaaaaaggagtattattgatatttggtaccaagaaagggatcagagcgaaatttgtctcgcgtggctgcccaatatcctctggatattcttgctcataataatgtttgctccacatcatgaattcttccttttcaaagggaatttcagaaaactcatatcctttgcagctaaggagcaggcatgcggtctgccctcctcttctcaggccacacaagacttcactgtggaagtgagcaatgaggaaaaacaggctatgtgtggacattcatttttccagtataggcagtgagaaaggtatccagatttggggatgttaggataaattgcaataaaattaaatccttcgtatcctagatgttacagtcaggaaaacattgtggtatccagtaagtagatggtgacaattgcctcataagcccagttctaagaaaatgttctgcagtcaacagcatgtcaatggctgttttctgaccagaccagttctgcaacatagttttggacattgttcccaaaagcttagcctcaagcttatttctctgggtctacaatgattcttccaaatgccccatatcctttaataaattccttctctatttaaattagagcccattctattgtttgcaactaatgctcctgaccatattttccttctcccactttcaatacccaggcaaagattgttttaatcattcacaacctaacagttctctctcaggaaagtctaatctagcaatatttttttctgtggaatctgcaacctactcctttacctttaagccataagcagtgaatgaaactgactcctatttccagaatcccacctgcattccttttccaactcaatcttctttcttagcctaaggctagcctatttattgtatgaaatattcttttctgtcagtgaacatggcaacatctttggctaagtcaaaagcctaactcttcatctagctttcaacttggaagcacatccctggacacacctatgctttgaaagtaatatttatctctctctctctctatcccactgttcaacaatcattttgtctgctttttttgagttacactttgcatatcaatactctttctgaaaactcctccaaagtgttaaatatctggcatagtcatttcaaaacaggaacggagtggtctgcatgttaaagaaggcaagaatgccagaaattgtcccatttcccatgttgatcagtgactgtgtaactcagacacgttgcagaggcctacatggcctacttcctgagaggggggtctcactgccttgtcaggattccagtttaagagcacagggcaagtgagaccactgaatacagtcatttaaaaagtgctacaggaaagtatttaaatagtcatcttatagaagggggtgaaaaagcacatttattgatgcagtaattaaaaaaagatttagatccagtgtgtcaattcccatagaatcccacttagcccccttatctatgtcaaagcaaacttagtttcacatcagcagtgcttctcatttatcttaatgctaaggatttatttcttatgcaaaattgttcattttcaccagcctggaactttaaaaaaattcacattctcttcttcaagaatttttattaagccaagatgtcatcaagctgaaaatctcagacacaattttggctctcttctgcaggaaactcagaggagtgcccaatccaggcaacagcagattagcactggcactgctgacaggttcttaaaagtgttggaaagagaagaacaaaggtggtgtacaatgattgacaaagatttctgctataaactaaagttgaaccaataaatatgtctagactctgccatgactatctgtggcctggaagctgcattcttcagaagaaaaaaaaaaagttgcagttggaatttggaatggttttgcccccatgatgtgcacacaggactttgatgagtagtctgatatgcagaagcatccagattatcactgagatagaaatgaaacatccagatgatagattaagtagattgttcacttctcatctatatatatatatatatatatatatatatatatatatatatttgacatcatagaggcataatcaaaatctgagtaggtaaagtcactaaccagaatacgaataccaagttacctgtgtggtttcatggaaaaataataggggaattgacatcatctttataaatgttgtatcaatgagaaaattatgacagtcggggagatctgatctagcccatctgcctcctgtctttagcattcaagctgccaagctagctttgggagacatttactttacagtttaaatgataataacccttccccccaactcaactgcctttgtaaagctaatgagggaccaactgagggaaggagagatgcctggatgctgctaaggtacagacatgaacaattgccagccattattccagagatcacaagatttgcaacttccctaattactcctgcaggcaacatcactattgtagattggccttttgagatactgtttcaggttttttgcatgtctggcacccatggctctacttggacccaccaactgatggttcctctggccagaagcaactcagtgtaagaggacagcttcaactccctatgattaaatctccaacccagccaatcggcagcaaacacccattgcatagccatccctacgccttcgcccaaactacctttgaaaagcccctaacctacaagccttctatgagattgatttgaataataactccatctccggcatggtgtggctagccttctgtcaactaaactctttctttactgcaattccatggtctctgtttgtgtagcaggcaggaagaacccactgggtggtcacagaatttcaaggctgcaaagagtcagactttactcaaatattctaggcaaaaaaaatagaatttaagggttacgatctgcacaatcatggtcaaaatcaaagacacatcgaaacagttaaaacgcaacagttatcccaaggtcaaaaccaagaatatttatttattagtgtaccctgtagctctgtacccaattaagcccaaacatctccctagacttcatctccataatcatatgggtatctgatacccgtcaatgcaattttcttgatcactaatgaaacattccttgttcattgcattagtctttataatcacaatattaaatcattttccctggtgttttcccctagcaacaatttatgagccattacagaatttctgttttttttctatgtcttctctcttctcataagttaaaccattccagtatcttgcaaatgaccagacaactactttaagactttggttgtaactagagcttcctaccaagctatgtaattaagccacagtatctttgctcttctagcttacaagataatcatctgattcccttttgttaaactatttgccctttggccttatagtttattcacttgggaactagattacagtttcccagactatatagctacagagaaattattgtgacttattataagtttaattcatgccaaacaataccagtctgatttctggcttaataccaccttctttcataaagctggaccatcattttgcctttaatcatcttcttgattagtatttttccaagtgtttctcaactcatttcttctatagaattaaaacattcctactggatgggctactcattttaaggatttaaaattttcagtctggatttggggttacacctttgatggatgagcttaaggaagatacgaaaatggcaaaattatcttcatgatgacatcataatggatagaacaaagtaaattttataaaatggtttcacatgccttattccatttgatacttaacagacttgagaactggacagagtagatatagtagttccctcttgtgcacagggaatatgttccaagaatcccagtggatgcctgaaatcctgtatagtcctaaaccctatacatactgttttttccctatatatacatatttatgataaaatttaattaatttattctttttgagatggagttccattcttgttgcccaggctggggtgcaatggtgtgatctcagctcactgcaacctctgcctctcgcgttcatgcaattgtcctgcctcagcctcccgagtagttgggattacaggcacctgccaccacgcctggctaatttttgtatttttagtagagatggggtttcaccatgttgaccaggctggtctcgaactcctgacctcaagtgatctgcccaccttgacctcccaaagagtgggattacaggcatgagccactgtgcttggccaaaatttaatttataaattaggcacagttagagatgaacaacaataactaataataaagtagatgccagcatcactacttttgtgctttggaatcattagtaagtaaaataagggttccttgaatataagcactgtgatactgcaacagtggatctgatcacagagctagctataatgtcactaacgggcaagcagcacagacatcacagatacatgggatgattcatacactgggaagggcagagcagggcagctcagatttcactgtgctgctcaaaatggcatgcattttaaaacttacaaattgcttatttctggaattttccatttaacatttttagatcgagttgaccacaggtaactaaaactttgaaacagcagataatggggaactactgtattactatgcccatctttataaagcagtggtttccaaactgtgttaatgcagaccaaattcatgacattgtttcaaccagtgcagctcctttcatattagttttttaaaaaaacacatctaagtaagatcaccatttgaaatgaatagagtgtatgttggcttttaaataaggaatgtttaaatgcccctgatagaggaagaaaccaaagctcagtacaaatggtaaactcacatctccacctgtaaacaccaggtaaaaattgaaggagcagggacaaccacccaagtctccagcctgtgagacagccaggtgaggaggggtccccagaagacctccaactggcctgtgcaccggggtggagcctcgggaatttcatcatgtttgcagcggggaggagcctggcccttccttttcctgtgtggaacctgggattcaagctgtgggcgggaagtgctctatcagggactcaagccttgggagactccctctttcccctttacttctttttcacccaataaaaccctgctcaccctctccatcggtctgtgaacctaaattttcgtggctgtgggacggacaagtaccctgtctttaactgaactatggaaaagtcctgcaatatttttggcgcccaacgtggggactcgagaaggggtaagtgagatgcaaaccaataattctttttccctctcccttctgagtcttctcatccccgtggccttttccttccttttttgggatggaccggcgagcagcagctgcccactgctcctcactccatgccggggctgggacacatggcctaagtgtcctgcacagcctgctggctggttccccgtcactcctggctgtcccagccttccccttccctggccaagggatgtaactctatcagacagtaattaagcttaaatttgtctccctggtggaggaaccacttgcaaagaaatatgaggttcttcctcaggcacttttaaactgtttcttttctttccccttctctaccccatcagcaagttaacttaaatttttttttcttttagaagatgttgtactaggctagcctccacccacccccaacaactgtcagtgtattctctgcaaagtttcggttgtgaaatcaagcctccatcttgttttatatcctgagggcatggctggtaattgtggcaaggatttgtttagcaaagccttgagaggatgaaccctgtaagattcaatgtctgcatgttttcctagccctttctcttaaagggccccacccagcaactgggttttcttctgcctgcctgtgtgtgtactgtacgtaatgtttgtcaagagaactctaattaatacagcctaaagaaagacaagtgcttgaatctaatattttttaaagggaagataaagtctggtacctttcagttcacatgactttaatctttaagaaatagaaacagtcttaaaaactattggtcaaatgcaggtattatcaaaatgtaaataggtaggctaaataatgcaggtcagatgcaaggtttgctaagtgttttgaggttacaaactgctttttgggttttcagaactatattgacttgccagcttcacaactggtaaggcctggggacacacggaactaaccgcacccttaactaagaaggcaaaccttggctgcagttagcacacaattaaagcaacttaacaagttttagtttacagttaaaaattgctaggagttaattgaatccactagaaatagatttacatgcaaggtgtatgagaacagtaaaatgtgtttttcagtaaaaggttataagaagtcatggaaatgtaaacttttgcctagggttaaggattgttttgagttacattaggaaaaagctgaaggttccaagaagtggtggaagaattgtggaaattaatcttgcagaagaggttctctgtgtgaacatactgactacattcaaccaagggtattatatggtttttctgtaaattgagcgttgaagtaaaagcataacgaggttttcctaaggtgctaatcttaatctgctctttggcaaaatttgtaaagggttataaaaggttttcgcttcttcaaaatttctgagtcatcattttgacaaaataaataacttttggtaatgttgacaaaaggagtcaaattctgtaaaatatttttacagacttattgtgagccacatatgagtgaccatggcccgtgacacagccctcagaaggtcctgagaacatgtgcccaaggtggtcagggtatagcttggtttgatatattttaggaaagcatgagacttcaaatatatttaagaaatgcattggtttggttcagaaaggcaggacaactcaaagcggagccttccaggctataggtaaatttaaacatttttctggatgacggttgagtttatctgaagacctgggatcaatagaaaggaaatgttcaggttaagataaaggattgtggagaccaaattttattgtgcagaggaagctctcagatagcagacttaagagagagcaggttataaaatgcttcttatcagacctaaaagggtgcctggctcttagttgattatctcctggatctggagagaaaggaatgaaaacaaagggggaaggggattctctataaaatgtggatttttcccacaagagacgttgcagggcaacttcaaggtatggcaaggaaatatattttgaggtaaaacattttgatttttttccttgttatgccacagtcagattggaaagtaagtcacgatatacagggttaaataaaacccatctgatgaaaatttatggtttgtaagccatgactccccaggctccttagataggaatttgggcaatattaaaaaaaaatcagagcttagtcctcagtaatctggaattccgtttcataacatcaagtgttttaaaccttgaacatttaacagccttcccaaagtcaaacttcagtttcaaaatcgtcttccctggtacatggcttttcaaatacttcagagggcccccgatgtgtccagaactaagagaggtaaacagaattatttgacatgtttaggtacatgggattgccaaaatgatgctcaatcttctttaggttatagctgggtgaataatgccaatatatgttccaaaattgtatgggatttctaaaattctaatgtctgagtatatgctatcaaccataattaaggtttttatgttaagttatagtaaaccacggagataactaaacttctttgtcagtcgtgtttctaattgtaactaccctggaaattttgctattcacagacaattgttgctttaattctttttcagaagatggtttataataagctataggactttgacaggtgctttcaaatacaggcttctgataactttggatattgtgacactgaaatacaggaaaatgtacaggactcaaaagctgaaatgctcatgattatcaagcaaaacaagagttagccaaatggactgaactcaggaagctgaagcaacctttttgacttttgcttggaatattgctaatccatgtttcatttttcagagtcaaggaaacttattttgaactatttacagcctttaacaattgagtaaggtatactcctatgaacaaagtttgaagcgtgtttgtttctctctgcctggttcctctagaatttggaaactatctgtgaatattgttatggcaatatagttgtttgcatcagtgccaataagaatccatttttcttttgcagcaggacacatttggagaaagtagttattttaccaaggttttgactggaatggtatgcttccctttaaggagtcaagctcaacttgcagagccaataaaagccccatggggaaactggcctcatactgttgtctatgcagtccctgtacagggttcctgacctgtggtcagtaaagaatgtcactttctagcaggtccaagagctccaagtttattgtgggaccttaagaggagaggatcacccaactcacaggtatttgaggatgcaaacccatggctaggctcagctttaaaaggtcttatctgtgattccttgtggaaaacatttccatcagtgccaatccaaaaagcctatgtagaaatagttattcttgctgcactttatgcaaataatcaggccaagtgtaagactaaagtctattttgcaaagcactcagtcctaccataatttttttaacaaaaatgaggactggagagacagaaattatgttccaaaatttgccatacatttgtcattaaatgctaaactcattagttgtttttaagttttcatctaccttttagaccaaccctgcttgctcctgtgaaccaagcagcaatctccagctgcagctcagaaagaacaggagggatgggtaatgtagaaatatggatcaatattctagctctgaacaattatcctgcaaaccctgccaggtgatggaataaatagggtgcccattaccaggaggtttcctttttgggaaagtaagaccaagtgaactaaccaaagccaagcatcacgtatccaaatcctggcaagcataactatagctaccagttatctgggtgtgtcacaagacatccttttctctctcttgttggaggagaactgggttccacagcttcactttagcatttgtcttatgataaggaggccatgcaatgccccatccgagatacatttttgtcccagactgaattccaagcttcacatcaaagccttaggaaggaaaatcggatcttagggatccagaggcaaatgacaacagaagttaaaaggcacagcacaggtgagcgtgactgattcctgctgattaagccaaccccaaacttcctgtttcatggataaaggccacgttaatatccatggcataaatgaggtctacggaactccaaggctactgacagcaggggagatagggcatacgtgggtaagagcggatgattcccacccctaggcccccctgcttcatgggtgcaagttgctttaacacccatggtggcacctaccaaggtcactggaacttggggatgcaaggatagaagatggaaagaggatgctcttccctctctacctcacatacctaaggtatctgctggaagaaaagggaaccaggtatgcctgctcccctctttctagatgggtagccattcatcttcagtctgtatccctttcaaatgcatcctgaacctctgggactcctttaaaaggcaccttctttttgcctttcttctcctctgttctctcttcactaataggtaattgtgtctccatactacaaggcactctcctcagatgcatcctccaaactagaaagagttggtttcccaaaccttaaactggttagcttaggattgggctcaggggaaggggacccagaagcccaacgtgccagcaaaagggtaaagttttttttgccagtcaggcttttggcctccctctacgtgtgcaaactggcaaaaggcctcaggatctttgagctgtccttaccctcccttcatttcgttttgatacatagtttctaataacctggtttgtctgttcttgccttcaggccattaaactctaaacaatcatgcaagcagagcctctgacaatggccctttctgctgtgaacccttagatgggcctctgccgtttccccaaaacagcgccccctctcagcaggaagcagttaaggtcagtcttcatccttatccttaatctaaacggcagctggatgtacctctttagagggaggaatgagacagctaggtgggagggggtccccgaaaaacctccagtcagcctgtgcactagagtagagcctcagaaagttcaccatgtttgcactggggaggagcctggtccctccttttcctgtgtggaacctggaattcaagctgtgggcaggaagtgctctatcagggactctagccttgcagaggctcccggttccccctttgtcttctttttcacccaataaaaccttgctcaccctctccaacagtctgcgagcctaaattttcttggccatgggacagacaaggaccctctctttagctgaactaaggaaaagtcctgcaacacctccaacaactaacaattgtttccagtgcacctccattctccaggagggagaaggccaaagcacataagtggagaatgcacacgttagcccattttcaatagtttaatactttaaaaaatagtagtgttgctgactttcaagctttagcatctacacgtgctagattcacttattgactcattaaactattcttttaccaatgagcttaccatatgccaaaaactatgctatactgggaacccaaaggcacacagaaaaactagaagactatttctgcaccagtcaagaagcacacaaatggacactcatgaagaaactatagacccaaagaaaaccattgacaatataggacaaatggcatatcaagtcctgaggaaagagattagtaaggaggttaatattttaaaaaaaatagaaaagggagaaataatgaatcactggaaatggtcccatcaacctgcagttcttcactatttttcaacttaaaattggatacatttatagtcacttgacctctctaggtcccaatctccccatgttcaaagtacatatcctattgctagctctctctactttgctaagtctattgtgaaaatatcacaatataaaatactttgaagccttttagggaagcttaaggtcttctacaaataaaataacaagaagtaccacttggctgaaaaatgaaagaggtaggacaccaatggtagtaaatcacttgtatcactttgttcagaaattatttcatttttttcattttattgaatatagacaaattatagttgtatatctttatgaagtacaaagtgatactatgatatatgtatacagtctggaatgattaaatcaagctaattaacatagccatcacctcaaatacctaccatcgattctcctaactgaatcattgtaccctttgaccaatatctccccatttcccctactcccagcctctgggaaccaccattctactctctgcttctatgagtttgattgttttagattccacttgtaagtgagaacatatggtatttgtttttctttgctagcttagctgacttagcataatgtctgcttggtccacccatgtggtcaaaaatggcaaaatttcctcatttttaaggctgaagaatatttcattgtgtgtgtgtgtgtgtgtatatatatatatatatcacattttctttatccatttcatctcacacctattaaaatggcaataataaaaagatgaaagacaagtcttggcaaggatatggagaaaggggaacccttgttcactactgatgggaatgtaaatttgtacagagctggttcaagggaaatccaagaacatggctgtgaggcaaggaccagatgagggtattaagggactatcattacagtggaaaaattaaccctatcttttttgagagaagccagttacaatgcttgatgctatccctgacacactctctctagcaacaagttccttttctttcggcccttaagtaaggctataagaagaacagaacaaaacagcaaggagatgaataccaaagcactggccacacttttcccctgtgggcctgtcttattccattcatgctgctataaaaaataccacaaactgtgtattttataaataatagaaatttaattctcacagctctggaggctgggaagtccaaggtcaaggtgccagtagattaagtgtctggtgaagtcttgctctctgcttccaagacagtacattgtttctgtatcctcacgtggacgaaggcagaagggtaaacaggcataaagggcctagctagttcccccaagcccttttaaaagggcaccaatcccattcatgacggctctgtcctcatgacctaatcacctcaaaggctccacctcctaatattatcacactgggttgttttttgttgttgttgttttgacaaggtctccccctgttgcccaggctgatgtgtagtggcacaatgtcagctcactgcagcctcaacttccccagactcaagtgattttcctgtctcagcctcctaagtagctggaactacaggagtgcgccaccagctaatttttgcatttttttttttgtagaaacagtttcgccatgttgcccaggctctcactgggtcttatgttccaacatacgaatttgtctgggggatgggtgacacatacattcaaaccatagcagggccttcaataggtcattagagagagagccaaggaacaccagtgtggctttttgcattgaacaacgataagttaatggaagtttaacatagcccacagtctgtagtcagaggtcagaggagtaaggccttacatgctacagatgcccacaaaggagataagaggaagccagaagaaatagaaatttgtttgtcagtggataaagaacaaggccaaggttttcttaaatagtgattgatgaggccctggtttactgtaacagtgtacttgtgattttttaattttgtaaaaattgtcccagtgtgtaattctctgtttatacctgagtgtggggaaatgaattttaaggaaaaagccctatatttcctgataaatcacttctataactaattggttatttaatgattcatctgtgtaaaaagggggactaatggttttaaaataaaatttcatcaacagttgtctctttcataaggtttgaaaacaaagaaaatggagatgatgatgcaggtgtggctctttaacagaacccacaggggagcacacaggctctggggagagcaaacaaggcaagggctcagaagactaggttctaatcccaatgcccctttctcccggatatttaatcatagtcaaattacttaatgaccccaaagtacagtgatttccttaatattttacaaaagaataaaagcactatggacttttcttcaaacagacatatcacccctggcctcaggagtttaatattcagtgactctttggcaggtcgtgaactgcccatcagtcccagtggttgttatgaatgtcctctgctcatccatccagatcccctccccatctttcttcatcctgactcttcctgggagggtgatcaatatagacctgccaataggctcctgcaccctctagcttctaattgcattctgtccacgggaagccctggtgagagttacatcattccaggattgggagcaacctgtaagaggccccggacagctgtgtccatcctctgaaaatgaaggctgttctcaggtgacctgctctacccagatctttttccttccaggttctttttttttttttttgagatggagtctcactctgtcacccaggctggggtgcagtggcacaatctcagctgactgcagcctctgcctcccaagctcaagtgatcccctgcctcagcctgctgagtagctgggactacaggcgtgccccaccacactcagctaatttttgtccttttagtagagatggggttttgccatgttggccaggctgatcttgaatgcctggcctcaaatgatctgtctgcttcggcctcccaaaattctgggattacaggcatgagccacagtacttggcctccttccaggctctgataaatgtttcttcccctcatctcttaaagcctaggggaggttatggactgaatgtttgtgtccctcacaaaatttatatgttgaaatctaatcccaatgtgatggcatgaggaagtagggcctttgagaggtgattaggacatgagggtggaacccttgtgaatgggattagtgcccttataaggggctgaaaagaccagaattctaccccttcaccatgtgaggacacagcaagaaggcatcctctattaaccagaaaatgggcactcattagacaccggatctggacttcacagcctccagcattgtgagacagacatttctgttgtttatgagccacctggtttaaggtgtcttgttttagcagcccaaatggacaaacacagggaggtaagagcccctaccagcccctgtccaccagaaagatggggatctgaacagaagccagaggtgtaactggaatggactcaggtgttttcctcacagagcagataactaaagctagaattcttgataagaaaaatgggataaagaaataacagttgcaaaggtaagaagcagagacagagttatagtccagaggccaaaaggataattttaagaagaaggagtaggtctgaaagtgatgactgagactagcccttggctgtggtgattaagatctttggtgacaatagaaaatgtaacaataggagtggtctgttgtggtgatagaatctgcagaccggtggaagtccatgggcccatttaccatgccacaggcaaagagtatattaaactcccacgaagagaagtgcctctggattcattttgccaacattcactgtactgatattagccatggacttgcagagggtttatttactattgcagcctggctctctgctgtgtctgaaagttgaccttggtgtcctctaagttttatcccagagaaaaagacagcaattgagctattccccaggcacagggggcaaaatttgaaattgacataaaaccaagattccctgtctgacttgggcctctgggattgtattgctgcatcctgtggtggcaaaaagagtatcctgggcagtaagtgatttcaattccacttaaagcaacaagtatttgctgaaaaccaaccatattcttagtaagaagatgggtgctgtaggagacagagaattaaatgaaatcattccttccctccaggagcaaacagcttcatgctagaaataaagctaactcaaatgcaacaaacagaagacacacacacacacacacacacacacacacacacacacagagagagtacttttcaagattagtaacaaagagattatctacagagataaagacagaagaatccaatgtctgcatgttttgttattcatgtgtataagttttctaactttcctacattcagtgtgaattagtattgaaatcagaataaaaaagcaatatttttttaaaagcctaatttttagaaattgatagtaaaaaatgagacagccctgggctgaagtcccaggcgtccttcttcctaacaacttgaacttagccaagttgcttaactacttggtgcctaaatgttctcatttataaaactgggaagatggcatggagaggcaatgggcattttctggcaagaaactaagaaaaaaggccataaccaataagtaacttatggaaatgaaaaaatcttttaagttttataatcttgctttagttgatatcttaaaacaaaattttgaaagttattaagtcactcataaggatttcaggaagcactgcagtgtaatatgcttaagaatggagatggttcaaatgctagctcggctacttagcaatacctgtcctcaaataagttatttcaccctacctgagtctgttacttcatctctaaaatggagataatcctaaaacgtacctcacaggaaccttgtgaagataatgcatgtaaaatgctatcacagtccttggcatggaataagtgtctaattaacttttatatataattataattatcatctaaaaagtttagtggtgtttcagacaaatctaagagaagataagcatgaataggtatatgtctttttcatctttgtatttcaccagtgctttgcacagggcctgtcacaaagtagggatctgagaaatacttgtgaatgaagaatgaatgaatgaatgggctgattttcctatttgatcaaaagccacatccatatatgactaaatctgagtatataaaagaagataaaacttgtgtttcaattcaatctagtgagttaaattaaaagaagaaagggaggaaggcaaattaaaagaagaaagggaggaaaagaagcaggaaagagggaaataagacaaaaagaaaaaaaaaaaaacaaaacagaagttggccaggagaaagggtgtctccatccttaaatattttactccttattgtgtgatatattattttgtcagcttcttctagctacaattcccaaggaagggatagagagcagcagcttccaagtaatgacccatgtgggtataaagagaaatttttatcatattagaaaaaatatatttatatacatgctaccaactttacctagaagagaagagcaagggattggaaaacaaattagcataaaatccctgctccagctttttacacatacagatgttttcctgcatatttatccatccttctgagcactgctcaaatgttacatcctcagagaagctctcctggacccctcatcctgggctggatactctgtcacatgctctaatagtgtctgatacccttccactagaacagggatcactgttgtaattaggtaattatttgggtaattaattgtttaacatctgtgtccagtgtcagtatgcaagcaagctccatgaaggcagtgttcctgtctgcctgttcaccccaaaatcaccaacacttgcatatgccttgcatgaaacaggtaagtgaacataaatgtgtataaggttggcatccattctttgtgcattctgtgtttgtgaatttgcccactcaataaaatgcatttgtaacctcaacatcgatacttgccacatttctgtggtcatttttgggcatcacagagaagtgaaaaatttgtcacccaacatgtacattccccaagtgaagcagaacaaagcaaagctccaccttcttgctccatctctcatactgtaaacaagggtctttttctgatctattaaatgccaggttgttggggtgggttttcttttgcatttttgtacataatggccccaaaagaacagtgctgaagtgctgtctcttgttcctgagtacaagaagaatatgatgtgccttacagaggaaacatgagtgatagaagcttcattcaggctcaggttaaacagctcaggctgtgtcccatgacttcagtgttaatgaattagctatatgttaaataaggcatctttaaataaaagtaaacatttaaaaagtttacatattaatcaattaacaaaaatgttgtgaagaaacagccagtagcacgtgcctgtagttctggtttctcgggaagctaaggtgggaggattacttgagcccaggagttcgaactgcagtgcactatgattgcaccactgcactccagcctgggcaacagagtgagaccctatctcttaaaaacaaaaaaaatattgtaatcagaggctctcaggaactcaaccctggatttcccctaggggcaatggttcattatttgctaattcagcgtttgtggagactttatacaacaatttcctatgaaaaatcaggatcaactatatatatacatagaatgtatatgtgtatatatattttacatatttgtgtgtatacatgcacatgtgtatatatgtatgtttagtagtttttaaccattttggtgttatacacctgttgtaaaaatttaaggaagacgtggatactaggggctgagggttgccacaaagggaggtatgtacatatatacagccctgtgctatgcatctccagggcaggagacagggtgttgacattcacagtatagcctaagtgaatattcctactccatagaattgttcagtgtggtgacacttcatgcaaataaatacatgtatacacatacacatttgcataagattctgggcatttgtggcctcctatcgtgtacctcaggtaaaaatcctgacagagaaataatagatacacaaatataaatatatattatatatggcacattcaattttacttcaaatgttttacataggctaaaattgaaactaaaatgctttgcatttcagccaccaccaacagggactagacaattccaaaatatatgtatccccagaagaaagataatttgttgtgaaacactggctaaagacattccctaaggtaaactaaacacaggcagaaaactgagagttgaaaaaaaatatatacatatatagagagagagatgagagttgaatatctatatgtatatatagatatgtatatatagagagagatgtgtgtgtgtgtgtatatatatatatatatatagagagagagagagagagagagagacagaggagagagagagcacaacaagaatacgaaggttggccaggtgctgtggctcaagcctgaatcccagcattttgggaggccaaggcgggtagatcacgaggtcaagagatcgataccatcctgggcaacatgatgaaaccctatctctactgaaaatacaaaaaattagctgcgcatggtggtgcacacctgtactcccagctactcaggaggctgaggcaggaggatcacttgaacccaggagacagaggttgcagtgagccaagattgtgccactgcactccagcctggcgacagagtgagactccatctcaaacaaacaaacaaacaaaataccaaggttaacctgccccgtttgctttcctaagagtctaagattctctggattctcaggtctgtatggtgggcagcaatgtaaatttaagcttctctgacatctaagttctttggagacagtaactattaaacacctgactctgtcccttgaataacagacatttcttagtaaagcttttaattagatctgttggttgaggatgaaaatagaaagacaccagaaggaaaaaaaaaattcatccctgtaaatggtcctgtggaaatagtaactaaaacaattatactgttaataattcaatgttggtttaaaactatacaattgtgagttatttatacagaccagagttggcatgtgttgtaccacaggtggatgtgaggtcaccaagaaaccacttcacagttttcccagaagtgtagcgtcaaaaaggtcacttgtggtaaaagatcttttggattagtcttttaaatcaatgcatgaattaaagacaatttacatataaataggctaatactctggctttgaaattaaatggatttttaaaagatttaagtaactgcagaaaaggtcagttaggcagtaagtgtacataatgtgattcttgaaaactgctgtcttgttggtttattaatattttgtattcattgtcagtgttgttctaaaattgtgtgcataattagcaatgcaccaaagtcaacggcaggtcccaaaagtaaggaaagcggaatttacaaatcagtgaaggaaggacaagtctagatttggacatgaaaatagtcaaaattaacctttgcctatatattaatacacattagattcaaatatgtcacaacatattctaaataagcatggcatcactcgctccagttaaatttaccttggcatttagcctcactgataaattttcaactcttccaaaatacaaaagctgcagtagtctcctgagttatcacaacaggatcatgattgtaatttgaaatcctgattccccttttagggaacagaaacctgcagtttttccaactgtaatgaaaggatagagcgaaacttccataggatcaaaccacattccattaccaccactcctctgaacattaatgtaccttaaaacatattgaaccataggatgaatatatggagcaggggcatttttaggagagtgaaactattctgtatgatactacgagagatacatgatgttacatacttgtccaaacacacaggactatgacaaaagattgagtcctaatgtaaacgagggatgacttcagttaacaatagtgtagcaatattggttaatcaattataacaaatgtgtcaatccaatgcaagatgttaaccataatgaatactgtgggcaaagggaggggatttgtgggaaacctctgtactgtactttctgctcagtttttcagtaaaactaaatttgctgtagaaaatcgtctgttttttaaaatagtgaaccaaatgtaataatgcactcaaagactctttttagacaaatggtttataaactatattcagaggagccctagtggtcctttgctggccatttggtttaggagtgtttgggaaaatagagtaggagagaagagggaacaatgaagaaaagactgctcaagctggccccttatctttcacccctgtttcaaacaaagcaacaaccttttcacctgtacatattgtttctccacattggagcccagtaaagaagggtttctcagctaaagagaaaaaaaaaacatgaaaatcaccaatgtatgctcaataaagtatcttgctacataaatcagcaactcaaagaagaaaaagttaaattataaaaaccttgctaataatgtacactaattccctcagctacttaataaacatttaactaaaactttctgcctgaccattattacttcctatgattgggctaagcataagctaaatgactaccttggaagaactccaactaagaagtatttatttcacatcaacaatgaaccagtactctgttagaacatgcaacatgctttggaaagacaggtgaaatacaaagcatcattccagctgtccagaagcttatcatcttacaggacagagaacatgaacacaacaaaatgcagaaacaatataatacacctgaggcacccagcacccaacttgatgagctaaaaaatagatttcaggtcttctgtcaggtgttaacaaattgtcaactctgaataatgtgagggccagtatgaatgagaacagtccaatccccagttaagccccacttttctaaatcttcttctctctttaaaaaagcaaagtgaatgctaacgtagtctatcagtaatggacagtgtcctcataaaaagacatatgtaaaaaggaggggaagtggaaggtaagcagtgcttactattttatcatattcaattgtatacacacctcctctcaaaattggtgtccccctatcagtagttactaacaagttagttcccaggatcttgcagatggtgggctggtttcagacaaaggcacagtggtccagaggatctggcaacctctttcaggggctgttgggagatgccctgacggcagcagaagcagcctccaatgaggatggcttcctgctcaagacctcctcacactcctcttgcataaataaatgatttagacaccgttttctcctctaatagccagcactacaccaaagagaaaacactccgctattgatgacaggagagggctttttttgtaagtgtgtatgtgtgttatgctataaattaccctgttggtgggtgtaaaaataaatatccatgtatatagttgtgtatacacacacacacacacttacacagagagaatatgttacagttaaaatcatgctgtcgacagccactcaaatctagagcaatttatggctctcaatgcagtcacacattcaggataaagacaggatgataataaatactttgaatattaccagcataaataaactgcctgaggagcttaaacatttgcaacatagccttgctggctcacactgacaaccagcagacctgttgccagtgagcgactgaaagatcaaacatgattaaaaatgcaaagatgctgcacccaaatgacatgctttatttgacaatgaactctggactcagaggcaccactgcaatctatgagcaaagtgctttttggtaattcatttgcccactgaggccagctactgaggaatcacaatacaagtcccttttaaagtaggcacagttctttacagccattagtaattccatcttgagactgcccttcgagaaaacaatttctttttttttttttttactgagaattgatggtttgtgttttgtcaaaatgagccccagaagttgttaagaacttgtgtaatacattagctatgagtagccgaataatggtcttcaagtaagtacaggaaaatgaatggctgtgatgaagatggtgggcaggtatccttttactgaaactactaaagcaggggctgaagtcaggttttaaaaaagattcttgtgaccataagacacaggaatgtccagtggaagaaagccagttctagcttggagttttaggaacaagccagtttccttggtgtctcagtatcatttgattctatagtatgttatttcttttatttacatacatatgacattcatgatttctttttaaatatccataaattcaaagtggaatacaatgtcacaatgtcttaagtctcagaataagatgctgagaagaccatgaacaagtgatttctttttctttttctttttttttttgagacagagtgttgctctgtcgcccaggctggagtgcagtgggcaagatctcagctcactacaatctccaacccctgggttcaagcaattctcctacctcagccaccctagtggttgggattacaggtgcctgctaccacgcccagctaatttttctatttttagtacagacagcattttgccatgctggccaggctggtctagaactcctgacctcaggtgatctgcctgcctcagcctcccaaagtgctgggattataggcatgagccatagcgcccagacaaacaagcgggggtttcttaaggaagggcttccaagaaaaactgcttacagcgtggcaagaagtagaacagggaaaggcaagaagccaagcgagggtgtgattcagggtagaatcctctgagggacgttttcccaccagaggcaaggaaactgggctttcactctcactcaccaatcactctgcagctaagagccatcctgggggttcctaaactccaagcacttccagctctcagcagacctagtgaagccagcagctccaattggtcctgcaaagaccattgccgaagcagccattggaaggtaaatacacagaagctggggcagggctcacagatatgttgaaaggtaccagggcagtgctccgacaccttctgctacagcaaagaagcaaatggtccaaaaatcaaaatgagggtagaataaggttggagaattcaaaaagtgcagaaaaaaaataaaagtcccccttctctcacccccaccttccactcacccttcacctagtccttctttccaaaggtaacctttgtttacagttttctataaatccttctaaggaaaaatatacacatatactatgtatctatttaaacattctttttaaaaatatgcagattggacaactgttccactgttctactccttgctttttctcactaaagaatatatcttgtattctagatattatattagatctatatacatattctaaatagagagatgatagattagacagataaatgcaaagaggaaggaagggaaggaaaaatggatggatggatggatggatggatggatggatggatggatggatactacacttcattgatttaaagataaaacagttttccacattttaacatttctgaaataggctgtcttatacttgacagcattttagatttgctaaaatgcagtagatagatatatagctatttatggatggattgacagttcacacatagctctgccacttgagaagtagtgcaggatagtagttaagagtatattaacacattgcttattaatgagatactttcgtacttgaggaataaggacctcttttgatggggctaatattttaataatctgataaattgtttattaactttaaattttcataatgagtccgtaaatgagtttgatttatagttttctattctgtgctgtctctctcagactttggaatccatattacattggcttcataaaaacacactggcagtttttttctttatttgtgctatgggcaattttgtttacttttataattctttgactatgtaatacatgtactgtgtatcaaattcaaaaagtacaaaagggcatgagtaaaaaagtatctctacctgtcttccagctgcctagtcccttcccccagatgcaatcattgtaatccgttgcttttgcgttcctttagttatgtatgacacatacacatatgcacaaggacacacacttttactcaaatgtcggtataatagacacaatgctctgcatcttgcttttttttcacttcatgtgttttgtagattgttccataactatacacagaacctccacatcctatctgatgacttcacagtattccattatgcagatataaaattaattttaccagttttcatttttaaatagaattaacattatcagttccttgaaatgcaaaattatttgcttctgaaagcataaagacctgtggctttttaagatctttgataactgcttcagatttttccgatgttattaaagttctctttcctgttgaatatgtttgggtaacttatttacctgtttaaaaaatacattccttgaagattttcagttacttttgcaaaagttctcctttgaatattttaatttctttagccatggttctttttcctttttcctttgttttttgtttttttttttttaagacagggtcttactctgtcctctgtctgtcacccaggctggagtgcagtggcacgatcagggctcactgcagcctaaacttcctgggctcaagtgatcctcccaccttagcctcttgagtagttgggactactggcatgcgccactacccctgtctaatttttgtattttttgtagagatggggtttcaccatgttacccagcctggtcttgaactcctgggctcaagccatccagctgcctcggcctcccaaagtgttaagattataggcttgagccactgggactgtctgctttccattttttgtttttgtactccctaactttttgagtaagtgaatttcattgcttggcattgttttcaaggtgtgttagtctgttttcatgctgctgatgaagacatacccaagactgggaagaaaaagaggtttaattagacttacagttccacatgacaggggaggcctcagaatcatggcgggaggtgaaaggcacttcttacatggtggcagcaagagaaaatgagtaggaagcaaaagcagaaacccctgataaacccatcagatcacgtaagacttattcactatcatgagaatagcatgggaaagaccagcccccatgattcaattacctccccctaggtacctcccacaacacgtgggaattcggggagatacaactcaagctgagattttaatggggacacagcgaaaccatatcacaaggagacagtatttgagcttatttatgattcttatggatttatttttaaattagaaaacctaatttcttatttttatctttattatttagttctttctgcattttttccagttttttggctgtccctttcttaagtcagatgcataattcctttatttttattcttttttaaatattcaggtgttaaaggctgtatacattttcttctaagcgaggctttagctgtagcccatagctcagatgtgttatattttcattatcaatggtgtctagatatttttcaagttgggtttaaaatgtttctttgaattaagagttgtttatcaaagagggttgttgtttgtttgtttgttttgagatggagtcttggtctgtcccccaggctggagtgcagtggcacaatcttggctcactgcaacctctgcttcctgggtcaagcaattcccctgcctcagcctccttcatagctgagattacaggtgtgtgccaccacactcaactaatgtttgtatttttagtagaaacaacgtttcaccatgttggccaggctggtctcgaactcctgacctctggtgatctgctcacctcggcctcccagagtatcaaagagttttaaaatatccagattgtaaggttttgataaaactgatttctaatttattgcattgtaatcaggtaatggggactttatttgtacttcagcttcttgaaatttcctgcaatttcttcataacttataaaggccatgtgtttgtattacattgttttattatttgatatattttgaaccacatattttagaggggctttcctatcacaaacatatttcaaagttgtttgcaaaatattttgcattttctaatcaccataagtgaagtgattagaaaacacatcagggcttctgtggctcaggatttggtgcttgcctcacatagacacaaccagtaactcttactcttgtgccaaatgatgtaattgccctaggaaaatgtttctacacctctcttgcccactttcattgaagaaatggtgactgaatctgaatgtcaggaagggttgtgggttgtggatatggcaactgcaaaactgcagacaatagagatgtacactgcttttgtggtagggacaggatttgagcagtggaaaggcataaataagaaaaagagaaattaattcatgattaagacagattctggcataaagaaattgcagtagtagtagtagtagtagtagtagtagttagtgctgaataccgtatctattttctttcatcagaatctgctggttccatttcatagttcagaggtctcacaaattcaggcaatattcacagctgtggacatagtaacttaggcatattttgcattattaaacgattgatgctatctttaaatttaggttgcaacataacatacatgaaatctgataccaagtcttcacattggcaactagatgggcattgaacacaaaactagaaattgttttatttttataaaatatttaataagatttaattaaagtgtcataaaaatccagctacattgaaatgtttgatttaaatgttttttattagctaacccattcttcattttgctttttaaattctaatgtataattttgaatattgtgcaagaaatatgactttcttaaaaacattaaaaattaattttaattttttcaatgtataattaatttatatgcttgaggaaaatatattcaaattgtatacattttaaatacaaatgcagtttaatttctaattctttagatcagggatcagcaaactttttctgtaaagaaccagacagtaaacattttgggctgttacaacgactcttctctgtcactgccctagcacaaaaggaatcacagacaatgcataagtgaatgggagtggctagagttggccctggggccttagtttgcagatccctgtattagatcataactgccaatagacaaaaagtatcttaaaaaaaaaccccttgattataacaacatgacaattttactgaaatgaagatgagaaaaaataacttaattggaataaatatataataatttaagaaatatttcagtcttttaaaaaactcactaaaatgtcatcagcccaataacagaacatgtacaataataatcaagagctgttgtctttgatatttggtcaattttcaatcacgtaaaaactagggcttcacctatacatttagattttgtccttaaaaaagttatctcatggcagaggataaaaaacacttctttaatggcttactagctggatttgttaatttttaaatatttagacagatggtatatggcctcctttttgccctgggccccataaaccttagatgtaggcctgaatacaacagtgatcaagagacaaaggccctactgtcttgaattacagtctagtaaattctagtgcacatccattgactctaatttagaccagtcaatcatctattctcacatgcactactgcaatagctttttttttttttttttttgagactgagtcttgttctgttgcccaggctggagtgcagtggcatgttcttggctcactgcaacctcctcctcccaggttcaagtgattcttgtgcatcagcctctcaagtagctgggatcacaggtgtgcaccaccacgccctgctagtttttgtatttttagtatagatgggatttcacccggcctcccaaaatgttgggattacaggtgtactgtacccactgtacccagcctgcaataggttttttattgctctctctatatctattcttgccctcaccaacctattttccacataacaaattaatatgttaaaaacataaactatcacctctttcctaaaagctcttcaattgttttccattacattccagattaaatccaaagtcttttatgattagtattattatttttgagacagagtttcgctcttgttgcccaggctagagtgcaatggcgcaatctcggctcactgcaacctctacctcccaggttcaagcgattctcctgcctcagcctcccacgtagctgggatcacaggcatgtgccaccgtgcccagctaattttgtatttttagtagagacagggtttctccatgttggtcaggctggtctccaactctcgccctcaggtgatccacctgcctcagcctcccaaagtgctgggattacaggcatgagccactgcgcctggcccaaagtctttttttataacatatgaaatcttgttcttccctatcttccaactttatcttgtgcacttccttccttgcccagtattatctggccttttattgtacttctaacatattgaggcatttcttgcctcgggacctttgcacatgcaatcatctggctacagtgtttctcctttccctactcctttttcggggctacttttttcatttttacatctctgcttaaacattttcacctccaagaagacttgtaagtccattcagtctaacatatatgattcttgctatattctgtcactgcatcctgttcaatttccttcacagccataggaagaaaacctgtaattctatatatttatctgtttacttgtatatttcctattctgtaaactctttgagagccaggataatttttattttgtttatcacttccagtgcccacaatgcctggaaatcatacatactcaaaagatagttgttaaaaaagtaaatgaatatcaattcatttgttgaacaaataaatatgaaatggataggcacattctggacctatcgaaccattctagcatgaagcctttattcccagagtgatagcaatatcagggtccccccaactaatgattttcaagcccactcagatcctttattcatgctgtatttccaagctgaatttccttcccccacttctctctgccttctcaaatatttatttctttcactaattcaaacacacttctctcaacaagtctttggtacccttttcagccccaaataataggtcttgatttctacatttattatctgaatcattcactttagtatcatcttacggtgcctaattctttctaaatctaagttccttccatagtgtatgtagtagagaccatgtgcacttaatccagccagcagcatggagtggaaccccaaaacatattgatatcattggcagccttagcctgtgttccccatctgactcttacatcccactcaggaaagcagaccctaaacaaaggcttacaactaggtagtttattttgggaaaagaaccctagataatcaaattgaggaacgagggagagtaaaacaggggaaaagggtatcttaaatcagattccctagaagtacactctgaaatgggtacgcttgtacaagaaattgattgaaatagtgccctcaggagaaacctatggggaaatgagggagtaggatgggccagggaagaagccacggaaagatatggcttcagctggagtccagccatggcccaaacccagagtatggacaagagtatggagtatgaacagcaccacagagttattccccttgacagcttctgttagtccttggctgtggactgcccttgaccaggcataggggatcctctaaggtatttctggggaagttcatttccctcaatagagggttaattctcctgagatgagttcagctgtgagaccttagtatccaacactctaagcagctggggcatgggtgtgttgacccactaatggtggtcttggtaggggaccaacagcatcctctacagagggaaatacaatataagtatacattctcaagtcgataacaactacaggcacctagggctcaacctgctggaatcttccgagaaaacttacatgcttcagatgtatatgtataatgtgcttcagacatgtctaaacaaggcatggaagagattatttatccaccaactcccagtccccaccagtcaggggttattccgtgggttaataactctcttatacttccaggttgccagtctcactcccaaggtggtagaaaatagggatgaaaatagggatgcccaatgccacttaggcaagaggcttcaggtcacacttgccctaacctggtttccacagcgacagccctaatacagaaagggagacaagaggatgtgagatgtgtcacaggaagtgtccaatccactaactacttgccctagatctttggagaattaaataacctgtcctactgctatgcatgacagaagccctaccagtgggggctagttggccttcacattggctcctggccttctcattggctcatcttaggtgtcttgggctatctgcctgatacacattttcagttaggcacgtcatgtgaccttacagaccaaggttatgcaaaagagaaatgaaaattaacttattaatcttatgacagtattgggctctctgtatttttctcagggtccctgacactgatggtattatctcattctttggtgatgattatgtgtggaatgtttcatttaaaaattccagtgttgtctctcatgaaagcctgatacggtaggctctatatacatactggtgatgatcgtaatatgtgtgtagcacaaagtagtccctgaacaacatttttaatggcaaacagtgattccttcccccaacaaattaagtaaaaatgataaattcctacattgaaagaaatcggcaaaacagaacatttccttcaattcacataatcattaagaagtatcattcataaggggttagaaacatataatatccaaccttcctgtttaacagagcccagcaaggactcaaatgcacagttcattactgtcattatgagagaatttctgccaacaagttacagtcaggttactatcattcaatcatgttgctaataggactaatttcatggtaattggcatattctagaccagagaagaactcaaatggttgtggaatcattaatgatttatgctttcatggtaaaaatgacaatctattagtttaccagatgctggatcaagccatgggccattaacaggagggtgttctcagaacgttttcagaacaaataccagctactttattttcagcttgcagacataatcacatgcatcccctatcagatccaccactatactgtcagatacatcataaattaaaggctccatgggctcattattggctcttattcgtaaaagcaacacgttgccctggcaagacccaaaatattaaatgggcatttaaagaaactgcaaaatgtgtagttttggaaaaatgaaatcttccttaaaactatttacagtactcaagttttcaaaatgtccttcatcctcgattttgcctcaatatttgtttttttgttttttgttttttaataaaagcaaagaaaaaagaaacaaattcctgccctgtcaggaaagcttttaggccgagtctcttaggaactgggtgtcatttattagtaaacctaatatgctgccttcagaagaacagaggtgccagcatcaaataaacaggcttaaaaaaaaaaattccaggaaacttaatgtacactacgttagtaaccaggacaactcttgtttcccagcaatctatggcatagatacgttggtatgagataaagcctccatctttcctgaatcttcaaaacaaatgtaaagctgattaaaattcctcttctgtcttgcctatgtacaaggctgctctcccaataccaagcaatcctatttggagacaatgggatgtttgccaaaccaaaccgaaataaataaataaataaataaataggagagtttctgttttcaactgttgatggcatcacccttgccatttgtggtgatcagattatccacctagaaagtgtaagaaaacaagtcttccggttagcacttactgggcaaagggctgagtttcaagaatcacaactgaaatcggtggggttgctctttgttaatgggaaaaagcaccatgttaaagtgaccagggcctggtgtgtgcaccgcatgatctgtgagcatgagttgtgtgtgcaacatgcttcctcgtgattaccgcctatacggacagtcactgtgcattagtgcattggtagccagccgccgccaaaaacaggatggcattcttccatcgtgattagaggttttgtgagcattttgggatgggggacactttctcagtaaagactcttccgccccattcacgttcattcagctctttctaggggaaattaaaagctgcagtgataatcccttaaggacaacttggaagagtataaaaggtgcagtgtataagcaattggatgagaaagccttttatgtggaaagttactgaatgggtggctgagggtggtgtgagtggggagaaagaggggcagcttttcttttctaaggtggggagcagcggggatatcatggcacttcagttccctttaatcatccagattcctacgctgtccctgcccctggtgtcaccttgttttgcagtgccagctagctcctccctgccattttcccctcaaagagggagaggggagcaatgcgatttttggtaaggacccagtttctcgctgaatgccaactcagccagctggcaccgaacaggccaagccttcttcagaagaggttagcaaaatccaaattagcatggtccattttaaaaacttgcttttatttaaagactgattcatgacaaacagtggctcccgtactgaggtctggcaccccaggggctggcatccaaccaaacacatgcaactaattgccaccctcggatgacacgcaactaacaagctccattttgaggcagtagattcactaagaatgtaaccccggaaggcagcggaggcagaaaagctcctttcataaccctgtcctaggctaaccatggcagcagagagcctgaaaaacacttttgtttcattgcaccaacaatttagctccacggagggctacaaacacggctaacttgctgaaaagtgatcaagggcactgcgatccccctcatggttataggaggcaggggctctgcttttctctttgctcaaggaaacacacaaaattgcctactatcttgaaactccgcatcttgcaccatttgcaaatctatcgacccccagtacttccccttatactttagttcagatgctctcaggcttcctttgtacaagcaagggctctggagccaggatgcctaggttcaaatcccagctccaccattcattagtaattggcaagtattttaacccatctatgcctcagtttcttcatctataaagtggagagaatattagcacctacattactacgagtaggaacgagtcaatgtaataatgtacataggacaatgcctgacatatcatcactctgttatgaaagctctttgagtctgagatagctcggccttatgaagaaaaaatttccctttgcataagctgcattttagtcaaagttcttgcttccctgtaaacttctagagattcaacctctaagcctttgtttaccattctttctcctctcaactgtccttcctccattgcacagccctgtatgactaaatctcatcatcctccaaaaccattcttcaatgccacctcctccgaggagacttctctgccatcccagctgccatgaatccctgcactcttggcatggccatggcaatttctgcaaacaaatgactgtgttttacttgcctgttatatttccttttctagactgacagatccttttgagcataatccacgagtaactagcacatagtagatactcaatgaatatttggtaaagaagtagatggtcagatgaaagaattgctctgcataaatgagtagctttatactatggttatgctgggcattactcaataggcaggatgggggaatcgtttcttaaggactttcatagttgctttggcccaaattaagagttgtatttaacttgtcatcaactgaggctcataaataaaatctatcaaagaaatatgtcaattaccaccttagtcagcttgggctgccataacaaaacaccaaggattgtgtggcttaaacaacagaaatttatttctcacagttctagaggctgaaagtccaagatcatggtgtcagcagattctgtttctcctgaggcctctctccctggcttgcgtatggctgccttttcgttcaccatgtcacatggtctttcctctgtgtgcttcctcccctagtatctcctcttcttcttcttataagggcaccagttgcattggattaggtcccacccttatgacctcatttaacattaattacctttatttttatttttattttatttatttatttatttttgagatggagtctcgctctgtcacccaggctggagtgcagtggcgcaatctcggctcactgcaagctccgcctcctgggttcgtgccattctcctgccttagcctcccgaggagctgggactacaggcacccaccaccacacctggctaattttgtttttgtatttttggtagagatggggtttcaccgtgttagccaggatggtctcaatctcctcacctcgtgatctgcccacctcggcctcccaaagtgctgggattacaggtgtgagccaccgtgccctgcctacctttaaaggggtaattaaggttacctttaaaagttgtctccaaatacagtcacattagggattcaggcttcagtgtatcaattcaggggaatacaattcaggccatcacaatgacatatacatatagaagcatgaatattctgtatattacttaagtgcataggaggaacttaaccataggaagtccacaagcctttgctccttaagtcctggcatccagatcttcattatgttagcaaaagttcagacaatggaaacaaatgtggcactcaaatacacaactattttatctagatgaaaaattaagctttctttggaatttgtgggattcagttggggggctcagttgcttctctcttagaggcaggaaaacatcagcaccccaggcagcagccacaaccctgtctcctgttaaagccattgcctctcccaagaacaaatgcaaattcccagctaaactcctgtgcactttctaggaggaggctcactttggtccttctaggatcaatttatctgaatcttttcttttgaaggcggacctgcagctttatgtagccctgaaactctgaaccagcttctcatgccagcaccccttctttagtcacttcataattcaaattgctgttatcagcatacactatttgtactgatttgactttttcacattgttttaaatcactaatttcctattaggcagattcctcacatcaataccataagctaatggctcccatggtatttgttcatatctttctcttaagatacttaacactttttacctggtaggaggatgatttatagtcatatgtgtctttcttgccagaccttttaactacttaaggttagaattgcatcaaacccattgttttatcccaaccagtgcttaacatgatatggcacacgtagcagagtcacagtaaaagtttgctgtaattcacatagactttgccaggagtgcatagaaggattaagcatcagaagcaatgcaatcgcaaaggtatctcgtaccatcaaggggtgaggccaacatcttagaaaattaagatcaaatatcatccttcatttttaatttaaagcttctagccagttgacccagaaacatcccacacctccaccatgacttaccaatttgtctgaaataataaagaggaaaatgagaggctattagcgccacttccattctccagtcaatcattgttctaaattattaatcagttgaagtattgccaagaaattttcaggcctctctccaaaagtgtaaagtagtcattttcaagtgaacaattaactattttattcatctagaagttgtagaatttatagacaagctgatttctgtggattttcttccccccttttggatgctggtggaggtaagagaggtctacatgaactacaaatagtttcctttccatcactcacttattaataactagaatcctgtttaaaaggaatgtactaaaatattttctaggctgaagcaggaggattgcttgaacccaggagtttgagactagcctgggcaacatagggacaccctgtctctacaaaaaaaaagaaaaaaaaaaagaaattaaattagctgggtatggtggcatgtgcctgtggccttaactacttatgaagctgaggtgggaggacgccagagcccgggaggtagaggctacagtgagccatgattgtgccactgcaccccagcctgggcagcaaagagatactctgtctcaaaaataaagtaaaataaaatatttcctgaccagttcagcatttataatattgttcctaatagcatgccactcctgactgatcattgctggcaaaagcaaagtgatcgattgtcaccaccctgtttgtccccaggattaacttggtaaagaagtacagccatggtttctgctttcgtggagcttacattctagaggagacagtgaaaaagaaaggtaaatagacaaatgaaacaactacagcaaattttactaaaaaaaaaataaaataaaaaaaggaaaaaagaggctaagataaagaaaggggaggtgtaccttaaataagatgtcgataaagacctcactagcaggaatcatcctccgtggatcaggagaatcctgaaactggggacctcataggcagtccaatccaaagtgtgaataggccatgaacatttttaaaactatatattcagttctggtcatctattgacctcagagacactagatttccagtggcatccactactatgactgcaattgctgaggggtaattttctgagccagagttgtagcatgcaatttgccttgtcattctcatctgatgctcattaatagtcccaacttttatgtaaggtatgtgctttcaaaggtagtgtgatatgtggctaaaaatattgatttttttcttttacacttttgtttcttttaaaaggaggaaaagtgagcactaatttttttatttcaactgtatcttttgaaggttcattatgcatatattttgataatcttgtctatgagaatgaaccctaggacaattaaatatcctttaattttgagatgtgtagtctggaaatacctacatggccgtcctaggctttaggttcattttctttgagaggctcaaccccatattatatcagatatatttacaggtcaaaaggcaagattgaaacaaatttagtttaaagatcttaactggcttttatttgtgattctagaatcagacaaaacctcactgtataaaaaagaatgagtgttccaatgagctgagcagaggaggtttcctttacagctggaaaagggatgaagaaagcagaaacaaagaaccaaaagcaaattggttgtttccaagttactttccttgtaaaggttaaagcagagggacatccttatcatattggctacaactggtctagttgaggatttggctactagttctcccccctgatttcttagaaggtcagatgaaaaacttggttttggcttggtggccaaaacttcagcatgagtaattctattttggtttggactgttgagcttggttcagtagttcagtccaaaccaatggacttctataaattttattcaacatacacgaaacagtttttgtatgtgagatctgtgaaaaatatttttatacttttgcatttaaaattatttgcttatgtataatttggttaatttaattttttaaattgcctaaaatttcccagtaatcaacatgcagtttcaggaattcttaagaactgagaaaagctaactcataaaatgtctctaagagtagacattttaataactattacatttagtaattaatcacaatagcataaaatttcatttattgacatatcattaaatatgacattgttcagattgtgcaatttctgcatacactgaaatcaaagtagtttttctctctctgttagttctgaatattttcataggcccttgaaaaatacattggccctagtcattagttcctggtacctaaagattaaagaggcaatagaatatgtgtgtattcccaggtcttacatggcactagatagtgggggtcttttccccctaaataaagtggatgctattataaccatgcatgactccagttagacccagatgaatgtaccaaaatcactaccatttaaaaagcataaaaaaccttgccctcaatttactgtgatttgcaaactctcctctgaagtttcactgaaccccacttataaatatcatcttgcttctttagcaaattctcaaaccttagtacataagaatcacccagagctcttattaaaaacagattcctgggccctgaccccaaagaatcttatttaatagatctaagtggagcccagaaatcagagtttttaaccttctgaaaccttaaaggttgtataagcctttagaaaacattagttgatgtgagcagggttgatgataacagctggtaagattagtcttgacttgagctactgaacaactcaagtccatttaggctagtctctctcaaccctggctcatactagaatcccctggggcttttaaagcactttacccccaaggattctgatttcttctgtatgggcattggtattttttaaagctaccatataaacaaattgagaaaccctaccagcctaagggcatttctgtcagaaaggattaacccacacactgcggtgatgataaggcctaacactcctacaaaatgcaaacactgaagcagagatttcgcaagactaaaatccatctggagctcttgattcccagtttgtgtcagcctcaacacacccaagttggccttaacagttatggcacaagaaaatgagcccttccctttagttttcatcagctggcagaatgatttagtagctctattataaaagcaactccattataattacagtgtttgaattataaacaaaacaagaaaaatacagaaggaatagtcctttagtcaaaactgtaaaacagaacaatttctggctgcagttaaaagcaaactgaaatattaagagtaagctctccagccctttgattcttgcctctttcccataggagcgacactacacattttttcaattaagcagtttgacaacctgaagaaacccacagtgcatgatttaatgagcatatactgtgtgcatggtaatcggcaagctgacagtttgctcatttcaaactgacaagagagcactacacattagtagaaaggtttcttgggtctcttttcattaaataagctttacagttgaggaacattccaactgtattggcaaagctgtcactaatggtccccaggcaaccttaactctctgtcactctccaagtcctcaagtcttgatgaagaaattgcttcttaaaaaacaaagcacaaaaacaaaatatagatatttaaagttctctggatgttgtcaggggcaaggtggagctttctgagccatgaatccactggtgatttcacagtacatgaattctaacccagtatgtgctggttcttcatgcagatcactttataaactggaattgtttttagaaataatgcccaaactgttaaattattcaatagtttagaaatgattcagtgtactggaaaaaacataggccttggtgacagagagataggggttcgaattctgactaaaatacttctctgtggccttggtcaaattacatcatttctcaggggctcagtttcctaatttatgaaacatggacaataacatctgctttgtatgaacaagatcgtaaaagtctttcgcacagttactgacaacacaggcatacttaaatagagactagtttacccacagaaattcagagtatggggttttaacaaagctaactatagtctgactgtcctgagatttctaccatgagcctttattggagttctataagaagaaaaacagtaagctaacattcactcacaaatgggattttatttaatcctactaagattctgaattttgggtgttattacacctgtttttataaaatctcgaaataagaagggttcttagaggtcatatgaggaatttctgacattttaacttttctgattacaagaatatgaaactactgtttccctctttgctctgcttgtcagaaaactcgagtgaattctcatgctaaatgtatgtttgcaactctgttagcagtagcggttagcagatttgtttcctgattttctatacatatgttagtaaccttacttaaaatagtttataagctaccctgaaggaagttgagatttcttagctaactagtaagatccataacaagaatccatgtcacctgactccaggctaggacacctcacatataacatggaaatgacatagaaaaccccagaagcaagtacagtgaagccatagcttattgcttgggtcctatgccatgaagatgatcaaacatattagccttctagttacgaggaaaaaatatggaagcttcagggtccttatttctaaaatagggataatatatatttctaagatcattgtaaagatttagagagaatattttcaaaatcagccagtgtggcattcgatacatagtaacattttaaaagtctgaaatgttgactctaagaaataattgtagttctactaattacaagtaaaacacaaatgcatagacccttaaacatgatttagaaatcatttatccctccaaacttcacgcactgatgtaaaattctgccccaggctaggtgaagatccatacttgctgtctttctctcatgtcacagagtacatggagatctggaaaagttgtccataaattccaaattcttaatataaacatgtctattggaaatacagactcttttttttttttttttgagacagagtctggctgttgttgctcagtggagtcatcttggctcactgcaacctctgcttcctggagtccagtgattcttttgcctcagcctcccaagcagctcagattcccaagcagcatcatgcctggctaatttttgtatttttagtagagatggagtttcatcgtgttgcccaagctggtctcgaactcctggcctcaagaaatccacccactttggcctcccaaagtgggattacaggcatgagccactgtgcccaaccagaagtacagaactttatcaagaatacacacatgtgacattttcaggtttaataatttatacttcagggtactcacaaaactgggccaaaatcatggtctacctctatgtgaaataccaagtttccctatgtctcacagccatgactccactggtgacttcacagtacacgaattctaacccataaattgactatatccagaatgtagccagacataccataaagatgttcatttatcttcaagggagtccacaaaaatagcactgtagttcctcatatgcataccctaacaaaaatgagtcagtggtgtttccccagagaaaaacgatgctgtgcagtggaagcagctttggaaacagacagattcagatttgaaggctggctctgctatccattagttgtatgacattggacaacatagtatgaacctcttagagccatagattcttccactggcaaatggaggaaacactttgaacttatataactattgtaagcaggggttatgttatgatttaaatgtcccctccaaaaattatgttaaaatttaactgccattgtcatggtatggagaagagggaccatcaagaggtgggaccactgagagatgattaggtcttgagagctctaccttcataaatggattaacatcattatgaagaaagtaggtttgttatcatgagtgagttattataaaaatgagtttggccctctcattggctcattttcattttctcctgcccttctgcttgcctccatgggatgacaagcacaaaggccctcaccagatgccagcaccttgctgttgtacttcccaacttccagaaccatgaaccaaataaatttattttcttttaataaattgcccaatctcgggtattctgttatagcagaaacaaaatggactaagacaaatgatatttaaaatatttaaccattagtatggtaaaggcaccaaccagcataggcttaatgcctgttctggtgcatactaattaaatatgaactccatttgaagaattttgaaggcatccaacttgatcctagatcatgggaggtgcttaaacatatacaacgcattaaatgaagcaaacacgtgttgtaaaacattacaataaaaaacttagcagcagttatactgagatctctatactctccaattacattttttcacctgtgttgtttttattccatgattttattaaatgattgttagcttaaagtgatgagccacttgcgtcttttgactcatgattgagacagtcgtcaaaaaattctagatttgaaaagacataaagtgatctcacttggaattttatcaagtctatattcatgtataatccttatgtcttcttaatttaatgactcctttattatgacacactcttcttctttatctctgataatattttttgtcttaaagttgagtttgtctgatattattatagccactctagacttcctatgctgtttccatggtgtatttatttccatcaatttattttaaacctatctgtgtttttttatttaaaggctatctcttaacagaacatagctgttcttgcttttttatacattctaatcatctcagcatttttttgaatatttatttatttttgtttgtttggtttctttgcccacaaaacttattcattttgtcaatcatttgaaagtagcttgcattcataaagcccttgggcttaggtctttttaaaaaaaattcattcatctgtttttatgtgtttattttttcaagtttcattttagattcagggggtatatttgcatgtttcttacctgggtatattgcatcatgctgaggtttgggatatgaatggtagcattacccaggtactgagcatagtactcaccatttggtttttcaaccttttcccctctcccttcttccctgctctagtagtccccagtgtctattgttaccatcttcacgtccacacgtacccaaagtttagttcctacttacaagtgagaacatgtggcatttagttttctgttcctgcattaaattgctaggataatggtgtctggctgcatccacgtggctgcaaaggacatgattcgattcttttttattactgcataatatcccatgatatacatgtaccaaattttctttatctgatccaccattgatgggcacctaggttgagtccatatctttgctattgtgaatagtgctgtgacaatgaacatgcaagtacatgtgtctttggtagaatgatttgttttcttttggatctatacacagtaatggaatcgctggatcgaatggtagttctgttttaagttctttgggaaatcaccaaactgctttccacagtggccgaactaatttacattcccaccaacagtgtataagcattcctgtttctcagcagcctcaccaacatgtggtttttttttgtttgtttagttttgttttgtttttgttgttttttttttttttactttagccattctgactggtgtgagatggtatctcatggtggttttgatttgtatttctctgatgattagggacaatgagcattttttcatgtttgttggccacttgtatgtctgtctccctttgagaagtttctgttcatgtcttttgcccactttttaatggggttggtttttgcttgttcaatcatttaagttccttatagactccagatattagacctttagtggttgtgtaatttgtgaatattttctgtcatcctgtaggttgtttactctgttgacagtttcttttgctgtgcagaagctctctggtttgattagtctcacttgtcaatttttggttttgttgcaattgcttttgaggacttagtcataaattctttcccaaggctgatgtccagaatggtgtttcctaggttttcctctaggattctcatactttgagttcttacatttaaatctttactccatatggagttagctttgtatatggtgaaatgtaggggtccagtttcattcttctgtatatggctagccagttatcccagcgccatttattaaataaggaaacctttctccattgcttttgttaactttgttgaagatcagatggttgtaagtgtgcagctttatttctgggttctctagtctgttccattggtttctgtgtctgtcttgtaccagtactatactggtttggttactgtagccttgtagtatagcttggagttggaaaatgtgtgcctccagctttgttctttttgtttaagtttgctttggctattcagtctcttttttgattccacatgtactttataatagttttttccagttctgtgaaatatggtagagtagttttataaactacctgtataaaacctgtagattattttgggcagtatggccacattaatgaaattgattcttccaatccatgagcatggaatgtttttccatctgtttgtgtcttctatgatttcttttagcagtgttttgtggttccccttgtagatatatttcatctccttggttagatgtattcctaagtattttatatacttctattttttcaggctattgtaaatgagatttccttcttgatttggctcgcaagttgaacattattggtgtacagaaatgctactgatttctatacattgatttaatgacctgaaactttactgaagttgtttctgagttctaggaggcttttggtggcgtctttgagttttttaggaatagaatcatattgtctgcaaagagagatagtttgatttcttcttttcctattaagatgcattttatttctttctcttgcctgattgctgtggctagcacttccagtactatgttgaataggagtagtaagagtgggcatctttgtcttgttccagttcgcaagggtaatgctttcagtttttgcccattcagtatgatattggctgtggttttatcatagatggctcttattatttagaggtatgttcttcagtgcctactttcttgaagttttttatcatgaagggatgttggattatagcaaaagctttttctacatctagtgagatgattctaaggctttttaaaaatcctatttatgtggtgaatcacatttgtatttgctcatgttggaccaaatttgcatgccagaatgaagcctacttgatcatagtaaattaaccttttgatgtgctgttgaatttggtttgctggtattatgttcaggatttttgcctctatgttcatcagggatattggcctgttgatttctttttttttattgtgtgtttgtcaggtttggtatcagggtgatgcacagaatgagtttgggaggagttgctcctcttcaattttttggaatagttcagtagaattgtaccagctcttctttgtacatcaggtagaattttgctatgacactgctacattttaattagtgattagtccactgacatttagtctgattactgatatgattgcatttagagctgcaagtttattatatgttttctgtttgctcctccacttcttgtttttctttttcttccctctgcaacttttggatcatttttttcttaatttaggattctattttatctttggattttcggtggtttttctaggaattaaaacgtatattcttgatctttcacagtctacttagatttaattttatactatctcatataaaattggaaaaccttgcaactgtataaatccatttgccactgcctccattctttatgctataaagtcatatggattacatctgtacatattacattataaacaccacaagacaatgttataatttttgctttaacaggtcctgtgtagttaaagatcttatcatgaaaaactagtcttttatatttacaatttccaaaattttttcattccttcttgaagacttaagattccatctggtgttatctcactttatagcctgaacaatctttcctttagcatttctgtggggcaggtctgctgataataaatgctcttagtttccttttatctgaaaatgtactaatttgcctttactcacaaaggatatttttgctacacatagaattccggattaacagtgttttgcttttttttttacccctcgtttgtactttaaaaacatcatttcactttttctggcctttataaattctgatgagaagtcatcgttcatttaaagcattgttccaccaaagataccgtgccatttttctctggctactatcaagattctctctttattgctggtcctcaccagttggaatatgatgtacctatgcacagttttcttcaaatgtatcccatttggggttcactgcatttcttgatctatgcatttatgtatttcaccaaatttgaaaatttgggcccattatttcttcaaatattttgttctgtttcattctctttctcttctccttctgagactccaattacatgtaagctagacattttaatttctgttacacaggtccctgagtctctgtttattttttttattcagtcattttaagtctttttttctgtctgttcttccaaaagaaaatttctatggatctatctttaagttcactaacactttcctttgtttcctccagttgctgtaagtatactcaatgagtttttatttcaaatactgtatttttcagtttcaggatttctatttggttctttttgcagtttctgtttactaccttcttattcattatgagtttattttcctattatttgtggagcatggttaaaatagccactttaaaatctttgttaattcccacatttggctcatcttggaattggtctcagataattgctttttgtcttcagaatgagtcacattttattgggtttccatatagcgtgtaatttggggttgtatgatatgcaagtattgatgttattgtatgaagagcttcaatcctgttatagttttctgaagggtattgatttatttgttttagcaggcaattagttatactcaaatttaaaactatcccctgggtagcagctcgaatctcagttcagttcttttatctttgtgataatttgtgtctgctccatcaagaatatacacatgacatatacctcagaattacatgacgtgatctcacttggaattttatcaagtgcatattcatctacaattcttacttcttcttaatataatgatttactatcatgaaatgttctccttcatctctggtaactctttttgtctgaaagtttagtttgtctcatattaataaattcaagggtcaaccagaaatttgggtagtgtttatatacagatttgggagcttcccctctctgcctctcttctttccaagattctgaattcattttcctgtggctatgattgccctgaaccctgttctttgggtcttcaaaccaaaaacactgtgagttttctattggaggatggccacccgaagtgacattaattttagcctgttctcactctaaaagttgtaaaatgggaaactcactctggaccgacctgtgcttccaagttttgaatttcagctcccctccagaatctgtctgcttaattttattctctaatgcttccaggtaatttcttttttcttttcttttttttttttttgtttttggtcttttggtactttatagttgatatctgtgagaatttcggatccagtagaacttacttagccatattggaaatggaaacaagtaaaaacatttaggaaacattcctttgcatttcctaacacctctcctcaaaatacttaacctccgtccattccctcatttagtgacatttgagtttggttttaagtagaaatagaagccaggctcagggcttccttgatcatcttgccaagtacatgagaagacttggaatgaaaacacagcataaagttaaatgatagaatgatagaacatcaatcaattctagctcttagactggtggcatttaatctcaaagcaatgaggcttatacagaatcatgactaccagtgattatctacatggtactttgccacgttattttaccttatttctttggtctcagatatctctaaatcctgcctcattgaaaactgcaatagataatatgccacgagaaacagaatactgaaaatcctaaaatgccaacccagagttggtaattgcacaattccttctaatcataatcattatggcttccacttcttgaaagcttctgtataccagccaccttgctaaccactttacattaattgtcagttaatccttcacaactattctttgagcagttcccataactagcttcattttacggaggaagtaaccagagttccgagaggttgagttcactaagagcacacagcaaacagtagaactctgagtcagtctttgtaaagagaagaaatagcaaaggggttttggagacatcaggcacatactctttactattaggagagaagatagaagtctttctaggagtaagtagggtttctaaaacttaaatagtctacagtcctttttgtcagtaattattgatattaaaatgccacccttccagaaacaatatattttatattgacagcttttatgtttaaaaagaaccttctagccgggagtgatggctcacacctgtaatccctgcactttgggtggctgaggtgggtggatcacttgaggtcaggggttcaagaccagcctggccaacacggtaaaaccccatctctactaaaaatacaaaaattaggtgggcctggtggcgggcacttgtaatcccagctacttgggaggctgaggcacaaaaattgcttaaacccaggaggtagaggttgcggttagctgagatcacaccattgtactccagcctgggcgacagcgagactccatttcaaaaaagaaagccctccttcagggcttaaaacactaacccaaacaataacaaaaggatcaaataattatatgtaaaggctcatatgaaaaggcacataacaccagtgctccattttacctcatttcatttactgcctttaaactttgttttccaggtaaaccatctaaacaggcaggtgacctgccagagaaaaatctggcacattaggaagtaaagatgcctgcctcatcccacaacaagatgcagcaatgtctcacagttctacaactctaggggcaatcctgcccaactttgcaaattttgcataaaccatgggtttcaagtgactttggaatgagagggaaagggaaggcagcacgaaggataagctggctgacattgtaaagtggatacaggaaactgggacttaaccggaagcaggaaaaggaatatagtatctttgtgttctggtacataggattattcaatatacatatttattatacatgttaaattgtctgagacccggaaatgagagatactgttaaaggagtaaagatgagatgaggtaacagaaaaggagaggagtaaatatgagtcctaaggaggggttacatgagcacagtcccctgacgacatgctagagattaccagattagtgcattgctcctactttcttgctattattattattattattatgggttttttttggcagggtctcactctgtcgcctaggctggagtgcaatggcatgatcttagctcactgcaacctccacctcccgggttcaagtgattctcctgcctcagcctcctgagtagctgggattacagacacctgctaccacatccggctaatttttgtatttttggtagagatgaggtttcaccatgttggccaggctggtctcaaactcctgacctcaagtgatccacctacctcggcctcccaaagtactgggattacaggccctttcctgctgtttttaaaaatacatattcaacatatccggtgaaatcattcaaagatgcatacagataagtgattattttactctaacgtaaagcctctttgtaagacctacccttcactgtctgtcccagcatatgccctaggacttcctctgaccatgaacagtaccatgccactgaaggagatctgtttcaacagagcctcctcctgctgctcctaactttatttccattccactagcttctcaaagtcatgcaaaacataacaacctgactttgtaactgtttaaccttactttttacacgtaaaaattattaaatatgtgtaactgctggggggaggataatataatggcatgtcagtcaggtaacaggtaagctacatttcatggaaaagaaggggaatgctttcttcagaaagtgaagtcatcattcttttatttaactgacataatatttataccccaatttttaaaatggcagctacaaatagaagtcgaaagagggtaaattctccaagggaatctagccctgaaattttaccattttaaaagttctattttacaagtacataggaacattactactattataaggatactcacagcaggtcaattatttcaaactctttgaaaaaaaaatcaaaattaagtaaacctacctttcagaagactgctacctcttcggagtcctcagtggcaggatgcacagagcttttatagagggtctaagcaggcaggtattcctaggatacctacaccaaggacaagaaattcagatgattatttcagcagtgatccagatggctctaggtacaatttcattaggaacgttcaccatgaatactgagcattgccacacaggtactgttaaaagcgcagaatgaaggtacatatgtgatttttgcaggcattgtcattaatctgtacattggagactgtggctcaaaagggtgtaagtggttcatacatgatcacacaagaaaaggggcagaaccatgccttaattattcatttctgattcctagtccagggttgtttcagccacatcatctgatcctcctcaagaactggaaagtcctggcactggggctttccattttgcaaaaagatgaggctgacccgtgagtctggtgggaagagtctttctctggttttctggtggtctatgccaagtcacctgtctgaagtgtcctgtgtggccagtttactcactttcccttgaaactctggtgtccacagaatctgaaggaatctgacaagcaaagaaacatgggtttttttggtcccactggcctgagtttgaatcctagtaatgtgtttactacttctgtgtcctatgtagctgctcaacatcactgaggctcactttctatctctatcaaacgggtataataatatttgaagggtacatttatgaagaggattttttttttctaaatgagaataaagtatcaagtacagtttctggcacatgttagatgctagggcaaagtgaaagccccatgacccaccttacttgcagggataaccccaaagtggacaagtgacagggaggctattgagaccttgctgctcataaatcactcaatgacaatgcactaatcccctaactggctggttcctcactgctctgacctctacctctgggtttccttcatgtacacttctttgaaataaaaatatcataaacaccaattcattccctaggatctcatttagaggtaatcgtttccttttttaatctaataatcttggtctacatcatgttacatggtcagctcaatgtagtaattgaaagcagatgatcattcatttaacaagtatttattgagactctactaaggtgtcaggcactattctctatagcagtggacataatagtccaagatcaggccatcatgctgcctaccttctggtagaggagacaaacaaacaaaatacatatgtaaaatacatgagtggttaaatagttctaaggactctggagaaacacaaagtaggaagggagatggtgagtactatgggttgaattctgttcccccaacccctccccatcaggaaaaaagatatgttgaagtcctaaccctcagtacttagaatgtgaccttatttggtaataggattgatacagatataattatttaagttaagatgaagtcatactggagatcggtgggcaggcctctcatccaatatgattggatataagaggatgaccacgtgaagacacagagacacaggggagaaggaacgccatgtgagaataaaggcagagattggagttacatagctgcaagccaaggattgccagcaaatcactagaagttaggaaaaggcaaagaaagattcccctgcagatttcagagggagcatggccctggtgacactttgatttcagacttgtagcctccagaactatgagacaataaatttcggttgttttaagccactcagtatatggtacttagttactgccaccctaggaaatcaatacagtgtgtttggggagattgttgcatttttgagcaaggagatcaggaaagatctcactgaaaaggtaatgtctcagggaagatttgaggtgcaggggacaaccatgatgatggctctggatgaagaaattctaggcagagggaacagaaagtacaaacctcccaggcaggtgcatgtttgtatgttagaacagcagggaggccagtatggctggaatagccaggggagagtggcaggaaaccaggtcagagtgatgacaaggagctggagggtgctagaccttatgggccactctaagaacttaggcttttacttggagcaaggtgggaagccattgcctacttctgagcagaggtgaaccaagatctgacttacattttaataagctctctctggctattcggtaagaataaactgaagaacaaggccacttaggaggctcctgcagttatcctggtgaataaaggtgctagccaggtagcacacaggagagtgaaaactggtcagtcctatgcgaaatattttgaaagcagatccaaaaggatttgcaatagattgcaggtagagatacgcctgacttcttgatagtacatagaattaaattagaaaccgtaacaacttaactgtactgatcatctgaataaattatcttctcaaatgccagaccagccaaagatattagcaacaggtttaacagacagggaataagtaaccagaatatataaggaactcctaaaatcaacaaaaagaaaaaggtaaacaaataaatattttttaaaatcatgattcaaagaaggaacaatggaccatggacataagaaaagcagctcaacctcactgatatggtttggctgtgtccccacccaagtctcaccttgaattgtaactcccacaattcccatgtgtcatgggaggaacctggtgggaggtaattgaatcatgggggtgggtctctcccatgctgttctcatgagagtgaataagtctcgagagatctgatggtttaaaacatgggagtctctctgcacaagctctctatttgtctgctgccatccctgtaagatgtgacttgctcctccttgccttccaccatgattgtgaggccaccccagctacacggaactgtaagtccattaaacttctttctgttgtaaattgcccaatctccagtatgtctttatcagcagcatgaaaactgactaatactctcactaaacatgaggaaaatgcaaatgaaaataatgggattctactttatttctatcagactagttaacatgaaaaagactgacacaattcagtgttgtccaagatatgagaaaaaatagcatattattctagtttacttccagcggaatcatgaattggtatattattctattgagcaattttactgtattatcaaaagtgacagtacacatatgccacggcatagtaactcttcttggggggtataccagggctaagaaacatacacataaggggacatatattaaatcagtataacaaaacttggaaatgacctaaaagtcacccttaaaggcaaatcagtaaataaaatatgctatatttatatgattaaaggacatatggctgttaaaaagaatagattggttttataggcatcagtgtggatgtttcataaatgtcatgggcagaaaagcaacacaaaggaaaatgttaacatacaaacacaatagtatgtattcattgtaggtcggggtccccaaccgccaggcggcagaccagtaccagtctgtggcctgttagggaccaggccacacagcaggaggtgagtggtgggcaagcgagcattaccgcctgagctccacctcctgtcagatcagcggggacattaggttctcataggagcaggaaccctagtgtgaactgtgcatgcgagggatctaggctgcctgctccttatgatgagaccctaacgcctgatgatctgaggtggaacagtttcatcccaaaaccataccccccacctccccatccatggaaaaattatcttccacaaaaccagtccctggtgccaaaaagttggggactgctgctgtggatacacatatatgtatgtaaaagtataaacaacggactagtcaaatacatcccaaatttatggtagggaattttaggcaggggtacaggcagcaaagaaagtggagggtggagggaaggacaggacattattggtgaaaatgatttggttttatcaataacttctttaaaaaggaaaaaaacaacactggaagcaaatctgaccaaacaaaaacagatactcgttttgggatagtgagagtacagatgatcattacactagtttttgtgctcatctgtgcttttttgttttctgcgagtaaagaaaggaggaaagggagggagggatgaatggatggaaggaaggaaggaaggaaggaaggaaggaaggaaggaaggaaggaaggaaagaaggaaggaagggagttaccagttctggactgcacttaagctaatcgctaatcatagatggggatagatgaggttagtttttttgttttgttttgttttgttttgttttgttttgagatggactttcacacttgttgcccaggctgaagtgcaatggcacaatctcggctcactgcaatctctgcctcccaggttcaagcgattctcctgcctcagcctcccaagtagctgggattataggcacgcgccactacgcctggctaattttgtatttttagtagagacggggtttctccatgttggtcaggctggtcgaggttagttttttaaggatgaaactcaaaactatgttttaataatcagcgtgaccattggtgattcctagcagactgtctcagcgtggagggctgaatttcagttcagcccgcagagggaaccatctgtcatttggaatgacaaggagctctctgccaggggaacaccagaacaccggaagcagccatggtcttcactgcatccccactggccctggaaccaccaacactacaggacacaggaacacacaaagtaaaccaagggtacaccatggacatcttttcaacctttttaaaagcacattgcaattttctagaatcaagggaacaatatgcttgattagttcttcagcagatttggcaattttgcttgtcatatttctctctttaaagcaagttggtcattaaccttccatgttctaggacttgagattaggttttccccccacaaaatgaaaactttgcttaaaaaaaaaagagtttgctttaggataattcatttttgctgctaataactgcaagatcctctttgagccaaggaggtcattcttgaaaggggctagaattgtgaagaatgttccttctcttcctggagagagagtctgtgaaggcaaaaaagtttgcaggaaagttcagtaatcatgaagtgaaagcccaaagtgacctgaatacttcctcctgggtcaatattgtatgtttaaaaagaaacaaccaaaccttcaaagaaaaatctggccatccccaaatcccaatacatgaaactagaaggcaggaggcaccagtagaatgctggctttgctctcattgcttggcctccatcacagttacaatagttgcatatcatccttttgtacgtgtcatcctaaaaatgggatttggattggtttctaacaataaaacgagcaaggtagaaaaggaatattatgaataagttaccaatgtaaatatgctattttgcgcctttgaatttgagtgttgataaacatgattccacacatggaaattagacttttcagagctactacactgaatcatttaatttgtctgagtaagtacttataataatgtggctgctctgcactgcaataaacatcgggttttcaaatgaacaaatgaagtatgtgatactccttataaatggaactgcagcaaagggcgttcagctagggagctgtgcactaaaatgggatgggtgataagaacatctctctccagctccactgatagtgaaaggaaagaatcatatggcctctgctgctacattttctgttcctggacagaagcaaggctgaagcctcactgtgaaatgatgggggactgttgctattttgggttgtcacagggtaacttgtcacactactcaggacacatgaggacagataattctgttcctccagattgtggacttgagaatgctttagtaaaatagcacagggatatattttggatagtggttaaggacatgggtttgaatcctgggctctaccaaccaaataggtgcatgattgtacccaagtaatcatcagtcttctccatgctcattttcctatttggtaaaataaggataataactttggcttcctcattaagttattagggggattcagtgagataatttatgtaaagaacctggcacatgattagaattcaccttttttaacattatcattttaacattatcatcacatttttaacattatcattcaccttttttaacattaacataaccattttaacattatcattatatatgtcatcattattattatatttaaccttactttcattttaatccattattcaattttccttcaacgctcattaaaagcacaactcactacattgtttagtaattaattacttttgttcatttaacaaagtatttatactttgttatatgtgccaggcacatatgctaggggctagggtacataggtgatctaatcctcctggaagctattagaggagatgggcatgagtcaaaggctcccataggaagtgaaacctttgaaactcagggaacaggtctaaaagaaaggagcaggctaggcatggtggctcatgcctgtaatcccagcacgttgggaggtgaggtgagttgatcacctgaggtcaggagtttgagaccagcctgaccaacatggcaaaaacccatctctactaaaaatacaaaaattagccaggcatggtggcgggtgcctgtaatcccagccacttgggagactgaggcaggagattcagttcaacccgggaggcagaggttgcagtgagccgagatggtgccactgaactccagcctgggcaacaaaagtgaaatgctgtctcaaaacaaacaaataaacaaacaaaaacaaaggagcagatcactctaagagatactaaaacaaaggaacttaaattaaacctgagacctgaaggatgagaaggagaacaagggatggaatgatggctttcttgagagaaacacaacaatattcaaaggcatggagtatacagcactttatcattgttatcaaaagtcattgcaaaatgatctactgaatagctcaattaaatctaacaactatgtgacaagcacctactatgagccaagcgcagtgccaaactctagaaacaccatagtaaagacagatatgatccatgcctgcatccttacctcccaacacctactactatgtttgaaaaccacaccaaagtcaatatttactttgtaaccaataaattacccctctgggtttgatcacagagagatttcacctgcatggaaaaactggaatgctttctctggtcagacaaggaatgttacatatgccaaataattccctttcttcttagttgctggatatctacaaccaaatttagtttattccatgggcctaccaacttatactactaaagatggccatgtttctctttcatgattaattgttctattatttgtagactacctttaatttagtaaacagcctcagcctcaaattatttggaaagttattagaagaggagaaaaaagtaaaagaaaacaaggaaaagagatctcaagtttcttgagatctgggaattgtccaatgtgctttctgtagtattcgtggtacctaacatggtgctggatggaaagcatttaataacttctgattgtcagatggatgaagaatataaagctttcctggttcaacttgggctccattagaaggagggaagaactgaaactcggtagatcagaatatgcctccccacaacatccttctttagcataaggattattttgagctgattattttgagagactgcagctacaggagaagatctgaaaacagaagagaagttacctttttgtaaaaggattttacatctataaaggaaatttctactcataagggtgtctccctttctataccaggaagagaaggatgaccaaatcactagagactcttaccaatggagaagacaccaacttaaatctgcataacaaaccttactcatgtttaccatacttttcctgggcatccctccacaactgactatcccccatacccttcttttttttctttcagtggacaatggtatttgagcctgatctcaaagccacctctttgagatttattcatatctctgggtatcttccacgtgtacatgagatacacatatttttaacttctgtttgtttttctcttgtttctgggtctatcccaacctaaggaccataaagggtaaagagaaaattatttttccttccctacacttacttttctctagtctccaggttcagaggaaagaactcaaaaaagtggctgaaaagtttagcatgattttcattgtaaagcagcccaataaccaaacagaagcaccacataaaccaaaagaagagagtggtaagtgaaatataaggtaccattagagatttctctcagggaataagattcttgtaacaaaatatttacctttcttattctggtgctagtaaaaataagagaaatgtcacaattttaattaatgtctaagcaacagggaaaaatattaagctactttatgacaaaatggaaatatatttgtaattctatatcctaatgttctctcagttattttggaaaaactattagtcctttggtctcttctacattaggagagcaaaaagctataatatggcctatctggctaactatcgggaatcggagaaatcaatttaaaagaaatttggaagacacctacattatcgatattagagcaaagtagagatctgccttgttcacagcaaagcaatccaattcacacacacacacacaaaacaaatgttgcatttatggaagtattaaaacatctcatccttgtccttagcttaacatattaatgagaatttctgaattaatctccaatcgtgaactgtgtctaggtgtgatataagggcagtaaatactgtgcagcttgcttcaggcatgttttatgacagattctctgacagatagaaaatctttaagattaaattatttctgtattttcctaagaaactcatcagtactaacaagcataccacttccccaactagttgataaacagaaaagaaaatattattaagtgatggcacttgaggaaatagttaaaaggagaaactcagaacataagattgtgattatatataatgaggagattctcaaaatggcacagaaaggaaaggaacgagttgaagctgaaaaacgtatgtttttaggaggtaagttattccataaagcaattactaaaatgtgagagttcttctcatggttctcaaccttatactctgaaagagaacttcttataatgcaagactaagagagccaattacttcagcaccaaggtacatcctaaatctctggacttggcagttcaaaaaaactcttggaaaatgttcttctaaaatcttcactaacagccctgactttagaaatgtagactctaaaaggatgaataaaaactaaccaattagatagcaaaatggagaagagagagcactgaataaaaagacctgccagagttcgggttgtacctctgccaccagcctcagacttagttcatatttacaataaaaccataatcataaaaattaataattatggaacacttagtatgccaagaacttttcatatattatctaatttaatcatcctaacaacctatgagggagacaccacataagagaaaagcagttgaagagtttgtccaagaccacccagctgctctgagtgatgggttaggattcaaacacgatttttttggaccccagagcccaacccttaaccactcactctgcagaatagttcagaaacctcctaggatgatctaaaaggcttctttcaacaatagggcgctaagatttatgagacatgattgtataatggaaaaaaatctcaggtttttgaagtgactttgtagcccagttgagcagcttcttctctaagcctcagaatcttagataacaacactacttaccttacaagctggcctaaggatcagagataatactagagcccttagccccaagtaataataataataataggcagcatttatataatgctcattatgtgctgggcaccatctaaacatttttttccccacattaaagtatgcaatcttcacaatgaccttaaaagtactattattttgtactttttatctaattgtataagaatacaattagataaaaagaaaaaaaaagagttctattgttttgattcctgttttaccaatgaggaaacagaggcaaagagagttaaattacttgacctaaatcacagttactaagttgcagatcttggattctgatccagacagaatgactcactggacaacccaaaacatattggaggcactcctactgatacataaagaacctccttgccatgcccaatgtctgtgtcactctcacccaaagtaacaaatttaacataaacttgggaggatgaaatacatagggatgcccagataacctgcctactgtcattccgcagattgtgcctttaaaaaaaccaatttcaatagaaaccagcaagaaagagatacatcaggtatgtcagacatacgtggtcacaactattttttctccttcctggctaatcactccctttgtgttgataatgtgctgctttaaatcaattcataaaaaaaaaaaaaagcacagaggcaccataaaagtcgtttttcctgttttcaatctggaagaaattcagtctcttattcattttaaaaactattttaataatagcttttacttaacccaatatatcaaaaatattatttcaacatgttaataaaagttaataagagattttacgctaagcattcaaaattcagagtttactttacatttaaggcccatctcaaatcagactaacctgattagtctgaatgctcagtagccatatatgttgctagtggctaccatattagacaacacagttctagaaagattggcttagaaaagccctggttgttgatatttataggtctctttccttgggctggtcaaattccccagaaagatatctttcaatctcctgccttaggggtataagcctgggtgccattgttctgagatttaagtatgggaaagagcagaagccccatcatattgtctttcacttaagccccgattttcatcattatacccatcctcagctatgcatggtgactccaatcacgagccctgtagttggtccaacccctccagtcttcctcctggggaagtagggagggaggcagttgggagaggcagttcccaggctatgcgggttgggcaagaactctggggactggttagcagttatttgtcattctttcaatgttcttttaatattccttcattcccactttcatacatttacagtgccatgaattcctgacacgttctagaatctcagtttagattttaccgtttctctccccttttaaatcagtccctggccttttaaggcagcttctacaattgtattctgtgaccttctcctctatgatttttgttcatattcccctccccttttttaactaacattttttatttgaaataattgtagactcacatgaaggttgtaagaaaaaatacagagaaggtccatatgccctttatccaattcccttcaatggtaacatcttggaaagctattacacagtaacacaaccaagatattgacaatgacacattcaaaacacagaatgtgtccatcccagggatcctcttgttgctctttaatagccacacccacttccctcccactccaccccttcttaacttttaaccacaaatctgtactccatttatataattttttcatttgaaaaatgttatacaagtggagtcgtacagtgtgtaatcttttggttttgtgtttttttcccctttaatctattccctgaagattcagtcaagtagtttcatgtattaataattcattgctgagtagtattcgatggtatggatggaccacagtttgcttaaccattcacccaataaaggacatctgagttgtgtccagtttggggctattacagataaagctctatgaaaattcatgtatgggctttggtgtgaacataagcttttgtttacttgggataaatgcccaggagtatgataagtgcatgtttaattttgtaagaaactgccaaaccattttctagagtggctataacattttacattctcaccagtaacacaatttctctgcatcctcaccagaatttgttgttatcattatcttttattttagttatttcaatatgttcatagtgataactcattgtggttttgatttgcatttccctgatggttaataatgttgaacatcttttcatgtgcttatttgccatctgcataacctcttcagtaaaatgtctggccatgtattttctaattgagttgcttggatttttttactgttgagtttgaaaattctttatatattctaaatactagtcctttgtcagatatgtagtttgcaaatattttcttccagcctgtagttattcttttcattctcttaaaagggtcttaggccgggcgtggtggctcacacctgtaataccagcatttgggaggccgaggagggtggatcttttgaggtcaggagtttgagacctggccaacacggcaaaagccagtctcaactaaaaagaaaaaaaaaatacaaaacttagccagccacagtggcatgcacctgtagtcccagctattccagagcctcaggcaggagaattgcttgaacctgggaggcagaagttgcagtgagccgagatcgtgccactgccctccagcttggggaactgagtgagacactgtctcaaaaaagaaaagaaaagaaaaaaaaaaaaaaaaaaactctttcacggtgcaaaagcaaaagttttaattctgatatagtccaatatatcaccaatatatcatttgtttcctgttatggattgtgtttatgtgaaatctaagaactctttccctagccagagattccaaagatttttctctaatgccttctccttctaaaagaagggttctttattctgttccgttgatctatgtttctgtcactccatggatagccacatagtaactatgcaatacttcttgaaactgggtagactgattgctcccactttattatttctttttcaaaattgttttagctactctagttcctttgtttctgtataaattttagaataatgtcatctatatatgaaaaaaatcatactgagatttttgataggaactgctttaaacctgtatatcaatttgggaagtatcggtatctttactacgctgtgactttcaaatcatgaacacaacatttttctccatttatttacatttttaaaatttatttcatcaacattatatagttttcaacaaacaagttttataaatgttttattggattcacataagtatttcatatttttgagctaaggcaaattgtactatatttttaaaatttgtgtccacagattcattgctagtataaagaaatacaattgataatttaaatgtctatctcatatcctgccaccttaatgaactcaattattagtttttcatttgtttgcttgagatagggtctcactctgccacccaggttggagtgcagtggcacacaggtattggcacaaacacaaccttctatagcctcaacctcctgagctccagccatcctcctgcctcagcctcctaagtagctgggatgacaggcatacaccaccaggcctggttcatttgttgttgttgaggagagatgaggtctctccatatttcccaggctggtcttgaactaggctccagcaatccacctgcctcggcctcccatcgtgttgggatgacagtcatcagtcactacacccagccacttactagttttaagagttggttttgtgttttttcgtctttgtagatcacttagtgttttctgtgtagaaaatcatgacatcagcaaatattaacagttttctttctttccatctgtatgcctttcatttccctttcttgccttattgcactgattagaacttcctgcactatgttgaataggagtggtggaaccagccttgcactgctggactagactccatttcgtcgtggtatattattcttttagcctgaatcctgtttgttaatattttgttcaggattgttgtgtctctatttatgacagttattggtatatatttctcttttttgcactgttttttctgtttttcatatctgagtaataccagcttcctaaaatgaattgcgaagtgttctctcctattttctggaagagactgtataaaactcctattaattattctttaaatgtttggtaaaattctccagtgaggccatctgggcctaaatatttattttcagggagtttttaaatgattaattcaatttttaatagttatgggcttttaaatattatctatttcatgataggtgaatggtaggaatttgtgtttttgaggaagtggcccatttcatctaagttatcaaatttatgtgtgtagagttgttcatggcatttctttattatccttttgatgtctacagggtcaatagtgatatctcctctttcattcctgatattgtaaccaaatgcaggtccagatgcccactgtttacagagtccagttaacaagagtgaggtctagtagaaagaaagtcattttactaaaaccagtaaaggggaaatggtcagattcccgcccaaagcaatcactttgattttgggggaaggcaggggtttaaaaagggaaaacttgataaggaaggcatgcaagaattgtactaagtataatatctgtgtgtcttgttctggtagctatcttgggtctcagtctacctggatggtgagtcaagacatctgggaatatctttacttcccctttattcctgaggatattttcacgggctgtaggacactgctttgattgttgattattatttcattcaggactttgaatgctttaagttcctgagcagccatggccaggtttttaactagccactttgaagtaatctctggaattttgcagctgggtctccaagcttattccgcctgtctcaagattagcccctggaacttctaagaaggcacagtaattagatactagtatatacttagacaaatgtgaagggagtatatatggtgaaaaagggagggacgtggagcctatttctaggctgaggaaaaggcttctgcagtttttcaaggttgtatcttgaaaaccaagagaagagaaaaaaatgttttaaaatgcatttggaagttaagttgcctagttacaatattggtaattggtgtcttttctcttttctttgtcagtcttgctagactgtcagttttattaaccttttcaaagaaccagctactcttgttttcctttgattaaagtttgcatgatacatcttttcccattattttactttcgtctattgttatattgaaagtgagcttctcatagacagaatatagttgggtcatattttttaaacaattctgctaatctcttccctgtattataagtggtatatttagaccatttaactttaatgtaattattgatattttagaatttacactgccattttattttttgtttattttctgtttgttctctttgtggttttctgttttctttgcccagacttcttataagctatttgaacactttttggaattctgttttgatttatctaaagtgtctttcagtgcatttctgtatataattttttaaaggtttctctaggtattactttatatatttataactaaacagtttactggtgtcatcattttaccagtttgagtaacatatagaaaccctatctccgcactttgcatccctttatcttccccatttataatataattattttaaatacttcctttacatgcatttacatccacatcagaatattgcaatttttgcttcaaacttcaaacacaattagagctctcaagagtacaaatgtttttgctatgtttttttcttcctttctgatgttgaagagatccatttttaattgtcttctttccaattagataactcttttcttttctttcgaggcagagtctcaccgtgtcatccaggctggagagtgcagtgatgcaattatgcaaattcttttagttttccggctgggcgtggtggctcacgcctgtaatcccagcactttgggaagccgaggcaggcggattgcctgagctcaggagttcgcgacgaacctgggcaacacggtgaaacccgtctctactaaaatacaaaaaattagccgggcgtggtggtgggcgcctgtagtcccagcgactcaggaggctgaggcaggagaatcgcttgaacccgggaggcagagcttgcagtgagtcgagatcgcgccaccgcactccagcctgggcgacagagcaagactccgtctcaaaaacaaaaacaaaaacaaacaaacaaacaaacaaaaaacacaaattctcttagttttccttcatctgataatatttttacttcccctttattcctgaggatattttcacaggcaataggatactggcttgactgttgattgttatctgcattcaggactttgaaagctttaagttcctgagtctcagcagaaactcaaaaataatacatgtaggaagagctaaaaaaatatacaataaaccggatcctatcgaatttaaatgtcaccaggctacaagaaactgattctggcagaaaaaataaacatgtgaaaaataattacaataatgtgtgataagtgcaaaaatgcaggtatgtacttgtcacgatgctgacacacagagagaatcagcactgcttgagagaatcagtgaaaacttctcagagatgtgtgaaccaggttctgaaagttaggtagtaaaaggacttcctgggtgaaggggaacccagcacgaaagccctgagaaaagcggaaaagatggtacatttgagaatctgtgagactgaatgcctggctgaggtatagaacacccattggaacaagcaagagatgcagtagaaaagacagctaagggaaggatgctgggctagagggcctcatcctctactaaggagtaaactttatcctgtgtaccacgaggagctaccgaacagacgaaaatggtgagtgtaatatttaaagcaatgattgctactataacactctttttaaagtagcttttccatgaattattaacattatctttagtctaatacgtatcaaaatttagtttatggactggtaggatgtgttaatggccaataaaagtaaaagactcagccgattccctgccttctacactccattttacacacactccatcctgcctgccgaatgacttcagtgtctctgtgaccagtgagtgaagcagcatgcaatgagatcatggctagatggcagcacattcagtgaagtgcttcagctttcctgttgcttctgattccctggcatttgtcagtgtctgtcaaaacattaacatttcttaatgtatattttgcattatttactaaatgaaaattttccaatgacagtggctgagaaaaaaaaatcagatttacatacagtatgtcaagttcacattcgatgccccagaaatgcccagtccccaaagacctctagggactgcagctcatttgttgtccctctccctctcccgtttattatgctgaccctctgcccagccacatagctcaccccacccccttagaagcatctagagttggctctagacatgaaatggaatagatttctgcatttacataactgctatcgcacttctggtgaaaagtagtttcagaaaaacacagaaaaaaataaacagaagaataaaaagtgtctatgtgataacataagggcttatttaactacgtctttatttcctttacagtccaactattttttttttaaaactgcatgccaccttcatgctgcctctcggaggggacttgatcttatttagacccggtggcgagggtccttcagctccgtgaggagctctctagcactcagtcctctttagaggaaagatatcttcagagcctaaaggccttgaaagaaatgacacatttttaaaaacagaaaaacaagcatgaaagtggcccatcagaaatgaaggtgtgaactagaatacaatagacagcgaggaaggagccaaaaatcctcacccaggcaggccaggatatatgcagatagggaggaaattgggaggcattcctttgctaataaagatgatttttcttctaattttcacatctttcatgatgtatcttttgttttttgttttctctctatgactgctgttctaaaataagtgggctttaagaatatgaactacagtccgcatgtttgccagccccatattctgcgatgaacttgacatgtgaatgaatcaattctgcagaggtgaaaagttattcctacaaagtccccagttttccttgtgagaaagatccctacttacctgtaaacttgttaattaaatgtcaaaggtttttatatcaaggacaataacacaagccaacctgggaatctgcttgtctgaaataggtaaagagtgtctgtgtttatttagaattgattgtacactttccttcattctctacatagattttattttctccccacattcttctttttctgtattgccttgagggctttctcttataattatgtgacaaattatatctgaattatgttcaaataagcaaggagactgaggttttctgttaaaaacatatggcctatcagtaatgaatgaagttttgcccatatcatgacatgactttattgaaggcaccatctcatatatgcagttttcaatgtggtgtctaacagatttgtgtaaaatgtctaaaattaagcaaatgcaattatatgagttagtatcatcttatcatgtacattttgcttgataatagaaaagcaaatgaaaagtttattagcttattacaacagtctgtttttgatttttactttagactctattcctctttattttctcctcttctgtttcgggtcattattttatctggagaacccaaaatccaattcttcatctgtatttaccacatagatctttagattctcttaccaatccaacagatttctgaatatttaactaccctattgtaagttgtcttgtttagaagaaatggaatctaagattgtggcagtaaaggacaagctgtcaatgtgttaaataaattcctgttgaaaagtaacggcatgcactgtgtgttaacataatttattagaacaattagaacccatccttgttgtcttttaattagattattccctgttctggtaattacactagacaagggagaataatagtcttgggattctaaaatcatctgtagactatgtggaaagagaataaataatcaataatgctaatgtaccggaaaacttaaattcccagaaagagatcttttatcatgagcaatcctttgtataaacagcattatttctcaatgtctatgcttatcttgcccaaagttgaaaagtgaagacactggacaaataacagatatttattttactgtcagaaacctggttgggctgggccacctctggcctctagtggctcagacattgcttcagtcccttgcaaaatgccaacaagaaaccgcaaatgaaggatttaaaattccatgcagagcagcatatctagcagtctgaatgcctaagggaaaggatgcagggcttttaagttctggtcctaggtgaggaatcataaagttcctcaatttaaaaaaatatatacaaatggacaaaaatgtcttagaactgagaaggctactaaatattaaaaaaaaatttctgatatttccatacatgaagatgttatttgcagaaattaataggcaggctgtatgtcaggaaagtttctggctctcagggatgggctgaggcctttagatgtgaatcgaactacatctctggttttatgtttggaagaccacagggaattccagtgctccaaggacgctccgagggcctacacaactgtcatcaagcatgttaggacatcctagagagtagttcccaaaacttctaggcttcagaatcttgacaaagtcatgggtgggcatatcctgccctcacggataaccctacagttgagtagaaggatgctggaatgcacagaattgacaccagtgaatctggagttctctgtagtaatgagcaacacaaatatctcaccaacagtcccactgttatccgagtctgccttagtcaatgtaaactcctaatgagaccatgtctagacagtattgatctcccaccagaaaaaaaaaaagaactcagagtgtgacttcttttctagcttagcccaaatgacaccctaaaacatgctctttcattcactcattgctaacacttttcataacctgagatattttatcaactaggcagccaaggacccataggcttcttcgcaaggtatatgtgatattttttatatttaaaacatctttgatattcaaatagcagataagaaagttacttaagcttattaaagaacctagagaaattaaatgagtgtatatatatatatatatatatatatatatatatattttttttttttttttttttttttttttcccttgctaggcaaaggagacaggcctttaaaaaatgaaagtccacataagattaaggtgtgatcattcaagttaatgtgggcaagatatctaaaggagaaatcattagcttaagctatccaaaggattttacacacagtcctgtggtttaggagcagaggatcacccgtactactgtgctatccatcccagctgggaagacatggttctttatagaagtaccccttaaaattgtcaggggtgctattaagtacttagggttccccactattcttatctccagactggtcaaatctaccaggcatctttctgatatatcagatagatacaatctatcatagatataccaaagatttatttgcatctgagtgtcctgtggtgaggcattccacagcaggctgtgcatcaggtctgtctgcagaaagtaagaaagaaaggaatacagtttaaaattcacgtaggaatggagtttaaaaactccccaggcaatgtgaaggtgagttaggactgggaaccacaagctaaaaaggagaaccacagagaattctttctgactttggggctgaaatgaagctgaccgaggcattcaggtggttccagaggctggaaagtctcatacgacaggtttttttctcacaaaagagaagtgaaataagtaccttattatgttccaacaatatcaagatacaaatctatcttttagaaaaatgctaaataaaaacacagtcagagagagacttccaccactataaatagtttcttataaatgccacctagagacaaaattatcatttctatgatcctaaccaaaagagccttgcatgtcttggaaatactttgccctctaaagcaaccagaagaacattccttcagtctatgtgttcttgtgctggattttgaaacttttgagcatttgctcccaaagtgaaatttaaaaggctaacagcagggacacctggataactagaaaacttacctattgatatcacaggctgcttctccaaatggactgtatataatttcttgcaagcatagtaaaaatcctatacttgcttgaaatgaaatgaaggaaagcctatcatgaatttctttttctctgtgttaatgaaagacacgagcacaccatgataagcaggagagaatgacctagtgttcatccttctcttcttgtccaacgcaggtaactataggtgggctctgggtagagtatatgattgctgcatatttctaagaaataaagttaatttacaggctacctcaatcctgacactctaggggtaaggcaagcatgcatgtatgtatttctggtaatcaagagggagaaatagcagtgaaaaatagagcttggatatatatcttaaagacatgccactgatttcaaaatagggcaagagcacttatgatttaatataattttgttggaaaaagttaactctctccaaggaaatacagagcttagcaaataccttataaataatacaaaggcatactatagtgtttagtagaatcttattcacccattctgatttggacaaatgttaaatgagacaaacaggagaaaagtttattgattaggtaaccgattaaaattttggtgaaaagcagaagtagtaagttccagaaacaagaaataaatcatgtatatcaacaagaggaatgaaggcattttgtgcaatcctggggaatagattttcttaggtatttcataaaatcattgactctagggcaggaaaaaaccctacacacataaacccacagcattctttttcctgcctccacagttgtaaaggcccgatgataaaacctgtttcctaagacttccccagaatgtgattcaacacattttctatttttttaaaaaaaaatttctgccacttaatttcatgtgataattttccccaatgactaaccaaatatgcttcactattatataaatcaattctttcttaatgccacaagtgaaagtgcaaaggtagctaatggttttcttctcataaaaatcacactttggctttttcctttcatatgtaattaatcatatttgtgacaatcttccaaacttacttgaaatttttctgaatccctttcaaatcaggacaagaactagaaatgtctatacaggtttaatatgaagtaaagaaaatgtttttcattttcttgatttatttctgaattcagcttgctcttcattagcgctacatagctgncttattattcgtggtcccctatgaccccctgatcattttccctgagggtgcatatttattcactaactatgttacaatcatgtgatctgctggattttttctgatagtctactctagatttgttctaaattaataaatcccattatttttggcttctactacttctatttattaaattcattctgaatatgaagtttattttcaaaggaattcataattctttactccnngcttggttctaacaatgaatttaataagaattgtatttaatcaatgtttaaatatattaagggcaaattttgtaaaaatgttagtgttccaagctttccatttccccacaaattaatttttttagcctttccccttaatccactttcttaaaaaataaaattttttttgtgatgcagaattatgtgaacaataagaaaaaaataattagaaaggtaggagtaaactaaaaacaaacaaacaaacaaaaaaaaaaaccaaaaaactaaggctgcagacttaatagaactaccatagctacttaagggtaaatgattaagagagagacaacgtctggcttctgagcagagcacagagagaaagatcaccaggaagaaaaaagataacagggaattttaaggacagttgccatgtgtaatgcataaaatagttttcaaaattcttggagaggtaaaaataaaatttagatttattttttaattatttcacttgcgatgctatcttaagattgaaccacatggggccccagaatttatttaggttatacaaatatcctccaattctgatgctgattatttcatatgcagacttcagttacctttacatgtcataaacacacataccccagaaataaacttgatcatcccataaattttcaagagctctcagcctgctgtaaatgaaatttcaccattaactcacaggtcgatgtctgggacaacctcaaagactgcttgagtaattaataaatttatatgaaaacattggagtgaaaatgtctgtcagtgtcaaatacataagaggtaatggctgatacatagtaatgcagttttaaaccattggcaacatatctaaacaaaggtatcagagaaaaataaaagaaaaccttgtaacttgtatgataagcctcttgcataagattattaagaaagtcataagcacttacggctttattccttttctatatagatagattgcccagaaaaacgtggactgaacctcagctggaatctgagggctctgcttgtctttaacagcttagctacattgttagagagcaacactacataatacagcatgccctattcttaaggcaatacataaaattttaaaacctgaagctaaattaaaaggttatcacccttctgcctaatgtattatatatttgtaaatgatatctgtctctaaaaaagatgtaccacaaagcaagagcatatgtgaaacaataagagagaatgtaggagttagaaacacatttaggtatgtaggaaacacaaacttcaagacattcccaaggatctaaataacctatacacaaatatagcaaagtcatatcctaagggagaggatttgagttctaaagccggagcctaaggtaaatgttgcatatagtcaaacttaccattgaagatcactttaatcacctgtagggtgcaagttacattgctttgtgtattcaagactgacagtgaatatttgagaaaatcagttgagttagaataaagaaggaagcaaagaaaagtccacctacagatattagggtattcaaacaacctcttctttaagaaactagcaaatctccacctctgagtttttatcaggtaggtgatgaagtgcaaagctgtaaaccctccaacagggcttattccactgttttaatattcacatttcataacttggacatatgcattaatggatgtatttgtcattgttaagattaagtaacataatctttctttttttttttctttgagatggagtcttgctctgtcgcccagcctggagtgcagtggcatgatctcagctcactgcaacctccgcctcccaggttcaagcaattctcctgcctcaggctcccgagtagctgggattacaggtatgcaccacaaagcccagctaatttttgtatttttagtagaaacaaggtttcaccatattggccaggctggtcttgaactcctgacctcaggtgatccacccaccttggcctcccaaagtgccaggattaaaggcatgagccaatgagcctggctgataaccttatttcataagcaaaagcatcatccacagggtctggtccagagcagatactcaatagggtgctacattttaatctaactcttgtttcatcagacccacaaacacattgctctttaaaatcctgtagagaagaatatgacaacctgcaccttttctttccaagatggcatttccagttagggtacctctgaacagctgttgcttgcacattttaggcatggtgaagatctacacctgatgctgggttcctaagtgggcatatggtgaatccactgcacacagaagcacttctttatgcttggatcacattgcagaagattggacccctgactggggctacctttcccaagccttaacagcacatcaggctcaaatcacagggctatcaaatgaggagatccccttttccaaaaaaagcatccctatcaactctcccaggaaagcacatgaactcatgttatccattcattcttatcttggaaaatacacccacaagccccttttactgccacttacagtaggatgccacaaaaattcagaaactggaatccttttccgtcccttctcctttccttcctccctttcttcttttcttcttccttaccttgaaatttctgcctgtggtaaaaccacaggaagaaggaaagtcaaatgaattttcctattagtcgacatttctgtgatacactcattttttttggtccccgtatgaactccctccagggtatttctttatgggaataaagtatgccaaatgaaataaagaacttgaagcacaattttatccttgacatatgtagagagaatatgttactcctgaatttatggtgcaatgcaactcagtcacttccttttcctctttcccctagtttgcacttcctacttattgctgcataccatcacaaatttatggagtgccaatggctgtggcctctaggcagctcccaaatgactgaatccagacatcattgtcttcagttcccctttggcattagtctattttccatccctcttcctttattgaaatctgcttccaattatttttcataagatggtttagctttcttttatttcctttaagttgaaactcttttatttctacctttcatttctatgccctcctgggccttaagcacagttcttctacatttacaggggttttcatttagaaactattgagaactttactatcaaattgtactttttaagataatttttttgcaattttaactaaaaggagatttttagacttttggaaagtcatggctccaggtctcagatctcagctgtaggttttatcactttgcaagatgatgactagagttacagcacattctttcaacccatgcccaaaacttcaaagatggccacccttcaacccctgaagatttcaactcagtgttttcagaaaattggaggtccaggctttggagtcagacagatatgggttcaaatccagcctctggcacttaatttgaatacaacctagagtaagtcatttaactttcctgagctttgatttccttatctgaaaaataagaatatagatacttacctcaccatattgttataaagatgaaatgaggtaatctttgtaaaatatacacaatgtctagcaggtggtaagcattcaaactggtagctattttttattgttatgagttaaaattttgtatataatggattttttttccaagaaagctcatcaagctgaccttaagtagatgttactcccaaataccacccaattccatgtctacatacttgagaagttactaaacactttaaaattgaaattgaaaactagggacaaacatagatttgaaaccaaaggaataggtaatcagttataaatttggatataacattatgagcctctatttcagaaaatacattccttttaaagtatatttactatagttatccatgcagactgaatatttttatcaatagttgcaaaaccatttcctgaaagggaaaaccatgtaattataactagattttcacatgttaaccttttatataagggaagaacaagaagtagatatttgctaagagactgggaagaaagggaagagaagggagagagggagagacagagagaatgagaatgaaagcaaagaaatttgacaaggaatactatttggcttttggcccttccgtgtaccaacgtagatgtgtgattataccatttaggattgttgtcaattctttccataggaacagactgaacaatgagacatctacctctcaacccaaagagaataaaattgtcatttccctacaggacttttgttaatacaaaaatgaaatatatatatatatatatatataaaattattatgatttcaaaaataaagccaaatatctaaatgaaaccatgaaaataattagctccgatccaacagagtaagtgaggtttttactttggaagataagtaaattctttcagagcatgagaatgaaaaattgattgattccgatctgatctctaaaaagagcagtctgatttactttggtatcaaacagacctgcttctaaatgccatttctgccatttacctgttgggcaaatttcttacctatgcacttggagtcttcacccttaaaataggtatgaaaataggtagaaaataggcttgccatgctttctctctctctccctatatcccatgtctctccaaggagcaattcctaatgtaattgatcaaattcaagcatatggagtcttatttactaagtggcatggtcactatacaataaacgtgacttcccccacttctacttcttctcttctaagttgaaaaaactctaatctctcaggtcaggctaactatttccttccctctttcctgccttctttctaatttgaggcaatagcatccatgagcccaggcgatgtcagggattcttgtttttatctcaacactttcattcttccccatcccctcacaggcccccattcagaattcttaagcatgctatttgcttgagggggcatttaggaagtcccatttaagacctctgccagctctaatcttatctcttcagagaggccttcgctgactatccaatctaaagtacctacctttatcagtgttctacactggaaggtattgggcacaggtgcaactaataataaagtgggtggtactttgttgccatttccatgttagggcctttgtgtctgcacttctctctctctctctctctctctctctctctctctctctctctcatgctctgcatctttaaatcactaaggtctcagctctaatgttatctcttcagagaggccttccctgactatccagtctaaagcagactcctcattcccaccaactcactccattacattaatcttttattttgttaatagctctcattgcatcccattactttcttctttatttgcttgttgcccatccctacctccttcccaaacacacttattaaaacaccatgaagacaaaaaggtattgtgctcaccacttgtttatccagagccaggtgcctgtccaaagtagatgcacacctgccatgtcctatggccaaccaggtccaatgaattcctttataaagctcctctcctcagctgacccagaacaccagctgctatactgaaggctttcacactttcagatgaggtgtctttatcttataaatttcttttctctaagcagaatttatataacctactcattactttgaatagcatcttattcagtataccttattggtatttttcagtaaaccctggtataaggcacacagctaagtgaatgtccccacatacctataagagagtggctagatgcctttcttacccacagggatggtttcaaagaaaccttttacactcactcccatatacacacatacacaaaggaaagctcacatttgcattccagatcatctccaggaggagggaggagaaatactcttttaaaagagcaaacctaaaattataatgctcttgaaaacattagtagttaacatttactgttaagaaagccacaatcccagaccaaagatagctgagtggcatcttaaattgaagatagtttttaagtcagagcttagaaagtctcttggaaatctctttaattcccccacagaataaaatatggtacagattctcaggaggtccaatagaggctttcctctagcattagaacagatccttctttgatcaaggatcagatgaagtcattggtgtgaatttactaggcatatattttttcatatataacagaaaatgtcaacactggaatctcactcagcactaagatgctcacactaagaggttcaggaaaatgagaatgactcccagaacccatctcacattttctaagaggcatatattcattgaggggaacgtctaacagaatgacctatattatttacatcagtacttcctactctcacttttttggccaattctgtgtgattaaattggcaaaagttcaatgcacacaaggtgcaactcaattatatttaagatcactcatttatgtcataaagtctttctcaaaaaacaaaagatgccagccccacagaactttatcatgtcacatagaccccattaatgcagtctatcaacaatatagacagattattatattcagggaagttccctcaagaattgccttacaagttcaatttaaaaaatcaaaataaaacaagccagtactgagtctttctatggtatagttaaacttgtaatattttatacatattttttgaaagtagccttgatataaatcctgaaaaaagaaaaaaagcaaagtccacatttctataagtgtcacgatgataaattttatgtatcaacttgactgggccatgaggtgcccagatatttggtcgaactttattccgagtatggctgtgagggtgctttggacacacttttaatatttaaatcaacagatgcagtaaagcaattgccctccctaatgtgtgtggacttcatccaatcagctgaaggcttgattaggacaaaaaaaagctgaccctcatgcaagaaagaggaaactcctcttacctgatagtcttcagctgggacactgattgtgtcctgcctttggactctaactgaaacactggctcttcctgggtctcaagcctgttgatcattggacagaaactacaccattgggtctcctgggtccctagcttgccaatgccagatctggggacttgccagcctccatagtcacaagagccaacttctcataataaatctctttctatacatatggatacacacatcctactgattctgtttctctggagaaccctgactaatacaaatattaaacccaaataaaaacccaaatgcaagtattaaacccaaacccaaatccaaagatgaacaactttcttcatcagtctggcacctaactgcatgtctctttatgaagtatgtaatattttttcatgagctgccatatgtcattccatcactcgctctagaactcttttaggcacttaaaactttgtatattatattaaaatttaatgtatcaagaaaggatatagtgagaataaactgaaaagagtagttactaatgccaaatataaggcagtcttgaaaaaaagaaatattcctctgtaatctcagtactttgggaggccaaagtgggaaggctgcttgaaaccaggagtttgagacaagcctaagcagcatagtgagaccctatcccctaaaaatcaagattttttcaaaaaaagaaatattccattttttcagtaaaaatattaaacaaatttcaaaaggcagaatggacagcttatacatataaacatatagggatatgaaacacatagttaaatatctacctatactttttatttcattaatttaattggatacttaaaaacatgtactttactcaaattcttatgtgagcatctcaacacatggtttattcaaattctgatgtgagcatctccaccatataagagcctcctttttagccctccaactgagttttccagagttttccacaaaactccaactgagttttcttcccttggttcaaaacaggacactccttgaatcatgtatgatggtgtttctgaaagttgtctctgaaggcacaagtacctatttatataatattagcagctttttcttctaaataaaaatatttctttgaacaggtatatattttgatgtctatgatgtatttgtctcttgtattgctttttaaatagacttttcaaaatcgctgtttggaacaacatccaacagttggaattgtgaagtcatagcccctggaatcatgactaactgtgttcaatttccctgctcctcttttatggatcctagcagatgaccttcacgagcacccaaaacaaaccttgggtgaagccacttcagcccactgtgacttcctaaagcagtatttgaaaggacccaaatataaagcaaggtcgtctcttctgagggataataaattcagggggaagcaaacctcacctttgtatttgaggatatctggtgtattttagtgcaattctgcctttaagataaagtgccagctgacttaatggcagttgtgatctctgcttcatttcatcttttatctaatgatccgctagttagtaaacctgcaaatcctgaaagaaacataagtactctttttctttgcagtgtaatcaccaacaataaagctttatttttttgcattaacattcaactgcaatgtatttaaatgttccacatacacaaaaacacctgatttttcccaagatttgttaaacatagtccctttggtgtccttagtaacactgcaaagatgtcttcatgtaaaacttaatttgagtcctgattaccttactgtgaaaaaccgtaaacaccaaacaaaagtaagcataatatccaaatgcctaaaacataatacccaggttgaaggaagtgtaaatgttcagattcaccagtgggactagaatgtaaacttcttgggttgtggttcctccaaatcatctggccacctgggtatcatatcccacaagcatatggtaacactgatagagtaagctcaaagtgttccaacaccaggacatttcatggccacatcagaccaattgtatttttcacttcctctctttccctaacttttctcatacaaagcttcctacatttcctttggcacttagtaatacttaaatgcatcttcactgtcttattcagtgtttttagctttggaaggtgtatcacttgggattgctttcagatgcattaattgcaatctagctaaccaacagcccaacagtgatttaaacacagaaagctttcttttccggatatgcatgtgtgcatattttgttttgtttttcatgcaacaagatgtctgaaggtataatctgacactgagctggtatctcatggtgtcatgaatgccccagcctacttctattttttttttttttttcctctgctgtccttcagtgaggctttcactttcattgtcatagacggctgctggatctccaagtttgacacattctccctaggcaagaagagggggaaaggcaaaggggaaagaggatgccagccaagtcagtctctttctaaaagctttccagaaagttccatccagtgacttccacatacatctgcccagccacaaatgggtcatacagtctttcctaactgtaagagagtgtgggaagctggatatgagctgagcattgctgctccaaacaaaatcagatttctgttaggaaagaatggatgtaaagtggatcttaggaagggaacaaccaatgcctaccatacacaagtatttgtggtgagcagacatggctaagtgcctcttcctatctagggaggttcagggaattactcaagatctcttttgtgccagggaactagggagtcagtcatctcatttgctttcatttcctcatctctgaaatttcctactatggtattcctcttagaacaccatttagaagtgttatggttttctgttcttaatccaaatgtgacaaaatgtattctccttcttctctgataacaaaacccaaattctgacgggcagcatgtgcttagccttagataatgaataatgactggtctaacccaatcatggcgatactatgttcttttgccattgattggtattcagtagtaggcatgtgacctagatctaaccaatgagtggacatacactggggggactcatgaaagatttttcacctttggtaaaaagtcatagttgcaagaggagaaagccttttcttcatatgcctcttctttcctgttttagatgctgtcatgttaacgctttgtgcttagagctgtagaagccgtcttgtgaccatgaggcaatagccaaaagaggaaagagcctgagtatgaaagacactgggtcctttatgatattactgagttgccaaactaaccctgggatcctctacctcctgttttctcatagtaataaatatccctgtgatttcagcactatcactttaattttctgttacaggcagctgaaagcattcagaactcacatactatcttaacatcatcttccatgtgttatgggccaagagtatattcaagagtgactacaaaactacattcattgtcgtatccctgtgggactcccttaaagttctagtgttctgtagtgtactttccacagcctagaaggatatatgtttccctctctccagccctaaggaactcttaatttaagactgacaagatgaatgagttacaatgagggtgaatccaattcaaaagacgtaacaacaagcaagaaaagcaaagaaccttgtaaacacccatgttatggagtgtgagagtgtaagcttaaggaggcttttattttggggagaagatgcatcacctctgtttgaatgagagaaattaagttgtaattatgatggtgtttcagttaaattatttgatgtggaagacaaggagaccattcccaacatgttatttagcaaagaatatggaggagaggcagaagactgtgatggaaaacgttcagaggccatcaaccaaaatggtaatgcattcgaggcagataaagttgcttcttgctagacagaggtggggtgagccctgacatacgtcttcaaaattgcaaaaggcacagatctgggggggaaagggggttgattcaccaaatctcagaatagcagaatggcaataaccctactccaaggcttccagttttcctcagtttaactccttttgcatactgcagccaaagagattttttttaaaatgaagatcactcagactgtgtcctcttcctcttaatctccccaaaggaagaaaaaaacaatgatcaatggcaaatggcagttgcaatgaagcaacaccaagaacgagcttcgtgctcgggagagaacattgcatatcttcctgtggtttccagtgctctacacacttggggaaactcctttaagtaatgaaccacagaaatgacccctggaaatataatcttcaaagtgatcttttaaagatccaaatatttcctgttcccactctgcccagagatcttcagtggctcactactgcttccatgataagatcctaaaaccttgtcacaatccacaaggccttcattgtccatccctgcctgcctcactgtctttatctcccaccacactctgccttctctatgctcccacctgacaacttcttcagtgcgtggaccctattgtactctctcaggcctcaaaaccatgtaacatcctggacttcctcttcactggtctaatgcctactcatacttggcttctgagattgtacttcactccacatggagattatccacaaccatgccccactccaaaaccaggttaccttcccaatgtgatatacttgccatagcactcagcttccttttttataatactcatcacacttgtgattgattgactctcttctcctttacattgtaagatccataaaggcaaggatcatgtctgtctctttctgatgtgtaacaagcctgaacatacatacaataaatggccaggtgtaatttaccattgtgtggatgccatcttgggaggggggattctaatagttcaagggcatgtatgaaaaacagactcatggtaaaataataagaatagaaaaaagttactcagagtggtttaatggctggggtataccttttactattttacttagacatcaaaggaaaatcagtgtcctccctatcatgttccatgattttgtacaactgagtttagagcacaagctaaggtatcagacagcatttgacagcccagcttcactacttatcagctgtgtgaggtgatataatccctctaatccctataaaccttagtttcctcatctttaaaatggggataatgacaaaagcttttcaataagggtttgtgaggattaaattagataatacatggaaagctttcatcccagtgcttgccacagagttagcatgcaataaatgttataaagagttctttattgttctgcccatcaacatctgagacagaatataaacacaactgctcctgggcctggtggctcatgcctgtaatcccaactttgggatgccaaagtgggaggatcacttcaggccaggagttcaagaccagcctgggcaacaaagcaagactccatctctacaaaaaatgaaaaaataggtggatatggtgatgtatgcctgtagttctagttacttgggaggctgaggcaggaggatcaactgagcccaggagttcaaggctgcagtgagccataatcatgcctctacactccagcctgggctttttaagattccatctcttaaaaggaaaaataaatcaactggatcactagcctataagagcttaacaattgttaggtagtattactatgggtgttattgttttgttatttgtggcaaaaagtactagtgctcacctgagcacatgacttccttatgatcaggtaggtccatgtttgtcttggtcactactccagcccagtgcctagcacagtgcttgacacatggtgtgtatgcaatgaacacttaatgagtacttaaagatctaaccagtatgatagtgcagattctcttgtaagcaaatgaatagagaaaggcagtattccacagagaaggagacaggaaaaaagaacaggcttgattttactaaaaagaaaaacacacttttaagcagtaaaattagaagttcccatttcaatggcacaaaatagagaactcactgagaattgtgtgctataacatggtcaaagcagaggccgataatgaagggagcagcattcagaaccatcacatgtatggtcagctttcagaccctgaaaactcgattaaaacattccaggaaaccgctgcactttcattctaaaggaagattgtgaactctgttcacatattacaccccttcatattgctttgtctaccagtgtggccttttatgaagtgagggcttctttcttctaccttgctccatgacaatcaaacccaaaatgccttccacccttaaaaggaagttttggtaagtgccttattataactatcacatatgacacaaggctcaccactaatcggagacagatgagaatgaattacttaaataggacagaaatagccattcacttcaagaaggtcccagtttcttgaaagtctgtggcattgagaccatttacagtttgctgtcaagattcctagcagtgctcattaccttggctagcaatccctctggactacagaaaacttatctgaaatatatataatcacaggctgcaatgcctaagtgcaacaggatgatttaaaaagcaccatgatagtgttcccccaggacattcatctctccctgtctattcatctttgatccagacaaaaacttggaatgcaatctgtatattgatattccctaaaaaggatttcaccagctctttaggaagaattgttttagcggctctggaagtctagaacattctgcatttgtggtatttacagcttttgtttctatttcataaaaataaagccccactaagagcagtattcaattcctatcccaataggagtatcgaatagtggttaagcacatgttttttggaacgaagcagacctgtgttcatctctgggctcctcatagacctcttcataaacttaggcaaggtattcaacctttttgagtctcagctatatcaggtaaattactatgcgtgcacagaagagcttaataaatgttagatgttaatggtattaatattgttttgctgctgttttcagtttttctagcagagattattagtattcacccatgtgcacaggtagaccgcatttccacccatgcacacaggtagaccgcatttccaagcttcagtggagttacgtgggtccaaatgactgagttccgatcaatggaatgtggcagaagtgatgtacaccctttcctggatgggcctacagaaatcctctagactctactcctcactctccttttcccttctcaggcaccctgaaggctacttgttaaagaatttagagctacaggatggaaagaacctggatcctacctaagaacctcctaggagagccacccttcagaaacatttgcagtggattctgaatacgatttttttttttttttttttttttttttttttttttttttgccgagcacggtggctcatgcctgtaatcccagccctttgggaagctgaggtgggtggatcacttgaggtcaggagctcaagaccagcctggccaacatggtgaaaccctgtctctactaaaactacaaaaattagccaggtgtggtggcacgtgcctgtaatcccagctactggggagactgaggtaggagaattgcttgaacctgggaggcggaggttccagtgagccgagattgtgccattgcactccagcctggtgaagaagtgggactacatctcaaaaaaacaaaaagatacatatatatgatatatctgatatatgatatatatatgatatatctgatatatgatatataaatgatatatctgatatatatacatatggtatatatgatatacatcatatgtatatatggtatacatgagatacatcatatgtatatatggtatacatgagatacatcatatgtatatatggtatacatgagatacatcatatgtatacatgagatacatcatatgtatacatgagatacatcatatgtatacatgagatacatcatatgtatacatgagatacatcatatgtatacatgacatacatcatatgtatacatgacatacatcatatgtatatatgacatacatcatatgtatatatgatacatatatatcatgtatatatgatacatatgtacatatatatgtatatatgatacatatgtatcatatatatcaggtatatatgatacatatgtatcatatatatcaggtatatatgatacatatgtatcatatatcaggtatatatgatacatatgtatcatatatcaggtatatatgatacatatgtacatatatatcaggtatatatgatacatatgtacatatatcaggtatatatgtacatatgtacatatatatcaggtatatatgtacatatgtacatatatatcaggtatatatgtacatatgttcatatatatcaggtatatatgatacatatgtatcatatatcaggtatatatgatacatatgtacatatatatcaggtatatatgatacatatgtacatatatcaggtatatatgaacatatgtacatatatatcatgtatatatgaacatatatacgtatatatcatgtatatatgatacatatatacgtatatatcatgtatatatgatacatatatacgtatatatcatgtatatatgatacatatatacgtatatatccatatatatgatacatatatacgtatatcatgtatatatgacgtacgtcatatatatcatgtgtatatatgatgtacgtcatatatatcagatatcatatatacacatatatcctatatgtgtatatatgatatatgtatatatgatctatatacatatatatcatatgttctatgatatatatgatatatatcatatatgatatatatgatatatatgatatatatgatatatcatatcatatatgatacatatgatatatcatatcatatatctttcttttttttttcagttaagctactgggttttgacgaagctcattacagcagttagcctacttcagggtttctcagcctgggcactactgatattttggactacagaattctttgttatggagggctgtcctatgcattgtagggtgttgagcagcatccctggcctctatcctgctagatgccagtagtaacctctccagtagccatgacaaccaaaaatgtctcctgacattgccaaatgtcacctgcaaaatcgcctccgattgagaaccagcagcccacactggccaaaacatcaccatcattgctatcatcatcatcataggatattgatagtctagtctctcatgttccccttgaaatcactgcaaaaggactcaaagttccaaaagaggtccagcccagtttttttaggagaaaaaagtgaaatgacactaaaatttaagaaaaggtaagggatcaagcagtaaactcaaagttataggagaccaaaaaacaaagtaagaaccaaaataaatataatccttttttaaaaaagctagtttgtgtagtcccagctactagggaggctgaggcaggagaatggcgtgaacccgtgaggtggagcttgcagtgagctgagatcgcgccactgcactgggcaacagaccaagactcggtctcaaaaaaaaaaaaaaaaaggccggtttgatcactttggtaacctagaataaaatgattaaaacaaaaacaaacccaaatatctgggtctaggaatttcaatgtgtctaacaaatgcttatagaatatctaccatgagataagcattgggctgaatataacttggtaaataaaacagatataatccctgccctcatagagatgaaaggtaaataaaaatatggagttttttgtttttgtttttgtttttgttttttaagacagtgtcttgttctattgcccaggctggagtgcggcagtgagatcatagttcactgcagccttgaactcctgggctcaagtgatcatccgtactagctaggactataggtttgcaccaccatgcccagctaatttttgtattttttttatagagacgcggtctcactttgttgcccaggctggtctcaaactcctggcctcaaggaattctcttgcctaggcctcccaaagtgcttgggattacagtcatgggccattgcacccagccaaaatatgatggatttttcaaacagcttaaacacagtcatgaattgaccactgcaataggcagacttctaaagatgtccctgcaggattcccatccctgggccgggcatggtggctcacgcctgtaataccagcactttgggaggctgaggcaggtgggtcacttgaggtcagaagttgaagaccagcctggccaatatggtgaaaccccctgtctctactaaaaatacaaaacttagccaggcatggtggtgagtgcctgtaatcccagctacttgggaggctaaggcagcagaattgcttgaacccgggaggcagaggttgcagtgagccaagactgcaccattgcactccagcttgggcgacagagtgaaactccctctcaaaaaaaaaaaaaaaaagattcctgtccctggttatccaattaaacactagattaggtgctgccatgaagagacttagcagatgtatcaaggttactagtcaaccgactttaacataggaaggttatcttgaattatctgggtatgcctaccctagtcacatgaggttgtaaaaacataagtggaaggtggaagaatcagtcagagtgagaaagcagaagaggatgcaggagctatgctgcagagggaaagtcagattccaaacacaagaaagaaaaagataagatgaatcattgatggttctaaaatgtaggaggctctgtgtgaggaccagaaagaggcctgagggagctaagggtggagccctgcctaacagacataaagaaaatagggacttcagtcctacaaccacaaagaaccaaattctgtcaataacctgaacgagtttggaagttggtttttctgcagtctccagtaagaaacacagcgctgctgatacctcgattttagcccagtgagacatgtattgggcttctgactgccagataataaatgtgtgttgttttaagtcactaaattcatcatagtttgttatgacagtaatagaagactaataaaccattatgcattaaatatcacagaaaagaaagggtttaagaaaataggtattaaagtatgccttatcaccttatcattcatcaatctgaggtttactaaacacttgatgggtgctcattagtggaataaattaatgcactcatattttcattcatttgttaaaaatatgcatacagtgcctcctctttgatggtccctgggtgaggtattgaggttacagtagtgaaataggtattatcctctgtttataacagctcataatggaagtggaggacagaaacatgtacattcaacaataatgcaaagaacataataaagatattaacatcatcattataaaactatcagtaaaagtgtgaataagggagtacagaataataattacagctgacatctattgagtacttgtctcatttcccttcacaacaagcctatgagactgtattagtccattttcatactgctatgaagaaatacccgagatgggataatttataaagaaaaagaagtttaatggactcacagttccacatggctgagaagacctcataatcatggcagaaggtgaaggaggagcaaaggtacatctcatatggtggcaggcaagagagcatgtgaagaagaattgccctttataaaaccatcagatctcatgagacttaatcacgagaacagcatgggaaaaacctgcccccatgattcaattacctcctacccactgggtccctcccatgacatgtggggattatggtaggtacaattcaagatgagatttgggtggggacacagccaaaccatagcagagacagacccatgattcataccatcttgcagattaagaagctgaggtacaggcaggtgaagaaaccagcctaaagttactatcggtaagtggtggagctggaattttaacacaggaggtccaactttagagcccatggttttaaacacttcattgtgctgtctctcattgcagaagggtgaggaggcctcacagaagggctgagatttgggatgaataccttcatcaagaaaaggaggagccagtagaagaaactgcattggtaaagccagagattcaggaagaaggtggatggtgtggcatattctggaacagggctctgtattggcaaggaggggtggcagatgaggttggagcctaagttgtcctgacttgaaagacttgaacctctcagcagtttgaatttcgttctaaagctatcaaaagaacctattcaagagcatgatacggtaaatcatcttcagcaactcacatatcatttttaacattgtttcaggggatattagtggacactcttaggaacgcagtgtatagcccacaagtataatgacacttattaatacaacttagaaaacaccctttgaaaatgcatcaaaaccctaaaagattcgattaactctatggaaatgaggataaagggtagatgcatgtaagaatccagctgtcttctatctacaaagctcttcatatccacaaccacagagacactgctcagcttctgaatcgccttagttcacaataaaatagaaataaatcataataaaataaaatagggaataaatctatctgttggctttgagaaaatttctcagtagcaacaaaccaactgctcaaatcagaatcccccaaaataaataaataaggtacctaagagggaatgcatgtgttgaccaaaaaactaaaaaattctcccatttctgtctgacgttgaaaaaaatcataggtatttggcattttagcctatgctgttgaatgtggtagccactaattatatgtggctatttaaatttaaataaggtaaaattaaataaaatttattttctcagtcccattagccccatttcaagtcctcaacagccatatgaggccactggccactgtactggtcagcacatgtatcagacatgtccattgttgcaggaatatctgttgggaaaaaaatgaactacttatttagataaaagtagtgatttgttagacatgcctaataaaattcagtttattttaagattatgtaattaaattcagacttacttataagagtctgaattttcattttaatcgtttgtatgtatttcattcctcttagtatgaagagagtctatatcaagagactctctatggagacaggagccagtttgtattaggccccagctctgtcttgggctctgtgctaggcatttcatatctgttatgctacttaaggctcatgactccctgtgagataggcatgcttattctcatttttccctaaatggggggctgtgacaaggctgaagcaaagagagggcacaacatcttttcagggttaacacttgagaaacatctatttcttcttaagtagctctactgctgcttagagaagtagagtatgtagacaagacagttaaattttccacagatggggtttacttagagggagataagatttcttttgcacacaattgtagatttttttttaaatggtcaaaatcctcctgttctagcagtagctaagaagtgactcggggaagcattcaacaagtaggaaagaagtctgctcagatggaggccctgaatcagagatgcctgtcatctgttcccaaaggctccaaactcctgccacaaatacactgagggttcctctctctataacttcttctctttattttctctggaaggaatgtacttgatacttatttttaatctgagtctccttccacaaaaagtgtagaggatgtgctacccagcccctaaagttttgcctcttggtattcacacttgtgaagtcattttccatgtggaagagggctgacctgtgtaagcaataagatgctgcagaaatgtatgacttctgtggctaggttagaagagccatgagtccttaaagctttcccccttttctctctcttgagtggctgtctctggaggaagccagtcaccattctatgaagttactcaagcagccagtggagaggcccacatggggaggaactgaggcctcccaccaatactctccatcaagctgccaggcatgtggtaccttagaagtggatcttacagccccagtcaagccttcagatgactatagagccagaaccactctactaagcctgtcccaaattcctaactcaccaaaataacatgagatagtaaatgtttactgcagttttaagcagttgagttttggcataatttgttatgcagcaataggtacctaacccagagggtttttccagctttgcctatgggcaagtctacagatgaaacaagctgcttttcatatttagtgctctctctcacaattatcaggagatataattatcttaccatccaggctgtgattcttgcacacaagcaccaagtcatccattattgcagtctcccttcccatgcttgatgaataactgggttcctgtgatttttcctcttttctttccccattgactgttgaaattgtttgcctcaactattgagtcccttctcttcagtttgcctccttttcttttcctcctacatgagcagaagccaggaaattgaatgtattcgatcacaaagtatgcatgaccctcagcaacatgagcctacaatagtctttttaatgaccagaggaaggttgtgaggactcttagttaatttgttatgaacacccactcccataaggaagctgctatgtatttgtggaataaattaaataaaatcagcaaatttgcttattatctatttcctgccctttgaacacaggtttacccataaactacatttgttacacactaactgaatatggaaagcactatgggtaatgcaaaaaatatagcttgtctgttttcagtgtactcataagcaaatataggagacatcacaaagatgcaaatatgtattcatattcacatacatgcttaagtagacatttacatatcaaagacagtgaaggctaagggccaaatgaatggtacacacaagtgttaacagatcttcaaaagaagatgttatggctgtgagctgaattgatcagggcagcctttatgcaggaacaaagtcttcagaaggtttaactatggcagatactattacagatactacttgtttcatccagttctcctttagccccaagcatagagactcctgcacatctcagcctcttatgagtgggcaggatcatgtgactagctctacttagtggggcacgagaaaaagtaacatgtttcatttcttaagtcaaagaaaaaactatgtttaattctccaatctttctcccccaaaagttcacatgctctggggtaactagaggatgttagtggctccctcagcctgggtctatctgaatgactacaataagcagagccccctgacaactttttttgggcatgtaccattagcaagaactaaacctttctttgtgataggccactgtgatctggggactcatttgttactgcagcataacttagtctctcctaactaaaacagagattcccaaagatggagaaaagcagagcacagtagaggtagcttataagtcatgtcttatatgacctttctcaatgacaaacctgtgtgctcaccaagacatagcttgttatgacatatctgaatagaattgaaggtttttaaataaaaacataagaaggttggaaaggcagcagaatgagctactgcctgtgggtgatctttacacatctcagaataacaggattattgatgccttggccagaagcattcctttccctctgttttctttttctttgagattgcaagccatatatttccatttggaaaacagtatttcataacctctaaacctaacatgagtcctgtgaaaccctagtctacagttgaatggccaaaaataaagacttgaaattccttcaaagctatcccattttacaaggcaatgctttctctctctaccaagaaagtgttcctgcttgatagattcccctctcttgctgtatattacacttactgctctcctgtcactccctattctcttcctagttgtttgtgccttattaaattccacattttgaaacaaccaataagaatcagaaagcctgaagaagccctttctcatacaatcagagctccctttttatctaggaataaattatattttccaatcaattcatgagtgggattcattgacaatatactctctttgtaacatatttctgaatgagtagtaaatggtcttcaataaggatatggcgatacattttagctaaactgtttcataccgacattaactcccctgttaacttacttaggagtctaaagacacaatcaaatagctgtttctgactattattctcaaagcgaagctccaggccgtaatctcaggacatgcatgaaaatatcaagtaacaactcaaaggcccatttcagcttcaaatacctttgaaaattcgtgagtttgaggagcagagtgggatagcaggcgagtggaagaggaggcttctgagaaacttaattatctacattttagaatgtttcagtctttggccttttaatactgtagtatagcctggcttctgtcattctgaagggatttcccagcttaacaaaatcccaaggaaccaacctcagattggtctcttacctaaggaaagattctggcaacacaacaggaaggatttggaaaatttaatgaagattttgaaatacccctaacacacttaaattaaagataatacctatttcacccaaatctcctaaccccctgtggaagatcaattctaatttttgaggacaattattcatgtgttattggcttgaagtacagaatgtattagtaagtctcttcagttctaagtaacagaaaccaaatcaggctaggttaaaattgaaggggcatcattagaaggacccaagagtgtctcaaggactcagaggcaaagatgcagccagttccccccagtgccgggaaccagaaggtgggcaggaactcagggaatacagcccccttctatctctgcttctcaattctcatagggaaatatggttgtccacagatctcaggtttacctgtcatagttctagccacatgcaaggaatgactgcatatctctgaattccaaatttcagaaagtgagaccttggggtgggagatggggcacgcttggattcggtgtctaactctaattcaaacaacttttgccacggagccatgtagtagccaaatatgtttctaaggcccaagggaccactcttacaaagatggaagatagttcactaaaaagaagacatgctttctagactccacagccaccccagaagtgccaagataaataatagggagccagagtttaagcaagggccaccatcactgcaagttgtctcatccaacttctccctttataggaattgacatgacttcaaatattcatgtctgacaccaacgaagaggaatgtctgttcttgagctctttttctcggttcccaaggggccctcagtaccctgctttaccatttagtgtggattctgacaaaagaacaaattaagtactttgatttgattcttaatttttccttataaagacttgcaataaatattgtgggtacctagaaataatccaccatagtgcacaacacaatctgttgacttaccttagcttccattttccttcttggtctgacatataaattcaccttgctgctcaattctgtcacctactattttcagcatgtatgagcaacagtaaagtgcatgcccacagaactcagaaatgagaaaactaatattgctctgttatatgcataatggatcaatacagaggtatttaaacacacaaagaaaaaaaaaaacaggtcagcaagacttgactttcaactgatagagaatattaacatgtttatgggtagaaaaagtggtcagttgtagaaaaatatacaaagaaaagctacaaagagatgttggcagtggccatttaagctctgtctagggaaaggaagcctttagttaatggccttcaagtattctaatgtagggacacggcacccctactgtggaaagagatgcaggaggtggaaggtagctaaggccttggagtttcagttccacaggcaaggctatccttatcatgagaactgagcagcatgaagctatctgtagtctgacagtcatattgtatgttgtgtcaaatgaaaacatagcatcactcaattccttttgttctcttctcttgctaaacacacaactatctgatgctctggcttcccatggacctcaggcctgcttagaggatggaatgcaatagtcccactagtctgtgcagtgggccaactgctggttgtaaaatcacaaaggggccttctaggttaccgcgtctcacaaacttgggtaatgtaattccgtcttgaagagagagtcccccatgggtaagaccatggaccatggtaaatgagtgtaccccaggagaactgcttgggaaatagtcacttagcctattctcctggtgatgccccagacattgtcaacatggaccccttggagcatttcctcgttgatgtctacatttgttaccttactcttaattaaattttctaaaaagatggcacaataggagcactgagaacatgatttttaggaagaaaaggaatcccatgtaaacccgtttccatctgtggttcttgcctttctgtccttatccatagggcagctcattcttgcatatctgcagctcttgcatgcctgccattttgtatcttcctttttctcgttatatcagaagcattataataagttacattagaacccgttttgcatattttaacattgccttcacagtgaaactatagagagctttatggtggcactctagtgaatattctgttctgcttctgttacatgactaccttaggaaaagtctccgagaactcctgtctcccatgattatctctcctaatcaggctttctactatcaaactactcagcaaaaggaactcaccaacctatagtgctaccagaagtctaataacataacactgtcaccacaactttttcagcactaaacatgatcatttttaaaaatagtaagtttattaggtatataatgatactttccaagttccagcctgtttataaaggactctgtataaataaggaaggggcccaggaatggtgacatatttaacgtgtaagtcaggatgctaaatgtctgactgtatttgtttatttttttctgaaatggagtcttgctctgtcacttaagctagagtgcaatggcacaatcatggctcaatgtagccttgacctcccatgctcaagtgatcctcccacctcagcctcctgagtagctagaactataggcacacaccaccatacccagattttttattttttgaatgtatttatttatttatttatttattttttgtagagacgaggtcttgctttgttgcccaggttggtcttgaacttctggactcaaatgatcctcctgcctcagtctcccaaaggattgaaattacaagtgtgagccactgtgcccagctcctattatatttttaaaaggaatatactgaggaaaatacaaatggagttcaactgataaaaagaaacctctgtaatatgagcaggtgaatacaatttacaagatcatacttcagtatgaattcagtaggaattgcatgttttgcctgctgtgtgtccctaagggtgacacactcctgaatgggactttagtttgccataagcctgctttgttttgtttgtggtagaaattccatgctatgaggaaatgctttcatttcttttgatatctcatgagcgcttgttgcaaaaaacatttgtaggcaaacagcttcacacatattaaaaacttgtagcagaaagttaattccctaacataagttgtccagctcagggctctataatcctgtaattcattttggttccaataaatacgtactttctgtgagaccctttggggaaagggtaattagatatttcacatcagtgggatatctttccttcttttgctccccctccttctttccttctccttttcttctctttaattcttctacccagaaaaattctcaaggagcaaaaatacattactctctgcatttttataagctggccagttttgcttcctggcttttgaacagaaaattatgcctcaaaaataatcccacattattctctaaattcattttcctcagtcattagcccataacggcaattttccttttgaaaataaagaataatgatcatttattgagacaaatcctcaatcagaatgattcaaagagaatacaaatttaatgatcaccctgagaacccaagtaatacatctcaggaaataataataaaatttatgatggccttaaaattgcttaactcctttcaggaaaccctgaattatagggtagtaacataaccaaggactggcaacaactcacaaaagtctagaagagttttgcctttgagttcatagacaaagatgcttaaattgttccccgttcaaaaaataaagattatttattatttactttcctgtgcaccggacactcctgcaacatgactataactcttgcgttcttagatttgatcttcaaggtctctgaatgatgaaaaaacttgtagggtagcatgccaaccaacttgggttttttgtctgtttttgtttttggaggaggggaacaaggcagggagagagggagagggagagagagagagagagagagagtgagagatcacactaccaggagcttcataaagaaacctgcaatgcagaaccaaagtggatgaaagcaaaaggatacaacttttccctccagatgattttactgggaggaagaaagatttgaaactattgagtgctttttctgataaccacctatggctctctccaaagacacacatgtaaagttgggcaagttgttttctgtcatgtcaggaaaatatttagtagcagtcttacaaaagtaagcactcagcgccgtcccagggagctgtggatttgctgtgcagccttgtttccttcaacaggttcctttgttgctttgtgtgttctcccgacaaagggcctgcccttcttctacagatgggtttaccattctctctgaatgaagactattcagaagtacacaaaccaacaaaccatccaagctgcctctatctgatggtcctggtatatccagagtactaaatagtggcctacaggatgggaaattcacactgactgactccacaggagactgagaaagcttaactggctgatagctgtaaagtcctttgaaggaacaagcactgtttaaaattctaagtagtaatcttataatttgctaatggaaagaaatataacccagctaatgtgtgcctcccatttcagagagtatgtttcaacagcaaagccctttacaatatttagataaacttcgatgtatagaaagtgcaacagcaaggtaaacagcagggcttcccgctatggcattttaaaatgtggtgggtgaaatttgtcactcctaagcaagtgcctatagtaaaaataaaatatcactatttatatggtatgtgttaaaaattgtccactctccccaactacaccagatcaaaacctcttgttttttaaattatgaaattattgaactgtattgagcacacccctacttatgagttgtgtaacctggggcatgatattgaacccctctgagtcatttcctcatctatctagacaaggctaatggtaatacctacattgtagggctgtcgttagaattttaaaataatttaataaaataaaggctagtatttattaaactctaaatacatgtttgctgctatcagcagcagcagcatcggtcggcaatcacgccaacactcctcaaagaaaacagttctgaaaaggctgtgtgcatcctaggtctgaagattttcttggtctaaagagtctcttgggctagtgaccaaatccttcattaatttcaagagctctgggaactctctgaaactgaatgtggaatggtataactactggtctgtgcacatttttctagaaaacctcacatctttcatcacattaagaggttaagaatcattgccatatgtagtcattagcttacctttatctactttctacttctaacggagaactagagtcctgtttagaacaagtaaccaggacagggacagaagaaggagactatgcatctgtcactcttgctgattagtctccaccctctcccagcttctgcgggcctcctctcccaagagttgcgatcctagacccacctcccatctgcagtctcaacctatcctcttctaaggactaatcatggcatatggcaggagagatttaagactagctaggtcaatgctctaagctcaacatcaagtcacctctgaggcagggtgttgtcatggaatgatcatgacctctgaaataggaaggtctgtgtttgatttggcttgaccacttactggacgtgtgaccttggaaacgtttacttaatcatgtcttttgtcacctataaaataaatacaataagatttacattgtgagtctatgagagagaaatgagataatatagagaatatttttaaaatgggagcatatgtcaggcaacagtagatgctcagcaatgttcttttcttacctgggcttcaacctggcacccttggtcaccttcccaggacccaaatccctctaggaataaactctggcccttgctggcttctttattcttcctcccacctacatacttgaacccatccaaagaaataggtctgactaccttggaaaccttttctgatgcttactacttgtccaacattcatttttctgtaccatgtgtgtagatactggattccccatcctagaattctacccacctcttgggctaccctgttacaatgtgtgactgactatcctactcccactttccaagttaaccacttaattgaatggctgcccatcaacatactccttaaatgccaagttagttctgtcaaacccaatccacagacaagccttatcctcaaaccttttctgccctctgccacagtgctaactggttcattgtgcttgttcagcatgcagggacctttaatttaatgggcctctcccatttttcacatatcatgaaagttatcaaatttaggttaattaagtttaagacatccatagttattcgagtgaaaacttgaaggcagcataatggataataatggtaaaatgataatttttgagctcttagtagatgccaggcatagtcctaagcagtttaaatatatttttttcatatgattttcataacaatcctacatagtagattatgatcattatctctactttataggtgaggaaactgagacttagagaagttaagcaaatggccaaaagttatgcaggtagtaagtagcagacatagaattgagaagacagcccccattctaaataagtatgaaaaatttcagggtgtcaatttttagctaaggaaaacttattcatgtgtgtgtgtgtgtgtgtgtgtgtgtgtgtgtgtgtgtgtaaatgaatagatattcatttacttatatatctatttcccaggcctcaatgcaatcagagatctctgaagaagtgaccatattatgaacataaatttttgacttcataactttacagtgataaataacctcaggttatcaggatcctaaccttaaaccacctgagattttatcactgttcctttagtaagcaagggatttttcaaccctgagacagataaaaaatagattgtatggtcaatgaaatccattatattcatactttttggttgagtttaggtaatggaacaatctgagaattttgtatcaagtatttgtgatgtttaagaggatttatcatatttaagaatctgacagattgcccctgcaattagaagtacaattgattactgacttctaattttaggttaaaaagtttaacagaatttgatgtttttaagtagtactgagatgtttaaataactgaatttattctttatgagtctagtatatttgattcaaaacatggcttcaaagcttagaaaggttttgcttgttaaggttgtgagcttgtactgccaagtattcgaagtgtttacaaagaaagtaaaattgttaaatgtgtaaagttattttaaaatattgatgaatacatttaacaagtaaatacaaaagtgtatttaagtagacattattcttttatggcattcataaattcataaattgcacaagataacctgagttgctctaaatgcttttcaaacttaagtttaggggagcaacatcagcaagatggctcactagaaactccagcactcatcccttccacagtgacagccaaaacaatgaataaacaactacactttaatgtacataactgaaggagagtgctagaatacatcaaaggagtaacagaaaccctggtgagcacagaaactcaggacagccacaaagagaatggaaggaaacatcacaactccaccaccctatccccagctgagatgagccagaaacccagaggaaactttccctataggaaaaaggcaagcaagaggattccagtagcctccaccaacaccttggacacccacagtcctcactactggagtccttgtagtcttcactggcactaagtccagctgagggagctgcctacaggccacacagccacactcacctcagagaaggaactaatactgtgctctattccctgtagcccacatggcaactgtgctatatcatcttagaactggaactactgctgaagtgtgattttctctgagggtgagcaggcttgacacccctgcctccataaggctaagctgcctccaaaccaccccaaaccagtggccacagccaagctgccagcagctgttaatgcctttccccatggagccaaacagtgaaaactgctctacctgccctccctcaccttcacctgccctctcccttcacctgccctcttgtgctagagatgaagcaatacattccctcctggggaaacagtgctttggcagaacagctccatctgcttctctccgctgcaactgtacactgcttctaggggtctgagccaaaatggcacagtatctcccaaggaaatagtgctttggtaggaccctgtatcccaggtaaatggtgcctgggccacacagaacagtcatgcctgagttaaagtgtcacattgccccttggggaatcattgccttggtcaagttaaacaactgtgcatcccagggctgagctgatgtagtatcttgtgtcccaaggaaacagagtagaacatgacctaagacagtctaccctactggacaatctagtaccctgctttcctgaagctggactagcccactagagtctgaactgctaagacctgctgtttcctggggagtggactcatcactgtgctactccctgccctccaggacccaaacaatacccatgctcagtcattctagggtacttgctgccactgcgcctggccacatggagtctgggatacagatatgccccaccattccaaggtctaaatttaccactacatagttcttcattctcagggacctaagctgccactgaaccctattggcttaggctcctaaattatagctgtaccatgcatgctgtgctcaaacccctaaaactctgcttctttcccagagctgagccagggctgtatcctattccccaggggtagaatcacagctacaacctgacccactgaatcaaagctggtaggggctgcctaacagtcatagattctggctctgtgggaaacctatatttgacccagctacagagagtgaacctgtaccccaggacccaagagccacaataggcttgtgaaactctgatattagcaccctgactccatagccacttcaagtaccaatccctggaactcaaagcaatggaactgcttgtaggccatgtaagagggatcctcttgtttaattatccccattgtgaggaaaatcagaataggaggaccccaaaagccctgccactgaggacattaacaacctatgttgtcactgccactaccatacccctttttttttaattatactttaagttttagggtacatgtgcacaatgtgcaggtttattacatatgtatacatgtgccatgttactgtgcggcacccattaactcgtcatttacattaggtatatctcctaatgctatccctccccctgcccccaccccacaacaggccccggtgtgtgatgttccccttcctgtgtccatgtgttctcattgttcaattcccacctatgagtgagaacacgcggtgtttggttttttgtccttgcaataatttgctgagaatgatggtttccagcttcatccatgcccctacaaaggacatgaactcatccttttttatggctgcatagtattccatggtgtatatgtgtcacattttcttaatccagtctatcattgttggatatatgggttggttccaagtctttgatattgtgaatagtgccgcaataaacatacatgtgcatgtgtctttatagcagcatgatttataatcctttgagtatatacccagtaatgggatggctgggtcaaatggtatttctaactctagatccctgaggaattgccacactgacttccacaatggttgaactagtttacattcccaccaacagtgtaaaagtgttcctatttctccacatcctctccagcacctgttgtttcctgactttttaatgatcgccattctaactggtgtaagatggtatctcattgtggttttgatttgcatttctctgatggccagtgatgatgagcaccaccatacacttttacagcctaagtcattcaggcatccacagttactgttgacactgaatgcagctgaagaaactgcatagatactataccactgaacctacctggaaacaaagtcaccacacttttcctaattagcacactaagatccaactacaggtgaaagtctttctctgcaaaagccactctagaaagtctggaagaggcaatttttccaccaaatgcatagacattgatgtagaaacacaagaaatatgaaaaagcaaagaaatatgtcaatgccaaaggaacaaaataactccctagtaacaaaccctaatgacaagaaaatcaatgaattgccagaaaaggaatacaaactagtactcttaagaaactcaacaagatacaagaaaatacagatagacaattcaacaaaatcagaaaaagaatttattatataaattagaaattcaacagagatagatattataaaaaataattcaattaataaaataaaaaatacaataggcagcttcaagaacagacttaagtatagaaaacaatctctgaacctaaaaataggttatttaaaattacttagctagagagaaaaaaaaataagaaagaaaaagagtttttaaaaaagactacaagacttataggacaccattaagtgaacaaattttcatattatggcagttccagaaggaaaagatgtattaaaaaaaaaacctaatttaattatctaatagctgaaaatttcacaagtctggatagagatgtgtatatacagatccaggaaactcaaaggttcccgaatagattcaagccctgatgcacattatagttcaattgtcaaagtcaaagacaaagcaagaattctaaaaacaacaagagaaatgtgtcacagtacatttaagggaatccccattagactaacagaagactttcagcagaaccttatagaccaggaaagaacagaaagctacattcaaagtactgaaggaaaaaaactgtcagtcaaggatactatatccagcaaatatatcctttagaaatgaggaagaaataaaacgtttctcagagaagtaaaaacagggaattcatcaccactagaacagttttacaagaaattctaaagggactcctgcatctggaagcaaaaaatgattatcactactaagaaaacacacaaaagtataaaactcactggtagaggctgagcatggtggcttacgcctataatcccagaattttgggagtccaaggtgggcagatcacctgaggttgggagttcaagaccagcctgactaacatggagaaatcctgtctctactcaacacacaaaattagctgggtgtggtggcacatgcctgtaatcccagctacttgggaggctgaggcaggagaatcacttgtacccaggaggtggaggttgcagtgagctgagatcgtgccattgcattccagcctgggcaacaagagtgaaactcatctcaaaaacaaacaacaacaacaacaacaacaacaaactcactagtagagcagatacacagaaaaaaagagaaaagaagcaaaacttatcactacagaaaatcactaaaccacaatgataaataataagagaagaaagaacaaaggatatgcaaaataaccagaaaatagttaacaaaacgacagaagcaagtcatgacttatcaataataaccttgaatgttaacagaataaattccccacttaaagacatagactgacttaattgatttaaaacaaaagaaaacaaaaacatgatccaactatatgctttctataagaaattcacttcactactaaggatacatacagattaagagcaaaggaatagaaaaagatactccatgcaaataaaaataaaaagcgagcaggagtagctttacttgtatcagataaaacagactttaagtgaaaaaactgtaaaaagagacaaagaggatcatcatataatgataaaggaatcaattcagcaagaagctacaacagttatatatgcatccaacactggaacacattgatatataaattaaatagtattcaatccaaagggagagatagaccccaatgccataatagttggggaccccactctcatcactggataggccatctagaaagaaaatcaacaacgaaacattgagtttatactgcattttagctcaaatggacctagcagacatttacagaacatttcaactgacagtggcagaatacatattattttcatcagcacatggaacatcctcaaggacagatcacaaaggccacaaaataagtctcgacaaatttaaaagaagtgaaatcatatcaagtatcttttctgaacacaatggaataaaactagaaatcaataacaagagggacttttggaagctctatgaatacaacatgctcctgtataaccaaagactcaatacagaaattaagaagaaaatttaaaaatttatgaaaatggaagcacaacatatcaaaacttatgagatacagcaaaaacagtgctaagagaaaagtttataacaataaacacatcaaaagagtagaaagactttaaataaataatctaacagtgcaagaacaaaaatgaaaacaagaacaaaccaaacccaaaattagtacaaggaaagaaataacaaagatcagaggagaaataaatgaaattgagactaaaacttacaaaagatcaatttttaaaactttttttgaaaagataacaaaattaacaaaccacgagctaaactaaccaagaaaaatgtcccaaataaataaaattagaaacaaaaagagagaccttacaactgataacccacatatacaaaagatcattagagactagtacaaacaactgtacacccacaaattggaaaaccaaacagaaacaaattcctagacaacctaacaagattgaacctagaagaaatagaaaacctaaacacaccaattacaagcaacaagttgaatcaataattttaaaaatgttctatcaaagaaaagcccaggacctgatagcttcactactgaattctaccaaacatttaaagaagaactaatgcccatccttctcaaactcttctagaaaataaaagagaagggaattctttcaagctgattctacaagaccattattaccctgataccaagccagataaggacacaacaaaaaaaggccaaaatccctgatgaacatcgatgcaaacatcctcaacaaaatactagcaagttgaatccagcatcacattaaaaagaacattcaccatgatcaagtgggatttatcccagcgatgcaaggacggttcaacatatgctaatcaataaatgtgatacttcacattaacaaaatgaaagacaaacaccatatgatcatctcaatagatgcagaaaaagaaaagaaaattcaacatcccttcctgataaaaaccctgaacaaactaagtatagaataagtgcacctcaacatagtgaaggccatatatgacaaatccatacctaacattatactgaacagggaatagctaaaagcttttcttctaagaactagaacaagaccatgatgcccactcccaccactgttattcaacataacattggaagtcctagccagagcaattaggcaagagaaagaaataaagggcattcaaaatggaaaggaagaagtcaaattgtccctgtttacagatgacataatcttaaatacagaaacccatataagctgtaccaaaacattcttagaatgagacaacaaaatcagtaaagttgcaggatacaaattaacatacaaaaatcagtaccatttctatacaccaacaatgaactagtgaaaaaataaagcaagaaagcaaccttacttacaatagctacagaaagaaaatataaaatacctaggaataaatctaaccaaggaagcaaaagatctctacaattaaatgacaggacactgataaaagaaattgaagatctggttacaaaaaaaggaaaatatcccatattcatgaattggaagaacttatattgttaaaatgacaatgctaccaaaaacaatttacagatttgatgtaaaccttttcaaaataccaatatcattcttcacaggattagaaaaaatcctaaaatttatgtggaaccactgaagaccccaaatagccaaagcaatccccagcaaaaagaacaaagctggaggtagcacattatctgactttaaaatatacaagaaagtgataataactaaatcatcatgttactggagtaaaaacaaacacatagaccagtggaacagaacagataaatcagaagtaaatcctttaattatagcaaactgatttttgacaaaatgccaaaaacattgagtgtgcaaaggacagtctattcataaatgatgctgggaaaactggatatccatatgcagaaaaaatgaaactagacctctgtctctcacatatacaagaatcaaatcaaaatggactaaataattaaatgtaaggcctcgaactataaaactaagaggaaaacattggggaaaatgcttctgggcattggtctgggcaaagattttttggataagacctcaaatataaaggcaacaaaggttaaaatagacaaatgggattatatcaagctaaaaagcatctgtacagcaaaggagacaatcaacagaatgaagagacagcccacagaatgggagaaaatatttgcaaactatccatttgacaagggattaataaccaaaatatataaggaactcaaacaactcaatagcagaaatgctaataattcagttttaaactgggcaaaagacctgaatagacatttcttaaaaggagacatacaaatggacaagaggcatatgaaaaaatgctcagcatccgtaatcctcagggaaatgcaaatcacaaccacagtgagataccatctcaccacagttataatggctactatgaaaaagacaaacaataacagatgctggagaggatacagtaaaagaggaatgctagtgtactgatagtgggaatataaattagtacagccattatggaaaacggtatggaggttcttcaaaaaaactaaaaatatctacaatgtgacccagcaatcctgctgctgggtatatatctgaaagaaaggaaatcaggatattgaagagatatctgcatacccatgtttactgcagcactattcataatagccaagatatggaatcaacctaagtgtccatcagctatggatgaaaagataaagaaaatgtggtatatacacacaatgaaatactattccgcttattttatacaattaagcctaaaatatattttaaaaaataataaaatcctatttgcagcaacatggaactggaggtcattatttttatgtgaaataagcccaacacagacaaatattggctgggctaagtggctcatatctggaatcccagcaatttgggaggctgagggaggattatttgagcccaggagtttgagaccagcctgggtaatatggcaagattctatctctataaaaaaattaactggctgtcctagctacttggaagaccaaagtgggaagatcgcttgagcccagaaaattgaggctgcagagggccgtgtctgtgccattttaactttactccagcctaggtgacagactgagaccctttctcaaaaaaaaaaaaaagaagaagaagaaaaataataagaatgacagacaaatattacattctctcactcctatgtggaagcttaaaagtgtggatctcatggaggtagaaagttgatgggtgctactagagcctggaaagggtggcaagaggggtgaagagaggttggttaatagatataaaaagacagctagatagaaggaataagttctagtgtttgatagcacagcagggtgattatagttaacaataatttgttacatatttcaaaatagctgcaagagagaatttgaaatgttcctaacacaaagaaatgataaatgttcaaggtgctggatatcctaattaccttgatttgatcattgcacgttgtatgcatgtactaaagtatcacatgagcctataaatatgtataattattatgtatcaataataaaaaacattaagtttaaaatatatctttaataaattaaacttttgttaaaagcccaaattatagtaaataaacccttctgcatacaaaaagtgatctattagccactgaaaatcttataagagagtttttatgacagacttatgagcaataataagtattttaaaatataaatcagatcatgtcatgccttggcctaaaactcttcattgtttaacagttactcttatgagaaattccagtctcccagccaaggtctatgaaactcttcaaaattgactcttgtccacttctacctcctcaccaattatcaacctcactaccccagtcactttggccttttttcctctttctgatacatcatgagcttattatggcaacaagtcttttatatttgttaacttctctacctggagtacttttcccaaaatattttgcaaggtgggctcttgcttgacatttaactctcagctcaaatatcacctcctccagatgcctcctctaattgtcctttacaccaataacctctgacacattcatatgttttacagtcttaggaatatcctcaatgcctgacttaccatattcatttattggctcccatatttatttccccctctcccaaataaaataaaagctcaatgagagcaatatcttgtctttcctaaaccattgcttggcacatattaaatgctcaataaatatctgttgcacaaatgaataaacttaaataaataaaacacatctttgccttaataccaagttatttttaaatcatatccttatgtaatatcgaatccataagactcaattatctggggtttatttgacaaatttgattatcttatttgggggttaataccatgaatggctaaaaataggccaattgccaagcagagcacacaagcaaatatgatccctccccaggatgcttgccatccaaattacaagcattgaaaaatcttggcaaggcgcctatgctaataagaaagtgatccaatattcatgagaagaacttgaaaaactattatttttgcctgcaatcttcttggcttttccataattaatatgtcattatcatcagaaggctaagagatcaagagtggtaaaagcaacctttcatgtaatactcatagggacaatggtatttagcaaatatcacattgacttctggtaagagaaataatccagaatctgtggttgctagaaacctagtatatggaaaaaatagaggggcagttggcatcaagacagaaaggtagggttttaaagctgatctagaggtagaaaaaaacacattctagagattcctgaagaaacaaattccaagtactcattgtcatgaaaaacggtatgatggagtcctaccctctgtctgtattgttcttttttaaatagatcttcctggttaggtcaggaagaagctattcttgaatgccagttaatacattcctccatttactcaacattctatccctacaccaaattagctcagtagaaaggctatctagactatctactacctaggtcataatacattagcaacctgtacaaatgtcttttcagagtttcagtttatagcatgccgtggtttgttatccagggtgaatctaggaaacaattagatctataatctcacagcaaacttcatttgactatatttgcaaatgttatcaactatgttatttttttaccatcatatatataacgattgatataaaaagtttttcttacagttaggaaaaatttgtctctcctgacaaagtggtattcttccttttgcaactaatggcagttatgtaacttgcttctcttagatggccttggccatctaagaagctcagagcagaactaacttgtttaggtcgtctagaatgacttcttccgatccctatttttctctgcttaaacttgttgttcagttctgttaggacttttgttttgttttgttttttacatatatgccttttctcattagttggttaaaatacgcttttaaagtgtataagataaaaatagtagagccagacacggtgccttacgcctgtaatcccagcactttgggaggccaaggtgggcagatcatctgaggtcaggagttcgagaccagcctggccaagatggtgaaaccccatctctactaaaaaatacaaaaattagccaggcgtggtggcacacgcctgtaatcccggctactcaagaggctgaggcaggagagtcgcttgaacccaggaggcagaggttgcagtgagccgagactgtgccactgcactccagcctgggcaacaagagtgaaactccgtcccaaaacaaaaaacaaaaaaaaagagtaaataattttgaaattttaagctcccttttaccaaaaaagggttctgacttctggccagaatgtagtaaatgtcaagaaatcagtcacagctgaggtagtgccaggaatttggtgtgggggacaggaggagacaagcaaagactatttaaaaacaatgaattttagcctgtctataagtactcttttctatgaaaacataaaaggaaatttcccttacaaatgttgattgataaacatgaacgtctatatggaaaataatgcgatatctgagctaaaaggactcttagtgaactctgatccaatctccttgatttgaggatagggaaaagtgtaatccctaaaagattaaatgatatttccaaagaaacaacaagttggtaattaagtccggcctgaaatctggggcttctgcttcccaggttatgagctttctaacactccaagaactgtgaaccctggagggaaggttgtaatctgactttaactcctgaggacatgtggatatgcccttcagggtccagggacatttgggttgcacattaacagttaaaatatgctaaagcaccgcattttctccaactccattcaatgcctaaggtttattgtttgttcagttttagccaactatatttcctgagtgtttcaaaaggcagcaaggtggcgaggatacaagggaaagccgctacacattcaacataggaatacaaagattatagtagaattctacgcatcaaattccaattcaaatttcttctggggtcagtgtcagtatctcccacttcctcctgacacatcctgagctgaagatcccttttaaattttctttctaagaaaaaaaaaaatataggtttattgatctcctttaaatgatagctttagaataacatgtcaaattatttctgtttcttgacttattctaggaaaaaagacaaagaaataagatattcatataaatgaaaagtttcacagccggcaaccaactaattggtatatatttaaacacatttaagatattacttgattacattcaataggcataatgtccatataagaacaatggttttgtttggaacatataaaagtgatagttctgtaacatgtatttatttaactttttattttgagataattatagattcacttgcagtggtaagaaataatatagacagatcttttgtatccatcacccagtttctcccaatggtaaatcaagatattgacattgatacaatccacctcagatttcaccatgttagatataagttctaaatttctcatcaaagaataaatatgccagtatgttcaattctttgccttctacttttaaacttaacttcctcgtaaagtaacctttttcgattacctactccaccccgactcattccaattcctactccaccccaactcattccgatcacctactccaccctgactcattctgattacctgctacctgctctgccctgactcattctccacgctgcataaccattttttttccctccaaagcactcaccccctcactctctttaaattagccaattggaattagtttcgcctgcgtggtctaatcctagccaacaggggaacgacacggcagcaggggccatgtgcctcagggataagaacaccttcccctcccttgtccaagtgtgcgctcaccattgttccatctgtaagggcgtacccttctgtagaagtaacttgccttgctgagaattaaaagaaaattttatattcgatgccgtttcttttgcggcaccgaaactttatatataacaaccactttgacattcatttatataaagatcaatttttaatagctacaatctatagagcacttctatatgccagaccaactgctcactgatgaacaaacattcttctagttcattcctacaaaaaacaatttaccagtggaggcaatagtgaggactgtagcttagaagctttcatgctacaatgtagtatatgctacagtgtagtaccctatagctgtatgggtggttcattttaaaaattgtatatgcagccattcctcaataggctcaaaataaatattgacagaaataggtaagtaaatcaaaagagaaaatcaaagccaggaatcaaaagaagaggcaaattgggttaatatgattcaatttacgtctgggcttcttggtagacaggacaaaaaggtaaacagaatgagatatgcaatcctttttgtcaaaaggggaaactcatattgatcctttaagatatagatgtttaaaaatatgtctatgtctgtgcacatacccttatgctagctccagctcagttttttaaaataatcttttcagtcagagtttatgaacatccaaataaaactgtgtcaacacatgcttaatacatcagtaaaactatttttaataatgtactctcctattgaatatgggttggttttctgacttgctatggcccattgagtgcacagatgtcacagtgttctacttccaggtagtccttaacaaggctggcagcttctactttgaaactttccaaaaaattagcttccatgatgtaaaaaaaaaaaaaaaaaaaaaaaaaaaggccaatccagaatactacatgataaacacttgtgaagagactgaggtcatgtgcacagcaccaatgcacagatacgagtgaatccgttgatcttccagggcagcatagccgaaagctgaatgcagcctagtgattgacccagcctacaccaaatggagcggaacaactacccagccaagccacgccccaattcctgacctacagaaccttgaaaaataatgaatcactgttggtttaagcaacagaagttttgaggtagtctattacacagcaatcaataactgaaacaataacccaaactgataacctgaaaattcattttgtaaacctgcatctaaacttggtacaataattaaacattttctgtgcaagtagtccctcttatatgactagaatgtgtggaatgcctaggagcagcttttccaaatgaattcatcaataaacataaaacataaaatgaactgctctagttttcccagagattctgcctagaacagactgccctaggacagatgattaagttagtttgggtccaattcatgactacataacatggagttagttatgtcttaggctacgtcccttcaggcaacttggagcctcccagggttaaagaagctctgccaaaactcaaaatcaatagggccatttaaatgatgacatccccagtgggtaaagatatttgactccacacatcaatggcatgagctactgtcatgggcattcgtcaataggttgaagatctcattaaagctttttaatttctgcttagtggtattaggatttaattgatgccaaagacactgcctgtcactatacagtgatgttgtggcagtcagtagagaatgtcttacacacagtcctagaagaccttcctagaaaggccagggcagttctactggctgcatttcctggcttgacaggctactgctactttatagtagctctctctatgttgttctaccttcccatcatccgtgcacccatcttcttttaccagcaacccaattttctgaaaaactactccatctttattcttagtccatgttgctcagaagggtttgattctacccacagcttcaggcatgggcacaccacccagatcaggttgatcaccctggacatataactcaagacagtgtcaatgagatcaaaactttgaactctcaccaatactattggaaatgagaaactctattgtttcccactgggttgctaaactggtagaatggaatgggtatatataactgacagcctttttgccattccagggagataaaccctaagaacaaacaatgcatagatcacttgatcttctggatccagcagttctagaagtcatacgtgtctatattttttcagtatataagccaataaaatatcattttcatctaggctgttttgagttgtatttgctatctcttgcaatcattctcagaaactgccaaaagatgggctgctgcacaactatgggatgatggaatgccatttattttctgggacagtgcaatttattacaatttattacactccctttctgagccatagatcagaaagtacccgggcgttaagacaacagcacttcaaaaaacaatatcatacttgatcttcataaagttaagtgagcaaacaaggaaactaagacattaatgagacatgtggttcaaaagtcatccatcaaatcaaatatggcaccaagactggaaaccaagtcttcatgaaatgcgaggtttctgttgcttgaatcaatggaccttaaaggtgatttggtcttatggctccccaatgtcagtccatggattgggatctgttgccagagtatgttcaaatcatcaatagtccacagagtaatgagaaaaataaagaaactttgataggttttaatggagcaatttcatttcacttttaaagcctgaaatttcatccttccaggtttgtttggttttttcttttggtgttaacatatcctctttttgaaataatagcaatagtagatgtaaatcatcttttttggctaaatataaagtaagcaagcccatagcctcccctggaaggcactgccattgtttccaatactctcagctttaacactgacagctacccttgctctctttctcactgacacccaccaactcaaccagccctctcccaccacacaccctttctcaggtcacctctgtgctctccacccttggagctttacctctgggtaattcccttgtcttttgtaatgtatattagagtgtatattagagtgtaatgtatattagacgtctataactcctgctattactctgctcagcaccttcttaggacagaagcagctatcctttctcctgagaaggtgggaaaaaggcaaattatgcatacttataaataaatatttgttggtctcaaacaagtaaatttataaacattgatactaacattactggaagcataaaagcattagaaagacattaaatgccctacagtagagtgaaaattaaattctgccatctaggagaatagtatttagtcattaaagttatgattataaatactttgtaataatatgcgtaaatgcatatgatataaggttaagtgaaaagatacataactacaaaatacaactatgttaaaatatccatgcatggattaaaaaaatacagctttaactgcatagtggagttaccggtaatgtctacttttatatttatagaaatctctgttgtccagattttctgcaatgggtacatatgacttttgatggggttcagaacatgctaccacaaaacatggcaccttggcattttgaatattttaagctgaaggagtctgagaaacagcatgtgctggaaggactctctgaagcaggtcagaagccccttgtgtgagaggtccctccctaaacccagagaaaaggagcatccttatctctgaagatggagggacacacggagaagaaactccaggaaccagccttggtaagtttcccctagtttactacacttagttcatatgcttttccacaagtttccactcttcatcaaacctagtataaaagcactcaggtttaactgattcatcagattttccttccttatgaatgctctagtgacacataaaacttgtattaaatacatttgtatgcttttctcttattaatctgtcttttgttatagagccctagccaagaaactaaaatggttaaagggaagatttttcctacactttaaagtgtacaaatatatatttattaaagttagttccaattattatgtagccaatatttactgattactctactctgtagatgccaagaaagccatactctttcctgatagtttcctttgtgtgacaagatttgccacagatgtaggcaatgttggtattatacttttcttgacagctagaataacttctgctaagctaggcaaccacatctctccaagccatccttaatgcctaatgactgccactgcacctgacctagctccagggctgaccctttcatgtttaccccaaggccatgcccatctgggaaaccacctgggcaggtaccttccaaccaaattaaagtcaaggattccatccactatcactaaactagcacaaaccaagagagagaaatcaaggcaccacataggggttaggacaagtaatcaaagtcaggtagaaatcccagaagggtggtatacaatttatatttccctagtgaggcccattctagaataatgggaaaggttcactgttgtcagaatgccaagaatgaattctctgaatctggccttccctgaaatcaacacttaggttctgacaacctctaaattcatcctcactaactacatcaaacatttagcatgctttttattgtggggatgggggttgcttttgtttgatttggtttatctggcatctgaaacaaaagatgggaaaggatgacattcattcttaacctcgtgtatagttaaccacatcaaaaaaggctattgttagatacaaataaacgttaacatacattagttccaaaaggctaaagcctttcaggtgaacattattggacactttctcccctgtgccagacaaaactatgcatggcttattcccagagtcaccccgtcctttccaaggcattctatgctgcctcagggatgcaaacaattatggtacttccaggagagaaggagcacataaattctgtcaccccttgaccccaggatccaatttcacagcaatgggtgaaaggattttttagtcaagagatgatgtgagacgcacagataccccttggagtcatttgggtgacagcattaaagagaatgaaatgagctatcttgaaatggaggccaagtgcagtcactgcatctggaaagttaggctccttgatattcaaagctctggggctcggcaaaaaattcaaagagcttttagtattcaaaacaaaacaaaaaaaaacaaacaaaaaaacaaaaaacactctttaaaaaattaaaatattcaaaactgtggaaaacttgcaagaatcatatcatgaacatcccatactgtcttcccaagattcatccatttgctattattttgccatatttgctttatctcttcctcctcctctgctccccttccctcaaacaaacaaatgaaaagtggtttttgctaaaccatttcggtgtaggtgtgaacattaaaagcttctaggaattacagtagtctctcacacatacaatgatcaaaatcagggactttaacgttgatagaatactatcttacacgtagtccatatttacttttcttcaatcccgagtgtcctgtatggccactttcctccagtctaggatcgcactggcttttagctgtcatgtctctttagcctccttgaagctggaatactttctcagccttcctttgcccatcatgtcattaacattcttgaagaggacaggcctgtggcttttcagagaatctatgctggtctgactgttatatgaggattagattcatagtacatgtttttgaaaggcatactacctaagtgatagcatatccttctcattgcattacatcagttggcacctgatgaaacttggtcccattcttgatgtgttaaccttgattccttaaataaggtgttttctgccagattacctcactgtatgtgtgtgtatgtgcaggtattcctctttttcccttttataattaataatgtatgggaagacttttttctgactgtgtaaacaccctgctaatcaacaagctttcactcaatggtttaacacctattgacaattctactctgaatcaattattactataatagttgtaaaaaagtgatttttctaactctattatttctttcacagcaattagttggttttctagtgcaagaaacagctgccctttctcccttctttccttcctttccctccttccttccttcctttctttctttctttctttctttctttctttctttctttctttctttctttctttctttctttctttcttctttcttttggttatatcttactcatttgattcttaagtgtcccatttcaagctggttcctgtgtcattcagacaggtcctcattttttttttaatcagtttttattttctggcacaacaaaatgttccaggcttttcttgtcctttccctgctctgaaactgcaattagtcattgctctaagcaggggtccccatccccaacctccaggctgcagactggtaccagtctgtggcctgttaggaactggctgcacactaggaggtgagcagcgggcaggggaacctaactgcctgatctccgcctcctgtcaggtcagctgcattagattctcatggcaacattaaccctattgtgaactgcgcatactcattatgagaatctaactaatgcctgatgattttagatggaacagtttcatcctgaaactatccccgctcccctgccaccgatggaaaaattgtcttctatgaaaccggtccctggtgccaaaaaggttggggaccactgttctaagggcccttatttttagtggggaatgctatttagaaagcaagagctgggcactcagtgtgttcactgctgctaggagtgttattgcttgcaggccctttaagaggacaagtaagaattataaatatatattgagtcatgtcttcctattgatacttctaatctccatccaatagctcaggctcttccttgcctttccccaatccacagttgtactgccctccttccacagtgataagcctgactccccacaaaataatacatttacttaatcctacaatggatacaaagtaatttcagaattgtcccacaaataacacaaccaagaacaaatgtataaagttcaagatttctttccagtacttctgttgtttgattgaaggccatgcccatctgggaaaccacctgggcaggtaccttccaaccaaattgaagtcaaggtactgcattcaaaataacttgaatcagtatttttttcctatgtgtaatcatgtcatccatttgatatatagttaggttcatttactctgtactcaatttcccccatcttgttatttaatgttatttcggaatatacaaaccatgaacatggtttcaaactcaaaactatataaaaaggtattcagagaagtactacatcactgtcttccttccctaactcttctaatgctattcccaccctgtagatgaccaatttcatatcttctagtttatccttcctgtgtatccttttgcaaaaataatcagacacatagataaagacatttttatttccccttctttctacctgaaatgcagcatgctatatatagtcttccacattttgctttttgcactaccaatatcttctggtgatcactccaatcccgattcacagggatcttcctcatcctattttacagcacactactgcattaatgtattatggctcattcaaacaatctcctcattacaacataaccacgatgatgctgcacatattattatgagagaagttgaacatattttcatatacttaaggacccttttttatcaatttttgtgaactttctaggtctttgctgcttttctatcggatttatggtctctttagtctcctcaacgtgtagtaactttctatatattagcaatattagcattttatcagaaatacatcttgcaactatttcctcctggtttattacgtgtggtttatggttttttgccatgccaaagaggattttgtttaatttctaactttacacaatcagattttactacatctgaagtttgaattgtgaaaaacctttccttgtgcttttcctttttgttataaagcaatttcttatactggctaatttttaagtatccctcattacactatacatgggaatgtatgtaagaagaaaatcctatttgcctactgaccgctgggcaacttcaaaactgcatgacctttatttctgcaggcccttcatttcctagctgcatccctttcattttccctaaccccaggtttcctcagcaggccagcttcactagagagctgtaaactaaacctaaattactaaagaacacattactcactcatcataaccataggaatctttctctagagcaaataagaattagtagtacaaatctgttttataatcacatactttcacaaagcaagaatcaccaatagtatactttattgtctctcattgatgggtacattttctcttattatttttattatcaaataatccatgtttattttaggataaaattaaaactacagctaggcaaaaacaaatcaagatgttggaactgttaatattttagggcatatatgtaaacacacacctatttaaaaactctcttctttttatacctattaaaaaaaccctctgttctctactatacttgctattttgtaatctgtttccattttcatttaatataaacatctttccatgttactaagttgtctgcaaaggcattttaaaaggctacatggtattatactgtataaagacataaaatattgaaccaaatattgtgctcttaggatttaaaaaaaatatcgtaaacaactctgagaaaatttactcagacacacaccttcatgaatttgttcaaatgcttctttaagataaatacctaaatgtggaattgcaggattaaatagtacacaagattttcagggttttgatatacgtggtcaagttgccaccagcagtgtatggtgggttccctttacccacactgaacccacattagtgttatctttctctgtaatcctttttatctcctgatttagcaagactaaacaacagtgtaaagttctgcaaaagcaccagataagcaaatttagaacaaaacattactgatgtctgcccaaaactctgtaaacctgttcctaggctctaagctgtctattgaaatgtcctaagaaaccatttcactcagagaagaacatttttttcactcttcctgcacagctcagtctttacgatgttaaaatcctgtacaacttcctaacagcccttcacattcttcaggagcccgagtttggttctggttataaatgcataggatagatcccatacgggaagcatagacctaagaaatttatggaaaggaatttatgggaaagcttctctcatcagggctgtaccaattaaaaatccataaataattctcccttgtcagtttctgtataaacacattggccttagaaatttttacttcaggttctagtctaatggcctacacttctaaattatgcttttaattgaaaaacaataacatgcattttttttccagaaccatctgtgctttcccaagaacatgtaactactacagataaatccgctactttgaacaccctaattatccagtttagggttccaaaagcttaggaaaataatgccattcctgaaaaacagtacgtgatcagaaacacttgctttaaaattcgatatttggtgtgtgaagcttcttaacaagtgtttattaaactgcataatttcaaagcctggagtggtatattgcaatgttttcctcggagttgatcacatttgcatatctttttacacttcctgtgaaattaatattgccttttgtatctcgaacttagctaatataacttgccatttttacttttcactgctatgagtaatataaagtgaacccccaaagggacccctgcaacgcctacataagctttattctctcactgttgtattttttcatatgaatatattaaatcaagattaataaacctttgcagaatccactggtcctgcaaaaaggcaagattcataacggtaaaggctgctcagcaaataaaggaaacctgctcctaaaactggagccaaaggccggggttcatggagctcttgtcacatccaacagtgtgccagagactcttcacctcacaagaagtctttcaacagtcactcaataatatgtgcaaaagtggcttaaccaccaggataccaaaacccagccggtgattatcaggctgccttggctcagggatacatctttgtgagatgccaaaaactgaccataatcccaggattttaaaaatttcagctgggcttatggggatggaatgtgataataaagaaacaggatggtaggggctgaggaaaagtggaacatgatgagaggctcctaaaagcaaatcaaacacagaaaagggaaatctctctgaacactgcataccgcactgggcacaggagtcctcagttgagcatcccccactcattgggccccagcagctactttgcctagctaagaatctgctcaaagctcagggaaacctaaatggcaatacaaagaaagagttgggggcagcttcaagatagcaggctactggtacaaatactttgtgaggtcagaaaggctcactatcatgacttgtactgctgtcattgattctcctacttcaagatcatctccaacttggtcaagaggcagagtaatggggattcagggccacagttagggtgcagcaaatgaggtacaaaatttaagtagaactaaaaacaacctcagtagccaggtgtggtggccatgcctgaagtcctagctacatgggaggctgagataggaggatcacttgagcctaggagtttgaggctatagtgcactatgattatacctgtgaatagtcactgtactccagtctgagctacatagtgagatgcccatttcaaaagaaaagaaaaaaaaaagaaaaatcctcagtaatcaagataataatacttcagtgcaatctttttagaaaccaaaaaaatcatggtgaagaaaacacaattttaaataaatattaatgccctgccaaccatatttgagcctgcatggacacttctacctacatttttaatatattttaaaaattaatttttttggagaaccttaaagtcattgaagaaatactgaaaaattggaaagtaggtatattaaaacttacaatattaaatgtaaatattttatttatactaaaatcagaattcattataatttcactttcctgactctaatgggacaaagtaattttatttttatgttttgagatagagtctctctctgtcgcccaggctggagtgcagtcgtgcgatctcagctcaccacaacctccacctcctgggttcaagtgattcccttgcctcagccttccaagtagctgggactacaggtgcatgccaccacgctcggctaatatttgtatttttagtagagacgaagtttcactgtgttggccaggctaggggacaaagtaatttaaacatgttttcaaaacttacttctttgtttgtcttcttttcaatggaagaattaccatgtttgacattctcttatcacctagtgacaatcataaatgatttttaattaaacaatttactttctttaaattaattttattttgtttttccttagctttaggctccaaaatggcttggcactgtactaatccttatttaaaacttcaatgttttgttcatcatggatttttctggcatttatttgatttttgaaaaaaatggaattaaactatttgtcttgatcactaagtatgttgacattctcttaaactgtgcattaccttgttccatccaaatcaaagtcaaggatgtagccatctcagacaaataacataacaatgactttaagtgtggaaagaagcctaagatcttttattaagtgaaagaagtatgtggcagaataatatgtatagtatgggctcacttgcacttaagaaaggccagaaaaacattttaaagaataactctaagtcattacacatcaaataaacattgacggcaaaaggtaaaaagtgtagttactgaagcaagagtttctaaatcatggtgctgcaaaataatacactgggtgtccaagtagcagtaacaactaagtattaccctctgctaacatctgatatctttgaaagattgtctctacaataatgtcattctcattcacttgtagctaggtactttttttttctagagaaagagatgggatttcagcatgtgtactaggatgacaagcaaacactgtaggttcaaggaagttcatgggcatctcaacaatatgtgtggtggtgaaaaatacactgagaaccactcatctagctgctactgatcctattccataagctaggaatacgtcataagtactgttttgtcctcgcgttggggatttttgttttgttttgtttttttgtacctcctcagtatcctcctctgttaagtaatagcatttttgtttgctttttagccaggtttatggaggtataatttaaaaatagtaaaatttacacttttagtatatatttatatgaattctgacaaatgcatatagttatataacaaacaccacaatcaagatacagaacatttctatcatcccaaaaagttcccatgtactttgccatagtcaatctttaccctaattctccagcctctggcaactgctgatttgttttccctataattttgcctgttcaaaaacatcatataaatgcaatcataaaccatttatgtctgacttcttagtgtaaagcatttgagattcatccatttgatgcatatctcagtaatttatgcctttttattgctgaatggcatcctattttatggatataccacagtttatttatccatggtaataggatttggattatgatttcacaaatcacccatacttcctttcaggtcatgtggtttataaagggctgacccgaaagttccagagatgcccatagccaggcctgatcaaataacatattcagtcatcctgataatatggatggtttagagctgggcacatggtttgatgtaacaattttcgattcaagacaactgacagaactattggtaagaagttactgatggtataatggaaactgtttctggtagctattgcaccaccacaagggagccccaacttgaggataataaagccaacaggaagcaaagtgcaactaagtggatgagataccttcctaacctagtttgagcacctggatccagacatgcctaaagatctacctgtagacctgtcagttacatgaacctataaaattccttctagcctaggccaattttgattatatccctcattcctgaaactaaaatctcttgactctacagcatagaaagaaatctttcatcaaggaggttacaagagagtcttggaaacaagacacaaaaaatggttttgacatcagacaccccaactttaccacttactacttcctaagtatacaatgtcaagaattctctttactcctataaacctgtatttcctcatttccaaaatgcagagaataattccttacccattctaaaatattatcttgagaatcaaaaaaactaagttggttcaaatacaaaagaaaaataaaatgtatgattattatacacacaaaataatttgtatatgaaaaggagatattaagtgatgacggtgagagagaatcaagaggcattataaggatcaatgcagaactccagtgcttatataaggatcaatgaacaataattgtaactagaggtatttcttgagtatattcttgtgttaggcattgtgtcaggtattttacctacattatatcatttaacattctaaatatcactaaagtaactttttaaacccatttttgattaggcttagagaacataaaatactttttaagttaaagtactaactggcagaggccaaataaagacctaaatctggaccactgaaactagtgcacacttctaagttagatggaaggcatgaagcaaacactttggaaattaaaattcagttataaaaaccatcacaacacaattaatttagcaactacattcctttatacataattgtgccgagtgcatctaactcattaagatgtagaatgtttatgctgtcatataatattatcacatggtaataaatgaagttgcactatatctctaaacatctggatttcagagccaattttacacatttaattcagctatttggtgtcttaaacacatagcaaaaatacacaaggaaaaaatgattgtacatctggcatcaagatggctccaagaattggactgccaatgaggaagtcaggtttttctagcctatatcctctggaggataaatacccaaaatagtactgtttccaaagtaaccaaaatcaagaaaggagactccacaaaggaaacaagaatgaaaaagacaggcctagcccttttcaaaagctgagccttccctcccaggatccaaggtacttagggtttctcatacctgacaacctataaacgagaaagagtatcacttgtttgtccttccatttctcattttccagctttggtgcttatcaggttctccagaggtagcaaatttgtaagacatttcatctatttagattttcatttattcatccatcctttcagttactcagtgatgacttctatctgctgagccctgcactaatgatccaaaattcccaatcttcctgcctaggagagatagggagaggtagggaatatggcttctccattttctccttttcctttagtaaccaacctctactggaattaatcctttgagttcagctgggccttgagatccaacatgatttgttttaaaaatcaaggcaactattaatgtaaaaacaaaacaatacaagtattaggagaaaacatgagagaatttctgtacaactagatgtggggaaagcctttctaactataactcaaatccaaatgcaaaaaaaaaaagaaaaaaaaaagattgagaatttcaattacctgaaattttttaaaatttgcatagcaaaaaataccataagcaaaaataaaaaattaagtgcatgataggagaaaatatttataaaatatatcacagattaagctccaatcaccctaatatatattttaaaattcttggccaggcgcagtggctcacgcctgtacttcctagcactttgggaggctgaggtgggtggatcacaaggtcaggagttcaagaccagcctggccaagatggtgaaaccccatctctactaaaaatacaaaaatcagccaggcacggtggcaggcgcctgtaatcccagctactcaggaggctgaggcagagaattgcttgaacccgggaggcggaggttgcagtgagctgagatcacaccactgcactccagcctgagcaacagaacgagacttggtctaaaaaaaaaaaaaaaaaaattcttaaaacccatttttagaataagaaaaatagaaaaacaagtagttcacagatgatataggaattgcccttaaacatatgaaaatatgcttaattttacttataataagagaaaagcaaattaaaactacactaagaattataaccatattactctaacataagaggttatcaataggagaacctgggtgtggtgtacacaggaaccctttactatcttcacagcttttctgcaaaccgaaaactcttcttaacaaaaaagttgatccaaaaaaagtacattgagatactatttcttgcctatgagattgtcaaaagttgaaaaacttgacaatatactctattagcaaacagagtgtagagcaacagttcctctcaggcattgctagttagagtgcaaaagggtataacctgtgtaaagggaaatttggcattagttaacaaactatgtgtctatttccttttctatctttctacatacctatctatatatttacttaccagcaatgtcagttacagcattcaccctgaacatacaccttcaactgtatgaaaaaacgtggacataaaattattcactgtagtgttatttccagtaaaaaatactggaaagaatctaaatgccatccatagatacaatcaatagtagtcctttgtgtgaacaaccaatatacacatagaactactattcaactgtaataaggaatgaggaggatctttataaaattatatgaaataattgccaggataaaaaagcaaggtgaaagagtatacatagcatgctaacttctgtataaaaaggaagcgtatgtatatttgcttctttttataatgaagacatgaaggataaaccagaaactaatgaaaatattttcaaagagcgtgagtaaaaatggagctggaagggtagggatggagtgggactttcttgaacaatttttttttctagttttgacttgaaccaggtaagttttgacttgaaccaggtaagttttgacttgaaccatgtaaagttttacatattcgaaataaaaaatttaaaaaggatttataaagcaaaacctaaacttgcatacaggcaggacataaatggatctaatgatatatcacatcaacgtaaataatcacagaggaaaaaaataaattcaaataatttctgaagacagtattctgaatgtatatccttagtggaatattaggaaaaaaagaagtccaaataaatcttgaactttacttaatagattgattgtcaggaggggtattgatatagtaattctgaaactattttccgtgtactataggatagagcaaatgaatcgatacattaggatctcactgtggaataaaggagatacaaatatgaaatgagggaaagtgcggaagaatcctgtgatgttgaatttgaatggttgagttgtacatggtaacatacatgcatctacctatctgtctacttatctacctatctaatctatctaatctacctatcgcctagcggcaatggcaccccagtagcaatgaacccacctagcggccaaaactttctttctaaattccattctccagtaaagggagacagggcttgactgattcttgattggggtagggaaaatgtaaggtaaggttgatacatctttttttactccaggacatactcaaagactgatggagatatgtcaaaacgacataggaactagcatcaggggatcccactggctaaatgacagacaatttgagcctcacaaaagaataaggagctaagtatagttatatcattttgtggaacttcattgagctgtgtgcttataatttgtgtatttttttgtaggtatgctgtatttcaatatgaaatgtagtgtctttttttaagaaagctgtgatacaagcagcaaataagacatataatttactttagcagaaaggaagaccgtgctctatgaataaattgttctgattacactgatggtcatccatcctactatggaaacagaggtggagacctcttttggtaagaaacaacgtcagcccagaaatgtataataatacaaagagaaaaacatcattaggcacaaatcatcgatggacaatagaacccatgagtgaaaggttcttgggacacaaaatagttacccagtctcaaagtatcaccccacagatactaatttcaaggcaaaacaaaacacaaaacaaaaaaaaaccttaaaaatggagtgacctgaagaatatccaagatgaaacagcatcaccaaaactggcacaaacaaattatatgactctgctgtgatccactgtgaagcaggcaacattacctagatagtactttggcctacaatgaggaacaattggacagatccacattgtgtggtattccacaatcactgggtcggaatcttcaaaaatacagactcatgaaagagaaataaaaggcaggagaatattctagattaagagggtccaaagagacaaaataactaagtgaaatgtgtaatccttgattgtattctaaaaagaaaatggaaataaggaaaaagagacattacaaggtatgagggacattaatggaaacatttgaatatattagattacatatcaatgttaaatttcatgtggagagtgataacagtattatgattacatattcatcttaggaggtataaggtgaaatgtcagggggtaatatgatatctatgactgaaatgcaaatgattttttaaagtataataaatgagagaaaaaaagccaatgaacaattacaacaaaatgttaataactggatcctcaagggggaagagtaattgggatagactgtacaaaaattaatcaaagataactagcatattttgaatgctcactgttgtcaggccctatttagagaggtttgcaatactaactcatttaatccttgcaataactctatgtgattgataccacatatatccattttacagacaaaatggaaacctatagaagtaaaataacttgcccaggctagtaagtggagtagctggaatttgaagttaataaatttagagtcaaagtttattatcatatccacaatactactctgcccttcaaataaataagtctgtttagaggagcaaacacattaatcacaccaatcttatgattacatgcaactgatatctcctgtgtgcctaatgcagaattctggagggttcaattggttccaattagttctttttcctgtaccagaaaagaagatcagcaataactggaattctggggtggcatggagtgggggtgttaaattttacaaacacagcatccaaaaatagtatgttcagtcatgagtattatctttaaaatagagaatataaagaaagtctgaagatcaacatttaaatcaaagaaaaaagaacaaaagtacaggtgctttgaggtttagactatgctgaaaatgccattatagagcagtccatttcctcagtaggtagccccaaaagacccctgacacagtagaaattatatcattatacaattaatcagttttctttcacaatggcacaatggggtgccctctttaactcaacagagtaaccagctcaccaacagtatctagaaaagaggaaagtcacagaatggaaaaatagacacaaaaagctatggagaagagagactgaaacagacaaaggcggttgtactataaaagaaagcgagaaatggaaagggaaatgtcagcaatctaaggttaaaagagaaaagatcaggatataaaaagatgtagaagtctcttatgaaaaaaaaaaaaaaaaagggaggggaccagtgaagagatagaaatcatgaccagagtcgaagcttgaaaacgcagggcaacacacaaagagaagctgtaatagcagagccattcactcaatcattcatttcactcattcatttaatgcctaacatatgaagggtactttgtggagctttgagagacacaaaaatgactaagacaggacccctgccctcaaagagcccagctgttccaaatattctcattttggtatgctccaatttttaatgtaattttaattattgttgtcacaccttagctaatattttcatactcaacatgtacttccagaaattgcagcaactataccatctataaaagagggtaatcttggcagggagcggcggctcacacctgtaatcccagcactttgggaggctgagatgggtggatcacgaggtcaggagatcgagaccatcctgcccaacatggtgaaactccgtctctactaaaaatgcaaaaattagccaggcatggtggtgtgcacctgtattcccagttactcaggaggctgaggcaggagaatcgcttgaacccggaaggtggaggttgcagtgagccgagatcatgccactgcactccagtctgggcagcagagcgagactctgtctcgaaaaaaaaaaaaaaaaatgagggtaatcttaaatggatggcagctgccatacagaatgagttcattcgttgtggaacggaaacatgtttacatttctgatatgctgatagtatataatgcagtattgtgatgtggttctctgtatatatagatgctgtctatactttttttggatacagcacactccacatcattctattttatttttatcatcccattccagagaggaggcaaaggacaaggaagtctaaaggatgtggaaagacaaataaggaagttaaaaaacaggttttcattttctttacaatttcccagagggcttctatgacaaaaagctgtactgaacaacggaatgcgtatttgtcatagagtagctgagagtgaattctaggtaaacatacaagggagaggctcctagacagataccattgcctagtacctttcatttaaaagatacctagtgatatatgacttgggaaaaccagaaattgacctcccagcctgcctcagtatatggtctttgctcttaccaaggttggcttgctccctgaaaagacctgaaaattcaagtttgaaaaggtgtttcatatacctaatttagaacacacccctcctagatctataagagtaggtgagaagcatagaaatgaacacctattattttgaatgctcatcttctgattcctttaatgcactgtcccgccctttaccctctccccaaatctttgtggttcttttgggatttcaattgaggtgccccatctctccgccagagataggaatgtgactcaatctaaccaatcaaaatcttctgggggaagtgtatgaatctgcagttagagagaaggctttccgagatcttgggcacttaaattcacataagtctgaagctgcttagagatatttcttcccccaccacaaagactgtgactgaagaaaagatgaagaccacatggagaagaggaggactgtgaggggggtgagagcagaggcgaatttatcctgaagctactacatcttaagcttacaggtctttctctctttttttttttttttttcccagacggagtctcgctttgtcgcctaggctggagtgcagtggcgcaatcttggctcactgcaagctccgcctcccaggttcatgccattcttctgcctcagcctcccgagtagctgggactacaggcgcccaccaccacgcccggctaattttttgtattttttagcagagacggggtttcaccgtgttagccaggatggactccatctcctgacctcatgatccgccggccttggcctcccaaagtgctgggattacaggcatgagccaccatgcccggcccaggtctttctctagcgatgtgttcatatggtcatttataatcttcttatagagaaggctctccaaactgtatgagctttgggccacaaaatcctagattcacccctgggagagacagttgtgaagatacaataaggcacacatagccacccataacagaagccagtgtcaccccactggacctgcaattatgtgagccaatattcaccctttctttttatcttgggataatccaaatttggttttacccacttacaaagggaagaaaccggagattttaaagatagaaataaagtcatggctcgtaacttgctggcaggaaaaaatgagaaccaatgctgtttttgactttcagagtatctatcataagctatcattttgtttttgtccgcatttcagtatgtggtttaaaaggaagttccaacatcatatttgtaactagttataaggaaccggcagggaacagcctccagacatttttcaaatatatttttcctttaactggctataaaggacaataaggattaagttggcaccacaaaaagtcgcatttaatgatacccttttgtgtgttacccatttaccaaacatggatttttatttctgcattctatagaatacttattcgccactgagagttccatttaaattctttgcatgcacacacacacacacacacacacacacccttccaccaccactaccaccaccatcattttcatcatcatgtgatttcagaagagcagtcatgtctacagtaaaggtatttgagagctaaacaaagcctcctggctagagatcctggtatcttcctttaaacccagatcattcatggtatgggttccctgcagagcactggttgtggccccaccaagcactgccatttccagcactgtcagtttctttaaccttcaagagaacacagaagagtcattcaaagccagcaagtgaagagatgtcctggcagtctaatttcaaacaggcctcataccagagtcttttttatggtttttaaaagaagtattttatgctgctctgatgaaaacctctaacagtagtagcttctgtctgacaaataccatagagaatgaaacaataagtctgaagcaaagggagggggtaaaattatttttgtttcaatagccaacacacaatgaaaacaagaaactatagaggtttaaagaataaccgatatttattctggtaaagacttttctcatatcagcactttaccactgtaagatgctgacaataattatgtgaatgttgctataaaaaaattaaatctcccatctcatgggtttaaaggtgtttccgcctctgccttacacacacacacacatacacacacacacacacacgtacacacacatatttcaggtacctctgtcaggatctcccaactcaattatactgcatggaggaaaaatatgtatactactactactagaataagaataaactagtaaacaaacaaatagaatacaatgtaagctgcagtacatgtaatctgaaggcctgaagctcatgtgtgctaggtttttgattgagcagtggtgggggtaaacgtggcacagcagttatcagcctggactgtggaatccgatcataccgggaaatgaatcctggcttactcattgagtaacctggtaactgaacctccctgaggcccaggttattcatcaacaaactgatgacagttatcccatggggttattatagggattaagtgagaaaatgttatataaaggtgaggagtggcagaatatgccaccccaaaatatgccactttggcatgaggattattttgagctgaaggcagttgagaagaagcagatatgagagaagctctctgtcttccccctatttgccacaaaacaggatatagatttataaaggtgccctccccacctatcaggaaagaaaaagttaatcatcagagataactctagatattcactagccagaagagacaccagaggaatctatgtaacaagctttactaactagcccttccattagttcccccatatatttaccttctcacaatttgcagaaactcaaagtcctttcctttgtcttaccatttctctaaaaatttattgctcttttttaaaaagctatataaggtcacattttaatcacccctttgagtcactcatcactgggtacttccatgtgtatgtgcaagtacatgttaataaacttctgttttttcttatgttaatctgtcatttttcactctactttagagggccacagctggagaacctaggagggtagagggaaatagatttagtacaaagagcttagtgcagagcctgtttcacaatgaagcactctgtaggtgaaagcattgccatgattaatgattgccacaaagcatccatgttggttaaacagacaccatgcctaagggcatataatgactctgaggaaagctagacttgaagaaaacacgacttgcccagccaagtaccttggtcaaaacacatatttgtttgactctatagtgttgagacttgagtatctaatatacagatgaatgagccagtacagaatttgaaatttcaacaaaaaggcaagtataatctgcctgataataataagcaacttgtaaatctttgaatggatgggcttgcctgttttcacccatgctactcaaactgtgaaccacagaacagaacatcagtttcacctggggacttcatagaaatgctgagtcttaggtctcaccctagaccttctgtattccagaattataataagatctccagatgatttgtaggcatattaaagtctgaaaagcactgctgtggaccacaaaatttaatgtactgcttatcccactttgggtgtgtttctgtgatctttacaacttaataaaccacccccaaaagttagtgactttaaacaacaatttatttgtcctgcttcttcaatattggcagggctcagtgagacggctcatctctgctccatatggtgttgactggggtagttcaacacagactgcaagatgcaagctggcttcccttcattcacatgcccttggctgacctggctgggacagttgggggctggctgggcctctctccatgtctttgttgttcttcaggacctctttccaaatggagtggtctctctcctgcagcatgatcagacttctttaagtgatggcaccaggctccaagacagtgaagtcagccatcttaaagtctaaatctggaactggcactgtgcatttctgccattttctgttgatcgaattgagtcaaaaggcaaacaaatgtcaaggggagaaaaaagactttatttcttgacgggagaagaggtctgcacagacagtgtggaaggatttgttagcaacagtttttgcagacaagctaccacagagtatctgttacttttcactttcttcatctctctgttctcctgattggtcaaacagccacttcatttcaattacacaactatatgcgaggtcccattgggagcataaggaattttaagacatgatatctcccatcaaggagcttgttataatacaattggtaaaataaggaatacatatcttgaaattttaataacaataaaatactgtaataataaaatatttaagtagcagtgccagataataacagaaatgatgtcctaaggccatgaaccatttatttaattaatcgtgcacacaataaccatcctgagtgttcagaagagagaatggaaggggaggagaatggccatggaaggacggttgtgcagtgagtaagacttgcataggaaaatgagtaaggttttcaaaaaaaaaaaaggtccaatgaaatacacacaaaggatacaacagaatcaaggagccaagggaatggggtcatagggacacaaggccatgaatgagtatctgcatgttcttcaatgatgattatcaattcaatgttcctgaaagaatttcctgcctcataacgtccacctttacttctccctttagatatgttcataagctatttgtggaatccccaccagcaatataaccttgtattaataatgaagggtttttatgaaccttataaattttattataccttgtagagagggtgggggaacaaacaaacagaaatgtaggcattgccaaatggcaacttgtaaacttcactattcattgtgtaggaactaacacttttggtattgttaagtagccttgtaaatttcactctcccttagaaaataaaaatggaatgaaaggtgctgcttagaagaaacgtataaatttcaatctccactgcaggaaaataagctctgattacactacatagttcatacacctcaatgttccgaacacttgtttttttacagattcatgtataatgacttggttttccaacaacagagagtgaaatttacaagttgttatttaacttttttaggagtgtatttttcttccatgtcttttttttcttctttgcccctactcacaccagaaacctaatatgagcaatgggatttctgaatagtaccatacattaattccttcaataacaatgattaaaacattttaaacattgttctcagggcctcctgataccacatataaaagtggggaatgacacagcttttggccacacagttcaaaaaattgctctttaccttgttggggaagaagagggcttattaaaagtttataataagcagtattactagtatttaacttctatttgttgttgaaaagaactgagcctataatttcagaggcttccgagcattttcataaatatacccattagatattcaatagccagtggatttgaatgattttgccatttattcgaacagatagctgtcctggacaggaaggatagaagcattggaagaaagtgttagaactacatttccataaagtcatgacaagaaataaagaaagaaggggagtcaccacctcaatactagaagtgtcagcacaatgatatcctcataaaaggtgttctaaaagaaacttttaggtgttctaaaataaagttataaatgccataccaagaaatactgtcaaaacaaaagtcaagtacaatacagcccagaaagaaccaaatacatctttacatcagggagtaaaaatatacatagatataatatccacaattgtcttaatttatagcttttaaatagataatatacatacaaagtgaaaaattgaaaccacaccaaagtacgttgaaaaatgtcttcccactcatgctgttaatgatctctgtaccctcttcaacatatgcatatgtgaacatatacacacattttaaatttccatgactacaaataatggcatattctaacccatttttcacttaaaaatgtcatagagatggttctgtatagacccatttttgtgatggtctaattttattacaaagattataaagtatagatattccataatttatttacagattctcctattgcttggacacttaagctgtttttaatcatttgttgttaaatgcaatgccatggcgaatatttttgtacatagaattttgtgcacctgcatgactatagttctaaaataaattactagaaatggaactgctaggtcaaaaggtatatatgcattctattttgatagttagagccaaatagctttccaaagacaatataacaattcatgcttctattcatgataccaatacatcttgcattgaaggaattccaaaacaaccaaaagttcatcatttttctgccaactgatcctttctctcttaaaaagagtcggggtaaaaatcacccatttttgcttataaccataggcagttataatcattattgcccaagattcaaggccatttcattacccactgcatcaccatcctcactgtggtataattctaactggtcagagagacctttaatttgcagaccttctcagaagacagattatctgcattctgcagacatctgcagaaagccatccacaagtgcatatttcatggctgaatatttttacataacatcagctggaacccatcgttccagcattctcgccaagtgtcacaacctgctctattatatcaataagcagtttcaattagtcattttcttcccatggtgacgacagctataatagcatgcagtagtctgatgaagtttgtaatataaagtggagatgggagtattaaaaggaagagaatacagaattagaatcgcataaaaaaatccatctcccaaatagtcatttggggaaatgacaacatttttgaaacagtgttcaagaatgaatacaaaaatgcaattacttttgaaaagtcagataaataaatttgccatgggaacacattcttgccccagatagaaccctagtttttactggctaattagtcattaagcaccatctcaaaaacaactgtatatgaaagaatattgggtaaatagaaataaaacttaaggcttaacagaattgtaaaatgaaaataaatgccaacagagaatactactttgaaagcattggatagtagtaaataaattagaaggaatgacacagttgctctgccctcaaaatttatccctaatctgttactacttcctactttgtgtgctaagattaccaggctccaaaccatgcttgccttccctggcacacagccagagccttctgactggccacctgcctctcttcttgtccccttcagcctcttctttacacagcagctgaaatgattttctaaaaaatataaatcagatcgcatcatttccttcttttcagccctctactggttttgctcataattaaaatctaaaatctttgccatggctggcaaggccacatatggaatccatctaccacttctttctcctccctacactggcctctatcaagcacattcccaactcagaccctcaggtcttgctgcttccagctaaaaggttagacccccaaatattcagatgtttttcctccttcactttattcaggtatgtcctcaaatgtcacctcatcacaaaggattatttgaccaccctatctaaaaaataacccaaaactctttatcaaatgcatgcagatttactttccttatatcatttaactccactcgacattatatgatgtagttagatgtatatctgttcattctgtatatcccctactagaatgtaacttcaatgaagatgagaagaagcaaagataaaaaagtgcatcccaaccagacagaaaaacatactatgactgtgaactacacccattgatatggtttggttgtgtgcccacctaaatctcatcttgaattgtaactcttataattcccacatgtcaaaggcagggctaggtggagataattgaatcatgggggcacttccacccatactgttctcgtggtagtaattaagtttcacaatatttgatggttttataaatgggagttcccctgcgcaagctctcttgcctgcagccatgtaaggcatgcctttctcctcctttgccttgcaccatgattgtgaggcttccccagccaggtgaaactgtgagtccattaaacctctttttctttataaattagccagtctttactagcagtgtgagaactgactaatacacccatagttgagaaaacagcatctacctgactttggttaaattcattcaactcagcaaacatttactaaactcttattagataagaaattccagaaacataggtcccagtgtctatctgttatatagtttagagacaaaaacttgcatataatttgggaggcaagacatgaaatataaactactgaaatgacaactaaaaagagttaatgatcaaaagccaacatgagtagggcaggcaataagtgtcagagagttctgaggaggagagatttgtgtaggctgagagggtgaaggaatggttcaaaaagaaggctggagaagatctgggaaaggaaaccaggaggaagaaggcatttggggtgagagcacagcaggggcagacacatagattataccagtgttccccaaacatcaaagcatggaaccttggtgttacatggtccactgacaggacaaaccaaagaataataaagttatatctctttccatttgattttaatctttctaatacatgcaatgaaaaagtattaattcagcattaattgttaaacaccttagtaacacttgccaatctgaatggcattattttactttttattttttgtacttctctttaaacttttactccctatttatgataagggcttttatttatggaataacatataattttattcatatgtaaacttctatgggtaaaaaaaagggagttgctttaatggcagtcaatcatggactaaatatctgggtcactacctacccagacacaaagcagagtcaacctttaaagtaagcaaagggggctcagtggaaaagagaagaaagttaagctcttgtcaagatgatgcagggggcctcatgtcaggctaaggattctggaaaatattctgtaggactgtggtttcccaatttgcaacaaggtcaaattccttgaaaacacacgcgttatatttgagtgtggcatgcttcttattttcaagacagcaagaaatatggcaatcttcaattccattataccatttcattatacaaacttaaacacaaagtggaaagaagtaaatacaactttatactatatgtgaattacaaaagcacaatcacaaccacagtttttttttttttttaaagctgtctatatctattatgatatgggcaagaaacagatgactcacaaaatactcaaatagggtaatctgcagaaatgcttagaaagtgtattcatggtgtggagaaaccaaggattaatgcaatacccagggacaaggcgggagcctacttatagagttcacagagaactgcccaagcaaagagcaaagcagagagtgggtaggaaaggataaattgaagataaccaatatacaaacaaggctattttcacatatttcaaatacttaccaggtcttcgaatactttacctgtctaatcacgagctgtatattttttatagggaataagagtgcataggccaggcgcagtggctcatgcttgtaatcccagcactttgggaggccgagataggtagatcacaaggtcaggagatcgagaccatcctggccaacatggtgaaaccccatctctactaaaaatacaaaacttagctaggtgtggtggcatgtgcctgtagtcccagctactcaggaggctgagggaggagagtcgcttgaaccagggagacagaggttgcagtgagccgagattgcaccactgcactccagcctgggcgacagagcgagactccgtctcaaaaaaaaaaaaaaagagtgcatatagcatggacttaaacctcagcttgccattcacttctatgtgagtttcttaagctcaatgaatttaattttttcaataaaatgggagataataacagtatccactataaggctggtgtgagaagcaaatgaataaatgtatgtaaagcacttagcacagcatttgcctataataaatatgcatgctttgggaaaatgggggagggtcatgtgagctgccaaaatagtgaagagaaatttatgagagaaaagcttaagattgcagaaattatcaatttaaattgcattagcttagtatttcatatgagttgtccaaaacatcccatattattcaactattccatttcattgataaaatacttcaaaggcatacaaagaaggaaaatagtctagatcggtagaggcaggtggggttatagtggtggtgatcagtggtagtggcagggaatagacagtaaaggcctccttcagaaggtaatatttaaaataagaccaactgaaacataaaaggagttaactaagtgaggtgaaaagtgccccaagcagaggaaacccaacatgccaaggacctggggaagaggaaacctcctggattcaacatattccacgatcaacatgtggaagagtaaacaaggcgtggggagaactgcagctggagcggtagaaccttttcagtcatgtttaaagaatttaaattacatttatcccaagggtaatgagaagcctttgaaagactttcaagcaggaaaaaggcatgatcccatgatcggattatcatcattagaaaaccactactaaagagaacagggaggcattagagagttttgagttaaggactgaacaagaaaaataatgtttcaaatttcatttttattattttattgtttacaaaaattgtaaactgccgcagacgatttctctgagggctaactgtataagtataggttcatttggtaactcactcattccgtaagatatttattaagcacctaatgcatacaccggaactgtgcatagataggggacggaggagaaaactcacaaataagcagtctaaaaagtgctaagacttgaaaggcaaacgacacttctgagtggtgggtaaaattccaaaggtggaccaggcagtgtctttgctaaaacatttttcggtatggctgaaccataaaatgcatgggccgtattgaaccactcctttcacaagaatttactgagcactgactatatgctggtattgtatagctttggtgacatggtggtgtatgagaaatcacttaaaatataatagcaataacttttttattgtaaataaggctgggttgattatcaagagtgcatgagaaagaaaaacagagaagtgaagaacagtgccttcacttaaggagggttcgaatggcaataaaatacttttaattaaaacttctctgctgagaatagacagcctttgaaagcttgtgtaaacataaatgaactacatgtaaatatattcatgatattatagctttttaaataacattataacttttaaaatgtcaaatcctttgaatatgaaatgccatcccctctccccaaaaacatgaccaccatgaattatccagttgatcttaaatcaaaagccacttacttaaaagtgaaatgttcattccttacacttactagaaaaactgcttcaaatatgatcagaccttccctttgtcttcagagaattccgctgctgaaacagacccaacaagccagccaaggtccatctggggcagcttagggaaggggcaagacatgttccctgcccaacactatcttttccaacttagcccctgatcatgccaagacatcacagtgtaataatagtaatttaataatgtagtcggccaggctctgcccacagtagaaagcatgagaaaataaatgaggcttgaaagctaaacagagagaaacttctccaggcactgcctgcagcagggagatacctggtaatgaaatacccactgatctccattcattacacaggaggcaaaccttaaaagagagtctagaaaggtggatctctcaaaatagaaataaataaataagctcacctgccatggtggggtctctgaaaatgacttggaaggactgcctatagaatttttgtggggatgcagcaaagttttgtcagatgtcaagggaggtaattattcccgacttgcttgggcacatttgctggataaattggcctctttaccttcatctccccatgcgggcaccagataaagaaaccgtgtttaaactctacagtgttctctctggcttttaccatgaaaaagaaataaaaatgcatcctgggtgcttggcaaatcagcccagtgtcagatggggacccattatctttgaccttcacatttgtgccccttgggactcacagaaaatcctcaaaaactcttttgggtaaagatatatgatgtctaggaggtacccaccttcaggagaaagaaattgcctttgcaatataaaagttgcaaaagttgaagttagtgatttctttattttttatttccatttttgtctatctgctcaaatttttaaaatttacctacaaatgctggaagccttgtttactcaaccatgttatcaacatgttaagctatcagccatttctctcccttccctgctttcctctccaatcaccaagacaacactaacatttctccatcttaccttctttaaagaaaaattcttacagttaactgtctgccatctactaccacttccagaaccagtaatgaaatgtcagaggaggaacagttaattaaaattgtggaatcctactttgcatcctctcacagtcaatacatgtacaattagagatgcctttcagcatgtggtataactagtataagttaaactttgaataacacttgatcattaaaaataaaaaatcattaatgttaagcaaatacgcagtaaacatcttgcttcattggccataaaactcctttagctcagctcaactagtgtggtagatttaatattgggattcacttagatggtgctttttagtaagaaaccaaggaacatgtctacaatctgcaagtggtttatgggaataaaaactgtgcctaattatcccacatgggtttacctaagttgtcatttttttacaaaatttctcaagtttctccacaaacgtttagggaagaaatgacatagaatggtggttaagggttcagactctggagtcaaatgttgtgtgtgtttcatccctgcctctgctacttgctaaacatgacactgccataaccatttttcttcatttctcagagcctccatttccctgtaggtaatatgaagaaaacactattcattcacagggctactgtgaggatgaaatgagataatgtacacaaagcattttaaatagtgaccagaaccttgtaaagattaagtaaatgcaagctggtcctcctaattgataccttattcattcaataattatacttcctaaaagagtctggtaattatgtatttaaaacatattcacgaggtggagccaagatggccgaataggaacagctccagtctacagctcccagagtaagcaatgcagaagacgggtgatttctgcatttccaactgaggtaccaggttcatctcactgaggagtgtcggacagtgggtgcaggatagtgggtgcagcacactgagcatgagccaaagcagggcaaggcatcatctcacccgagaagcacaaggggtcagagaattccctttcctagtcaaagaaaggggtgacagacggcacctggaaaatcgggtcactcccaccctaatactgtgcttttccaatggtcttagcaaacggcacatcaggagattatatcctgcacctggctaggagggtcctacgcccatggagcctccctcattgctaggaaagcagcctgagatcaaagtgtaaggcggcagcgaggcttggggaggggcccctgccattgccgaggcttgagtaggtaaacaaagcggcctggaagctcgaactcggtggagcccaccacagctcaaggaggcctgcctgcctctgtagactccacctctgggggcagggcatagacaaacaaaaggcagcaaaaacctctgcagacttaaatgtccctgtctgacagctttgaagagagtagtgattctcccagcatgcagcttgagatctaagaacggacaaaatgcctcctcaagtgggtccctgacccccgagtagcctaactggcaggcaccccccagtaggggcagactgacacctcacacggccgggtactcttctgagacaaaacttccagaggaacaatcagtcaggaacatttgctgttcaccaatatccgctgttctgcagcctctgctggtgaaacacaggcaaacagggtctagagtgggcctgcagcaaactctaacagacctgcagctgagagtcctgactgttagaaggaaaactaacaaacagaaaggacatccacaccaaaaccccatctgtacgtcaccatcatcaaagaccaaaggtagataaaaccacaaagatggggaaaaaacagagcagaaaaactggaaactctaaaaatcagagcgcctctcctcctcgaaaggaacgcagctcctcacaagcaacggaacaaagctggacggagaatgactttgacgagttgagagaagaaggcttcagacgatcaaactactccgacctaaaggaggaagtttgaacccatggcaaagaagtaaaaaaccttgaaaaaaaaattagacgaatggctaactagaataaccaatgcagagaagtccttaaaggacctgatggagctgaaaaccacggcaccagaactacgtgacgaatacacaagtctcagtagccgattcgatcaactggaagaaagggtatcagtgatggaagatcaaatgaatgaaatgaagcaagaagggaagtttagagaaaaaagaataaaaagaaatgaacaaagcctacaagaaatatgggactatgtgaaaagaccaaatctacatctgactgatgtacctgaaagtgacagggagaatggaaccaacttgcaaaacactctgcaagatattatccaggagaacttccccaatctagcaaggacggccaacattcaaattcaggaaatacagagaacaccacaaagatactcctcgagaagagcaactccaagacacataattgtcagattcaacaaagttgaaatgaaggaaaaaatgttaatggcagccagagagaaaggtcgggttacccacaaagggaagcccattcagactaacagcagatctctcagcagaaaccctagaagccagaagagagtggaggccaatattcaacattcttaaagaaaagaattttcaacccagaatttcatatctagccaaactaagcttcataagtgaaggagaaataaaatacttaacagacaagcaaatgctgagagattttgtcaccaccaggcctgccttacaagagctcctgaaggaagcactaaacatggaaaggaacaactggtaccagccactgcagaaatataccaaattgtaaagcccatcgaggctaggaagaaactgcatcaactaatgagcaaaataaccagctaacatcataatgacaggatcaaattcacacataacaatattaaccttaaatgtaaatgggctaaatgctccagttaaaagacacagactggcaaattggataaagagtcaagacccatcagtgtgctgtattcagacccatctcacatgcagagacacacataggctcaaaataaatggatggaagaagatctaccaagcaaatggaaaacaaaaaaagcaggggttgcaatcctagtctctgataaacagactttaaaccaacaaagatcaaaagagacaaagaaggccattacataatggtaaagggatcaattcaacaagaaaagctaactaccctaaatatatatgcacccaatacaggagcacccagattcataaagcaagtccttagagacctacaaagagacttagactcccacacaataataatgggagactttaacaatccactgtcaacattagacagatcaacgagacagaaagttaacaaggatatccaggaattgaactcagctctgcaccaagtggacctaacagacatctacagaactctccaccccaaatcaacagaatatacattcttttcagcaccacaccacacctattccaaaattgactacatagttggaagtaaagcactcctcagcaaatgtaaaataacagaaattataacaaactatctctcagatcacagtgcaatcaaactagaactcaggattaagaaactcactcgaaaccacacaactacatggaaactgaacaacctgctcctgaatgactactgggtacgtcgcgaaatgaagacagaaataaagacgttctttgaaaccaatgagaacaaagacacaacataccagaatctgtgggacacattcaaagcagtgtgtagagggaaatttatagcactaaatgcccacaagagaaatcaggaaagatctaaaattgacactctaacatcacaattaaaagaactagagaagcaagagcaaacattcaaaagctagcagaaggcaagcaataactaacatcagagcagaactgaaggagatagagacacaaaaaacccttcaaaaaatcaatgaatccaggagctggttttttgaaaagatcaacaaaattgatagactgctagcaagactaataaagaagaagagagagaagaatcaaatagacgcaataaaaaatgataaaggggatatcaccactgatcccacagaaatacaaactaccatcacagaatactaaaaacacctctatgcaaataaactacaaaatctagctccctctccctctccctttcatctccgtctcccgctttccacggtgcccccctccctcgtctccgtctcccactttccacggtctccctctgttgccgaggctggactgtactgccacgatctcggctcactgcaacctccctgcctgattctcctgcctcagcctgccgagtgcctgggattgcaggcgtgcgctgctaagcctgactggtttttgtattttttggtggagacggggtttcgccgtgttggccgggctggtctccagctcctgacctccagtgatctgcccgcctcggcctcccgaggtgccgggattgcagacagagtctcgctcactcagtgctcaatgttgcccaggctggagtgcagtggcgtgaacctccacctcccagccgcctgccttggcctcccaaagtgctgagattgcagcctctgccccgccgccaccctgtctaggaagtgaggagcatctctgcccagccgccaatcatctgggatgtgaggagcccctctgcctggccacccagtctgggaagtgaggagcacctcttcctggccttcaccccgtgtaggaagtgaggagcgtctctgcctggccgcccatcatctgggatgtggggagcgcctctgcccggccgccccgtctgggatgtgaggagcgcctctgcccggccgccctgtctgggaggtgaggagtgtctctgcctggccgccaccccgtctgggaggtggggagcacccccgcccggcagccgccccgtctgtgaggtgggcgtgcccccacccggcagccgccccgcctgggaggtgaggagcccctctgcccggccgccaatccatctgggaggtgtacccaccagctcattgagaacaggccatgacgatgatggcggttttgctgaatagaaaagggggaaatgtggggaaaagaaagagagatcagattgttactgtgtctgtgtagaaagaagtagacataggagactccatttcgttttgtactaagaaaaattcttctgccttgggatgctgttaatctataacattactcccaacccagtgctctctgaaacatgtgctgtgtcaactcagggttaaatggattaagggaagtgcaagatgtgctttattaaacagatgcttgaaggcagtatgctcgttaagagtcatcaccactccctaatctcaagtacccagggacacaaacactgcagaaggccacagggtcctctgcctaggaaaaccagagacctttgttcacatgtttatctgctgaccttctctccactattgtcctatgaccctgcgaaatccccctctctgagaaacacccaagaatgatcaacaaatactaaaaaaattaaaaaaaaaaaaaagaaaagttcaaataaagtgtatgaaagaactttaaaaaaaaaaaagaaaaaaaaagtgcgaaaattagccaggcatggtggagtatgccttggggtcccagctactcaggaggctgaggctagaagatcacttgagcctgggaggcagaggctgcagcaagccatgattgtgctactgcactccagcctaggtgacagatggagactctgtctctaaataaataaataaataaataaataaatcctatttttaaatgctaaaaaaaaaaaagaaaatctagaagaaatggataaattcctcgacacatacaccctcccaagactaaaccaggaagaagttgaatctctgaatagaccaataacaggctctgaaattgaggcaacaattaatagcttaccaaccaaaaaaatccaggaccagatggattcacagccgaattctaccagaagtgcaaggaggagctggtaccattccttctgaaactattccaatcaatagaaaaagagggaatcctccctaactcattttatgaggccagcatcatcctgataccaaagcctggcagagacacaacaaaaaaagacaattttagaccaatatccctgatgaacatcgatgcagaaatcctcaataaaatactggcaaaccgaatccagcagcacatcaaaaagcttatccaccatgatcaagttggcttcattcctgggatgcaaggctggttcaacatacgcaaatcaataaacgtaatccaacatataaacagaaccaacgacaaaaccacatgattatctcaatagatgcagaaaagacctttgacaaaattcaacccttcatgctaaaaactctcaataaatgaggtattgatgggacatatctcaaaataataagagctatctatgacaaacccacagccaatatcatactgaatgggcaaaaactggaagcactccctttgaaaactggcacaagacagggatgccctctctcaccactcctattcaacatagtgttggaagttatggccagggcaattaggcaggagaaggaagtaaagggcattcaattaggaaaagaggaaatccaattgtccctgttcgcagatgacatgattgtgtatctagaaaaccccatcatctcagcccaaaatctccttaagctgataggcaacttcagcaaagtctcaggatacaaaatcaatgtgcaaaaatcacaagcattcttatataccaataaaagacaaacagagcgccaaatcatgagtgaactcccattcacaattgcttcaaagagaataaaatacctaggaatccaacttacaagggatgtgaaggacctcttcaaggagaactacaaaccactacttaatgaaataaaagacgatacaaacaaatggaagaacattccatgctcatgggtaggaagaatcaatattgtgaaaatggccatactgcccaaggcaatttatagattcaacgccatccccatcaagctaccaatgacttccttcacagaattggaaaaaactaccttaaagttcacatggaaccaaaaaagagcctgcattgccaagtcaatcctaagccaaaagaacaaagctggaggcatcatgctacctgacttcaaactatactacacaaggctacagtaatcaaaacagcatggtactggtaccaaaacagagatattgaccaatggaacagaacagagccctcagaaataatgccgcatatctacaactatctgatctttgacaaacctgagaaaaacaagcagtggggaaaggattccctatttaataaatggtgctggggaaacctggctagccatatgtagaaagctgaaactggatcccttccttataccttatacaaaaattaattcaagatggattaaagacttaaatgttagacctaaaaccataaaaaccctagaagaaaacctaggcaataccatttaggacataggcatgggcaaggacttcatgtctaaaacaccaaaagcaatggtaacaaaagacaaaattgacaaatgggatctaattaaaataaagagcttttgcacagcaaaagaaactaccatcagagtgaacaggcaacctacagaatgggagaaaatttttgcaatctactcatctgacaaaggactaatatccagaatctacaaagaatcaaacagatttacaagaaaaaacaaacaaccccatcaaaaagtgggtgaaggatatgaacagacacttctcaaaggaagacatttatgaagccaaaagacacatgaaaaaatgctgatcatcactggccatcagagacatgcaaatcaaaaccacaatgagataccatctcacaccagttagaatggcgatcattaaaaagtcaggaaacaacaggtgctggagaggatgtggagaaataggaacacttttacactgttggtgggactgtaaactagttcaaccattgtggaagtcagtgtggtgattcctcaaggatctagaactagaaataccatttgacccagccatcccattactgggtatatacccaaagattatgaatcatgctgctataaagacacatgcacacgtgtgtttattgcggcactatttacaatagcaaagacttggaaccgacccaaatgtccaacaatgatagactggattaagaaaatgtggcacatatacaccatggaatactatgcagccataaaaattgatgagttcatgtcctttgtagggacatggatgaagctggaaaccatcattctcagcaaactatcgcaaggagaaaaaaccaaacactgcatgttgtcactcatagctgggaattgaacaatgagaacacatggacacaggaaggggaacatcaaacaccggggcctgttgtggggtggggggagtggggagggatagcgttaggagatatacctaatgctaaatgatgagttaatgggtgcagcacaccaacatggcacatgtatacatatgtaacaaacctgcacgttgtgcacatgtaccctaaaacttacagtataatttaaaaaaataataaaaataaaacatattcacatatttacgtattcatgtatttaaaatatattcatttattttacactatgtgcaactcatttttctacttaagaattagagagatgacatttcggaggcccctaattccaaatgctgccgcctgtttttagtacagatctgtgttaagcaaaggaaaatgaagcggtcaaatcgcctcagaagcttccggcttccacccctgtttgtaaacgaaactccatattagtcaaactacactccccagggagcacctgtaaaagtccctgatttacagaagtatttactttagggtatggagtttgttttttcaggtttatctctgggagagcttggtgaagctgacagtccagcaattttattaaactgttcaatttcagcattttttaaagagcatatataaagaacaccggcagtagctatttaaatttcccagtggatgctagaaataataaaaggacacttaaatgaccatttttgagcagagccaacagcatgtgtcctaattatccaactatgtgaaaaattctgtggatttttaccagagcacaagggtgtgatatgcacaattcagaacactaacggctacctcactagggtgtagagaacttttcaagtctaaatataaggtcccagtctgccagggtaagtttttctgctactttccctcttgatgaacttgttagacatgataaatggacaacatggtaagaagttgatatggtccactgataagcctctgatgaagaacaagtaaataaaaaaccattgtgctaagtgctctccttcatttattctcacgatcacattctgaggtaggtattactatgcacattttacaggtcaggaaagcaaagctcacacaggataagtgccttatcctacagtttaagtatccaagctggtgttctgattttcctccactcacctcttcctatctcttctccacccacctcttcctatctcttctccacccttctctgccctgctggtggtctcttccttactgatctctacagactcatctcccgtgccctttggtttctatagggctaagacaatggcaggcagcattaagggatcagagaattggaggaaagagtctgggggtatctattccccatttcctctctcctcccctcacactgcacaactgagacttttgacaagtgcccacatttttctagctttgactataatttctgtcagtggccctttttccctaattcctagctagggctctcattggattcttgtaattctgttctctgtctttgctccttcagactttccatagttgcttcaccatcttttttggttcccttaaatctacccacacctctgtcaatcttctgttcattaaactctcttccaacctctcagttttggtgtcatccactttctgctggagaaaggagggtagcccctagcagttggtacctcctcctctctagcttccctttcatctacccacaaccaaccactcacccttcccttgtagccagtcacaccacaagcaagtctgtgactcagcaaactggctcccagaaacaaaccctaggagcataattgaagatgaacccaaagatacagttataagtatgctcgtggagaatttgtaattttttaaaaaatggtagttatctaagaggacttgattaatcaatgaagggacattcataaaatgaaaaattataaatgattaaaaataataccataacttatatttcatgacatgaacatattctcaatatattaacttcaaaagggaagatacaaagttgtgtgtagaataactcagtttttctttgtaaaaattttgtatacatggggagaaaatggtccaaaagagaccatccaatagaaatacagtacaaggcacataagtaattttagtgtcagtagttacgttttaaaaagttaaaagaaaccagtgaaattcatttagtgatatattttagtccaacatatgcaaaataatatttaatcatgtaagcaacagaaattaataatgtgatatattgaattcttcttttgcatatgaagtcttagaactccggtgtgtagttgacactcagagcacatgtcaactcagtcttgctacattttaaaagctcaagagccacatgaggatagtgactaccagattggacagctcaggtaagcctcaaaagcgggtgtgtagagtaggaagttgaatgttcttcactttcttattatttttctccttttttaccattaccatttactactgatgcatgtcacctctgcaattagaaaaacaaattatttttaaacactaagagcaaggcttttttcttctgtctctggaacactttttggctcatgtcctttgcaattcacagactacacacttactagtatagaaaggtgccctcctttcttcccctccctttacattttctttggatagctacctatcttcagccctcaggcataagagtaagaatcaaatgttgattttcttcagagtggctgctgagccagctcccactctccagtggtgtgacccggaatctatcaggcctcacaccactgttttagcagctctgaatggcttgtggaagggcatggaatggggccagaaactgcttaatttgaggttaattaaatagtgatgacaagccttaatctccaacttgtcatcagattgtaaacactgattgcagctgcagcaatctgcaataaacctattgagaggaatcttgaccagaatgaaataagtacgttggttacccagatgaggctgggagaggtgagatcagagaaatctaggcttttgcagtaccaggagaaatggagacctgaaaagagggaaattcatgggcgaatgtgtcaattctgattcctgtacagccctatcaaaaaaaagaaaaaaagaaaagaaaaaataactggatcccatgcacctggaaattggaaagaacaagggcagaaatataaaaccactaaactaaggacctggaaaaagctgaaatagctttacatctattagccattgatgaggtttccatgaaaaaatatgtctgagccactgcatgccctgaggccgctggacagatggttataccaccagagtgagctacagcagtggctttctagagtgcaggcaaggatgacagttacagtgtgttaggtctctactgtgtctcaagcacatcacatgtaacgtatatgataattctcaaaagtactttatgaggtagctattattttctccattttaaagaggagaatgctaaatctcaaaggagtatcctaccttgcttaagtacatgtaacaaatgggttgaacccagactgtctaatgccctaatgcaaattctaaatcacaagaatctctgcctccagctttgaggcaatgttgaagtgggaaaggggaaagaatagtcaagttcctgaagaagatgggaaaaaatgagtcaaaaatctccaaagaatagggaagcacaaagggctgaggtaacaaatgccagatgagtaaacatgttcataacactgcaccccggaaagtgcccctcctggctccattttcatggagaatgctttctcattcttcaagatccagcacaaggccaattttcacctcttctgtgaagccttccccaaacctcctagtgagagaggcactttaaaaaaatatgtgagatgcattgagagacagatggacaccataaaagctgaactcaatattacatgtgaagaaaatttacaaaaaaatcttaatctgagtgtcagaaaaattggagtagtgaaagaaccattacagttattgtcaaatagttaattaactattatgtaggtttaaatccatgtattcttccttaaaaccttttggaacaagataaatcattctcatccattcatttattcattccctagcactgtgataacactagagaaataacaatgaccaaaaacagacacaattccactctcgaggtacacatgtttaaaagggaaaacagagtaatgatacaaaaatcacacaaataaatggacaattatgacatgtgttccaaataagaggtaaatgagatgttattattttatccaggatacaggactggaatcattaaagagaatacacagggaaataagctgcagttcattatttggaaaaagtttcaaacaatccacacagaaatggccccacacatgagcctgctctcttctgggcattggatgtgtcccggctgaggcagggaagacaagggtgcatccgtcgataacttctcaagtctcttctgactctaagaaactgtgaccctatcattccaaacaaaatattttctcagataagaattagaattggctaggttgaatttccaggagacttaggaaatatgtacagagaataatcacttcctaaatagagaggggagtcaagcaaaactgagtcttctaaactgctcggtagcattctccttctcttcgcacatggacacacttctgctttatgcactgccctgacagcttcctgaggacagaggctgatggtcttgctcatcactgaatcatcaatgcgtggcacatattaaatatttgttaagtgagtaaatgaatatggtactaaaatgtgcatactgacagaaacttttttctgttgtggcccttgtaggtgaacttccttgaataattaatgaacatgaaagtcagtcaatcactcacctcctgattaatagtcagggtcccttgtccaaacagccacttagtccattaaaaattaataattttctacagaataaatatatgctgtacatggtacatcaagggttccacttttaatacgcaattaagtaatgcagaaagactaggaatctattaactaagaaagagctccatgaacttgccctccaagtcatcattcatttactatccatttctcttccaattttaaaaaattatttagccagaaaaaaagtagttctgaaaacagagtaaataacaacatgttgtcatattttggctaacatttgcaggccgacacaatgtgtgtttgttaaagatttgagatatgctattccttctgtgaaatgacgaatacattagggcagatcaatacaaaactgaagctctatatgtaaaatgttaagggtctattcattgaaaaattatgagccatgttatagaacttaggtcagagttaaattattgatctacattcatttttcccctttccatgtgactatcttttgattttttataacatacattattgcctatgtagaaaatgaatcctcttcttctagagctagtgtgtctggtgactgacaattttctaaaattaactgttgtgttggtagcatttagatttgtaaattgaactccccttgcataaacatttaaacattgaaaataaaatctgtaaactttggtagcatgaactcaaagggaaaagaggataattttcattttttaatacaaagaaagcaaagaaaaaaaggaaaggttatttttcttaacatcattctactactttatggttcttgatacatttcattgatgaggccaaattgtattcagttgactttttacaaatgactaaactgtattgctaagcaaagggatgtaatcaacactttgtgagctgaagtctcaattttcagacctaaagcttactcaagatgtataacctcaaattctgtaagcaggttagatgtcttgaaatacaaagactctcatcccctatcagcccccaaagtgacaaaggaatgtgtcttcaatgaagattttctctcatctgctgaaaagggaaaatgtgcaaatatttcaaagaaatgtagattccacagacccacattaattcatgaaaaaggaagctaatgtaagagttcttagtaggaatgatctttgatttggggctgtatttggtcagtaacttttgcctactaggagaatattttctctttaacgaagtagtatcagacacagagggctcttcattttctctaatggagatacaatcatttagattcgtgctccaaatgaggcagaaattacccctaatgtgtagtttgaacatttgtatcaaaatacagtgaaatgctgtttcagagtctgatgagaaaaatatgtgagctcacagaatgtctgcctctctcaggtgcagaagtggtctactgctttttttttcttttttcttttcttttcttttttttttttttgagatggagtctcactctgtcacccaggctggagtgcaatggtgaggtctccgctcactgcaacctccacctcctaggttcaagcaattctcctgcctcagcctcctgagtagctgggattacaggtgcacgccatcatgcccagctaatttttgtatttttagtagagatggggtttcaccacattgttcaggctggtcttcaactcctgaccttgtgatccgcctgccttagcctcccaaagtgctgggattacaggggtgagccaccacgcccggccctctgctacttttcttcacattgtcactgcaggaatcacctggctctagggggatatcccacagtctcacataaataccaatccctgtcgctggaacaagggggtcccagcctcacagaaggcctgagggactctgtttctctacaggtcagctccaaagcagagggccctttgcaccataaatcaatgtcatccacagaaaactccaggagaaagttaaataccagcagcaaacaatgtctcttgtgtagcagtctctcaccactgtttctgctaggtgacaaaagcagtgagaaaagcagaggaagcaagggctgaagacagaaaagtcaaagaattgcagaacttgagagttggaaaggggcagagtccaaataggaaaagacttaagcttcctactgtgttgtgctatgtagaatgctgtatgaggaagggcagcaggctttctccccagaagcccagctgaaagtcatccacactttacatggtcccctataccaggcttcagcccccttggccttggttttctcaacacacagtatggaatccatttctcatgagatggacttcattaaacacactcatgagaccaacatataaaaccagaatgtcaaagtagtagtctacgatttgcagtatagctgttgcacagatgtcagaaagaccaatacattcattcccttcctgtaaatgtcttccctgcaaaaccaaatcctaatcaggcagcaatctgacatgtaaggaatctgaacaagaggagttcatctgatgaactgaatgttaaacagcgtcaggggagatggagtcaccaatgggaaagaatacccaatgtcccttggctgcagctctctacatccattgccgtaacagaaatggccttgccaatagaaaaacaattctccaagtttctcacaggaggtcccgtcccctccaaagagagctacatgtgtattctttgtgtatttttatcattgagaaacataatttgaatgggaaagcctttctttcgttctaaaaaccctgcatcatttttctcattgcaggttaaaatatgttcattgtaaataatgaacatacggaaaagggtaaaagttattctatttcttccgcccagaaaactataggtggataatctttcagtctgtttctatgtatacatcttaggttgtccatataaaattatcattttgcagataaaaagcagtcaattaggtgcaattctacatggtccaatctcatatacatacgcacattacattaaagtcaaatgacaccttaacttctactttgttgcttttctttgaattaactagggctcatatacagttttccatgttactcggtaataccataattgattctcttgcacgcacttgtttaccaaaacttctcattatttccttagggaatattcacagacatagaagtgcttggttaaaggatttgcacacacacccattcatgcatatactgtctaaggttgctctcatcattaacagcagagttgagtagttgtgaccatactaccaaaaaacctgcaatatttaccctttagtcctttacagaaaaaggttgccaaccctgacctagaatccataattaactagatacagaatccagacatccattcaacaataggacacagacttcctatttttaaaaaattcaccgtgactacaagcagatctgcatttaaaatattttattcccattagtatttttaattggtccaaatgctctatgtgatataacttcactatcattagaatagtattaaagaatactattagaaaaatgtagctccattatttttactacagaaattattataaccgaagacataaatgcgaaccaaataaaacaaaataagttgtaaaaattcctttcttcaacaattgcataataatctataatacacatagatatacatgttcttaaatatttcatgtaaaaattggttactatttaataattaattttagaaacattaaaagaaatttaacttctgggtctttgatttgaaacagctaagaattttagactggtttccatttttaatcatgatcaagactcagaaacgtagctaagaaaaatcatattgtactttttattgaaaaggaatcacacagaccatgtctgaattattataaaggcttcattaattagattttaatctacatgactataccatatgctaaaaaaccatccaaacaaactctatgaaacggttttactgctattacttaaagagccatttaaaagaatttctacgggataaagactgggtgatttatcatagttttatgctcctttaatctgctccatcttcccattgtaaaataaatattggttttaaaataaatggttctgcccaggttttgatgagaaaaattgccctgtaaatcacaagctcacgtgtgccaaactctaagtccaatgttaactagcctattctgaagaaaaataagtcaattttatagaacaaaatctaaagaagacaattacttaagtgtattttcaaagctgcaatgtaattaatctgagatatgagcttctgtaccccaagttttttaattctcaaaataagaactagtggatatcaaactggtcctccaactggattttttaaaaatgggttctgtactatagtttttattatattctttccgaatccaatatacaagttatgtaactgaaaataaatacaatgagggttatatgataatgtctgagggttatatgatgacatctttatcaatcacttttttcatacacagagagccaaatcaatttaatagtcaggttcttagaatatttcatagtgttctgaaaaattgaccttacagtatacatattttcctataataagcatagtggttaaaatgctctggaagttatgaatggtttaaagcagtgcttcacaaactatttaggatgtaaaactagttgactatatttttcactccaatatgttgtgggttggtgatacttttataaaatacaataaaaattgcacttggatttagtggtagtgtcaaactgctatgacagtctctaaaccagcactgtccaacagaaatatcataggagccacatgtctgattttaagctttctagtagccacattaaaaatgtaaaaagaaacagttgaaattaattttaataatattttatgtagtccaatagatccacaaccttatttcaatatgtaatcagtatacaaatataatggagatatttaactttttaaaaaaattaagtcatcaaaatccagcatgtatattccacttacagcatgtccccattcagactggccacatttcaagtactcaacagtcacatgtagctagtggctgttgtgtgggaaagtgccattttaaaccattactcccaaactctgcacctccctcttcatgaactggtccacatacaacactttgagtagtactgtctaaactactgctcccttaaaaatggcaccttcatttctcttctataattttctactctgtgttttaaattgagggctccattccagataagtccaacacttaaagaaattaacaaactcatgattgcagctaactttatacatcctttcaggaaaggaatttgcatttataagggatggatacggaggtcccctctgctctcccttctctagaagcaatcactattctgaatgatattggtttctttctttcctatccatgtttttatactttttctactgactatgttcttaggatttaaataaagcaaagagaaaatttgtttgcacattgctgagatatatgaatttaatgcgtttagctcatacaaatcctgaccatattccatggcaaccactgaaaccgaatcacacacctttctacgtttgcaccctctgatcccctattcgtccttcataccacactgctttgatatatcattttctttctgctctgtatttagactctgttccaccttctagcctggataatttctacccattgagatcaaagcttaaatatcacttcttcaagtaacctttgttgatctgccctttgccctggtaaaattaggttccctgtcaaacactctcacttttcctatactgcacttaccaaaattgtaaatagtttctgttgttgttgttgtttttgagatggagtcttgcactgtcgcccagggtggtacaatggcacaattggctcgctgcaacctccacctcctggattcaggcaattctcctgcctcagcctcccgagtagctggattataggtgcccacagccatgcctggctaatttttgtattttttagtagagacaaggtttcaccatgttggccaggctgaagtagttattttttttactgatttgtttaatgtctctctcattcataaaaatatgttagcaccagcataattaaaagtatacagtaggtatccacaaatattaattgagtgaatgaatgaattttcattctcagaagccagacttaacctggtcattatgtttctcaatctctagtcatgacactagcttacaatgtgtatatcatggatatatatacatagggtatccctgttaattagaaggtatattttcaagagtatggccataaagaagttattcatggtatattcttttgaccttctattttcaattgtctctatatttagctcccatttttcatttctaatactgtttgtatttctctctctctctctctctttgttcttctctctttgtagttgatcaagtttgacaagtgagaatgtgctgttttagtctttaaaataatcattttttgctcggttgatcttctctactgtttctttgtattctatttcatttttggtaatatttttgtattattccttccctctactgtatttgggtttactctgctattttatttatacctttttaattgaatccttaattccctaacaatgtctccttccgtttctaacgtatacatttatgagtctataaatttccctctatatacctctttgtgtcccacaagacttaaagtatgtactaatttctatcatcatttttctttgactcacaaattattgacaggtacagttttgagtttccaaatgtataaagttttgaaaagtatcagtttctaatctcctgcttttttcctctgaaataaagaattagtaaatataatttttattcatcagcattaagactttctatgtgtgtatattatctgttagtggagtttgaagttctatatatgtctatttgtccaagctaaccggttatgtggtttaaatattctttatcttttctaagcttcttagcttgtttgatttatcagtgtctgagagaaaaatggttaaaactctcagattatgattatatgggttttcaatacttcttggtgactgtgtcaatttttactttctatatttttaaaaggatgctactaggtaatgtaggctcaggattaactcttcctggtgaattgttcttttatcattaaataataactctttatctgtaataatatttttgcttttaaagtatattttgtccgatattaatagtgtcaccagctttcatttgaatgatatttatatgatgtattatgtcaatttcatctattttctcttaatcttcccatgctattatccttaattgggttgttccttgtaaacagttaaagagagtatagctgttctctctatccaacttaagaatctttgcctgcagacagataggtttaatcatttgtatattggctttgattactgattatttggcctcatttcaactaattaatctacagcttcctaaaagtcagtaattatggcctctcactgaaccaagtactgcataccatagcaagcattgctgtatctatcttacactcataatttagctgttctcaataaataatttagacacattggcaaataatattctcttaaagcttcaagctcataagtacttatatatataacacagaaaatccccaactaagatggctaatccactactactcttatttctttacctataacatgaaaataagtgaatccacttgtcatctacctccaatgttgctgtactttcctcttcaacctcctcatttttaaaaatttctatcgggaacagctctcattctgtctcttctacctttcttcttccctatcccagtctctcacctgttaccttgacaattgaattagtatcttttctctccctgccttcatcctaccacctaacaatccaatgtttcctccagttaaatgagggtcgcatagtataagttaagaaatttgaactttaccctacagctcagtgtttctcaaactgaacccaaaggcacagtatcatagctccaaacattctatgagaatatgctttaggtttttatggttttattccaattaatgtcctgaagaatctaaatgacaacctgataattgagctatgctttccaaaagcagtgcctgagtttgtcttttttttttcctccatcaactctgttctgttctcagtatcactggaaccaaacaatcactttaaatgacagcttttaactttcagtgtgtcagtgagcacatctggctgctaggttggcatgtcctaatgctaaaattgtcccatgtctgctattgtgctcttcttgaagataatttgcaatggaaagatagtgtcatggaataagactttaatttattaagttatttaattaatggagactttgatatgacatcataaaaactcatagtgtggcagagtaatggtctattttaattgttatgggctaatgagaaaagaacaaaggcagaattaacatgtaaatgatgcgtttatatcaaatgaaagccaaatgatattatgggacagtgcaaaaggaagtttcccaatttttcaaatagagaaaagtggtgagaaaattgagtcatcatgtggctctgagtagtagaggcatgccaaattaagagtctttgccatagtagtcagcacactttattgatgaaacattaatttatcaaatatatgttaaatacttcatcaataaacagtgagtgttaaacactgttctaggcactaaggatacagaagtcataagatagtcaactctccagtgtcacggaagttatattctgacaataaaaagatgaacatgaatttataatacaacatcagggagtcgtaagtcttgtgaaggaaaacgaagcagggcaaagagatggaggatgatgagggaggaggaaagctacagtaggcaagatgatcaagggaggattctctgagaagatgacatttgagcagacacctaagtgcaacaggaggcaaaggcatacaaatatctcggggagaagatttccaaacaaaagcaagagcaaatacaaagatgttgagaagaacagcaagaaaaccaatgtcaacagactgcagggagaaaggagagtggtatgagactaggtaaaaagaagagggctgaatcttgaagagccttgaggtcatagcaaaaagcctgaatttaattctaaggatgatggggagttactacaggttttttgttttgctttgatagagtctcgctctgtcacccacactggagtgcagtggtacaatcttggctcactgcaacctctgcctcctgggttcgagtgattctccagcctcagccacctgagtagctgggattacaggcatccatcaccatgccccgcttattttttgtatatttagtagaggcagggttttgccatgttggccaagctggtctcaaactcctgacatcaagtgatccacccgcctcagcctccctattacagggtttatacagttcatgcagaataccagaaagggagatggggactgtggggatggatacaggtaggcttgtagatttgctagagaaaataaggtagtttcttctgattgtttctctttctccagtgaaataagaagtgagacaatcaactgattgagagagctggggatggccattggagagttgaggtacaggtgaagatataaaatagttttctcagaaagtagaagtattaggtaaacaatgcaggatcaccgtgtagaacagaggatccactgcagtcagcatagttgtgtgtcctccatccatccacactcaggcccaaagtaggtggaaagctgaatgagggtcatagttttgccagataagaatgacagagaaagatgagcaaaggagttcagtgtgcatgtaaagaagagaagaaccatagcatctgagctgagcaaggaggaaagtgaggatacaggaggatgacggattgtacataaatcctgtaagtcaacagattggaggccccacaggatcaaagaactgttggagtagagatgctaatgtcacctgaggcagcagccctgaaaagataggaagtggtggtcagagagtgggatgctgtgaaacatactttgaaggttagcatggcatttcataacaagggcactattggcatttggggaaaacaattcttcatcgtgcataacagtctcatgtactgaatgacatttagcatccttaacttctgccctctaaataccagtagcactccttacatttgcaattactccctaggagagtggtacttcctagattgtgaaccattggcctggggtatgactatgaggtagggagagatatttgcaagtgagaaactcagggacctgatagaccaggtatgagtattctctgtggatgtttttactgagaatgatgagtataaagacagggcgctggggggaacgtcttcaataaatacagaggagtaggctgtagaagagttttatggcatgtgctttaaaagcctctgcggaggaagagaaaaggaactgtctagaagtgacaatgaacaataccagaagacaccaactccactgtcagacactgagaaaaaaacagacacccctggagagggtgatggggaagcctccttaagagtttgccaagagtatcaagcagctatccaaaagaactttctgtgatgatggcaatgttgatatctacgccatcctataagatagacaataggcacatgtacttcttagcccttgaaacgaggccagtgtgtctgaggatgtgaattttttactttgatttgaacgaatttaaatgtaaacagtcagatgtggctactggctaacaaattggatggggcagaacagtaaaaggtgaaggaagcattcagaagacaaaattcttcttaatctctgagtcttgaggaaaagggcaagggcaggtatgagtctagggaagtttgtacatttgtagcaggaagaggtgaggagcatctaatagcacaatagcatcagcatttccaataagcaggattccaaaaattcattttaatttatttcagcctcctctcagactaaattctataccatattgttgtggaagacccttaaaaaaaaccctcaaatatttaaaatatcaccatcatgtaagaattatttcttctcctaagaagcatctggtattaatagactatgactatcgcgtgttttctaagatctaagtgtcccttccctccaaagactggctatctatatctaacaaaggaaaatgtaacatttgaaaattccctgttaaaagattttgttgtcatttggaaatcatatttcttgctgtttgcatttctattaaaaatataaagaaatttgttctttggtatcccaaatgaagtaaaagtattctaattggttgcattcacaagtctacaatttgcggcttaacaaaattatttttgaaaaggtcataacctgtacccacatgcccacccaaccacacacacagacatccagaatggtcttgtgatcatgtcttcagaagtttggctgcaaagttacaagcaacaactgtccatctgcacccaccaacctagtgaacaatgccagtctgggacccaaggactatttactcaacagaagaattccaacttcaggcaggggataggcgaagtccagataacatctagatatttcttgacattgcatttgattggaaataaaggaaaagtaaagcatttctggttagtttctgtttcttagtgtctctagttcccattttatttcaatcaaaatatcaaaatactctttagcccatagaggggacagagttcctagtttaataaaccctaaaatatataattaagataaagcctctgtagggttactcagcacaacactataattgctcagattccctagtggattctccagtcaatttctctgcatccttgaggcaaaatcttttccttaattgtcctcacttagaccaggtgctaggtgtccttcctagcctgcaggtcttacaggcccattcatccctaagggggtcttatatattaaccttgcttctgaactctaagcactggcaagtcaggcagaaggcccaaaggacctaacagcccataggtaactacaatgttggtaaggtggattctgccagatgccagccttggatccattttgggtccctacagatttatgcttctactataatgaatttcataatttctagtatgtgacccagggttgaactaagaagttattcttgctttcccctttagttttccctaatgggactttgatcaacatgaaaactaaaaatatcctggtgctagaccattaacactagttaactattccagactgtggccactgtcaaagacagccatcttgtaattgaattccactggggacaagaagactcaaaacagagtaggtgaatggattgcttaaagtccatctcagctactaaggagaatgaagagcagcagaaactgaattattaattcccaactctattcacaagccccctctggtggaggaagtattagtaatgaaacagctataacaataaccaaaatttttttaaaagagaaaaggcaatccacaacaaaacaatcagcccctgcagaaatgagagtcaagtgtagtgattagcaaatatgagctgcaacctgaaaaccacttacagatgaagcagtatgatgaatgatttaccaaaaggtcaacaccgctcttttgtcttcatcacccatcagttttccatcgccctcaatttgtctggcacataacagaaagcagggcataaaatattccccataaaaattaaccttactttgcaacattaaaaaaaaaaacttatagttgtatatagttgaagcgtaggggccagcttctcaattagtactcctagcatacagtagaaaaagcgttgacacttaaagccctattacaagaggtaatgttcttagcaagttccggaactctctgccctattcttgccttgctgacccactattctcaagcgaaggaaggggtcagtaatccccctaccaaataccacaccaatggtggcaggaggggagcatgtgacagcatttccccttttactctcctggaggccaaacttctttgcaatctctgcttttagctagcgtggatgccagcctttcaaccttgctatgcctgcaatactttctgacagatgagctatgagatgtaccaccttcccactcccatttgacaacctttgtacaaaaagaaacacaacgccaagggaaagtatatttttaggcatgagggattctgaaaatgaacatatctgcaaacttctagatccccttaaccagacctgaaaaagacattaatctattttaactaaactgattaaattgatttaatcagaaagcgggtcacttccctcctccctatcctgtcgctgaatttactaattgtttctccggctttgcccaatcaataagatattttgcatcttgcagatataatgtaagttatcagttattaaaaattcctcttcccggtctctggttaaagtgggtacctaaatatctgcttatttatttacgtcgttgttatttgcagatttcttttttaaaaaaagcagaattaaaatgaaagaaaaggtcaaaagagtttggaaaaaaagctatctacagggatgttcatcactgcatcatttataatagtaaaacttggaaatcttaaatttccaagcaaaagaagactgttcaaattaattatggtatagccataaagtggaatacagtcatgcatcacataatgaagttttgatcaatgacagaccacatatatgatatcgatcccataagattataatggagctaaaaaattcctactgcttagtgacgttgtagttgtcataaagtcattgtgcatgcattaccttttctatgtttagatatgcaactacttacctttgtgttacagttgcctatagtattcagtaaagtgatgctcacaagagtatgaaattgtctaatgacacagttttcattaagtgaggcatgactacactatgcagacattgaaaattaagtggtggaatatttaataacaaaaaaagatttgtggtactattaaggggggaaacacattgcaaaacagtagatactgtaatatcatatttattgagagctgttatctttgtataccattggtttgacaaacattcattggtcagccatcttccattcataacctcttctctccagcattccttgcacttgggaattgttctataaaataaaatattaaagaagaaggctgctaggtagggcttttttttctttttttttttttgagacggagtcttgctttgtcacccaggctggagtggagatggagtctgactctgtcgcccaggctggactgcagtggcacgatcttggctcattgcaacctccgcctcctgggttcaagtgattctcctgcctcagtctcccaagtagctgggattacaggcacgcaccaccacacctggctaatttttttttttttatttttagtacagatggggtttcaccatgttggccaggctggtctcgaactcctgacctcaagtgatccacccgcctcggccttccaaagtgctgagattacaggcgtgagccaccatgcccggcctaggtagggcttttcttcttgtctgattaaaaggagcggatttatctaacaggtctctttttgtatttatcctttatctttccaatctaaacataacgtctggaggaacagcagcttcattgtgaccatgaagacaaaaaaataacacgctaagaacagtagaagagaaatgccaaaacatcagctctagattatcctctaaagacttggagaaagtcactattggttggattttctttattttgcagctgaacacattcctgatacacaggagattctgtttttgttttttgcttatctgtggcttttatattttctaccatagtatgtactgttttatcataagaaaaaaatactggatacaagaaaaagggtcttttgtattcttcaagagaaatctagaggctgtgagttggagtctcaaatcatccaaggaacaaaagcacaggcaaagaagacatgccaataataaaattcttagagctgcttaacattattaatattttcattcccttcaacagaaactgtttacagctattagtattactgtttttcgagtcatggaacacttaagatctactatggtgtcaggtgctacttaaggcaccaagtatccaaacaataaggcagcccatgaccaaaaggaaccgtaacaagcaaacgaagaggaaaaacctagcagggtaaaacacactgcctaacattgctcagctggttaatggtgaagccaggactggaatgcaggtctcttgacacctaacgaccttcatcaccctatcatatgcttaacccacttaccatttagaagaaagaagtgcagcttgctaccagcacaacgctctcggagcaaacgggaaatgggttaagcattaatatctggctaaaagatgtaagaaaaactctggtgagagtatttaaggagaatgatctagatgggggtcaaaaaacatcagagacagaccttgttcttcattaactagtatttatagttatagcaggattgttttccctaaataaagggaaaggtctctttgagtggggcagaaaggattccactttttggctgggtgcagtggctgatgcctggagtcccagcactttgggaggccaaggcgagtggatcacctgaggtcaggagttcaagaccagcctggttaacatggtgaaaccccatctctactaaaaatacaaaaattagctgggcatggtggcgggcacctgtaatcccagctactcgggaggctgaggcaggagaattgcttaaacctgggaggcagaggttggtgagctgagatcatgccattgcactccagcctgggagacaagagcaaaactccgtcctccccaccccccccccaaaaaaaaaaaagagattccactttttatctatctataccacaccgaatcagtcgatcaatccactgaccacagattgtaatctcggccaaccactatagtggggaaagaaaacatagcagtgcaatcagctgttggataccacaggcaacttgacaagtcagtgacaacttggcctatttattcatcttttaaccgtttgttctggtgtctgtgtagtcacaatcaaagaatagtccctaggaatccatggagtttcattgaaatggagttagggctttggatcatatgcagaatctcagtactattccaggagaagggcagccacattgcctctgaatggccaaaacatagggtagtgaagagtgggagaatatgccagcccgaaatatgccactttagcctaaggattatgtggagctaaaggcacattaaaatacaaaacaaaacccagcaggtgcaagaagtgttctctaaccctcccctttttcttcctgaaaacatgaaacaaaacccccatatagaagacgtccagctataccagaaggaaagtctcattcttatcatcaaggatgggaaaatgagactaggaaaagtctgtacaaacagatcttgttaaaataattcttatcttcctttagcctttccacacagttgagttacttttccacaactgcctctctttgttcaacctaatataaaaccatctaggttttgccacttctttgagtcttcatttccttatgaggtatctcatgtcacataaaacttatattaaataaatgtgtgtgcttttctcccattaatctatcttatattcatttaagtcttaggcccagctgaaaagaaaaccctaaaagagtgtacaattttgcctcctctacagtatccatcttgaaagctgaaagttcactctcaatatgccttaagaataagaacaagtgggggcatgttttttagccatagttattcgtaacccaaacaaacaagtaaaggataatataagtgccaaaaatataaatgttgtctggattcacacatatcttatttgagtgactgtcattttatactgtcgtaatctgtttgcatgtctgtctttccactaaactatatgctccctaaacgcaaggacgatttcctttcatctttgctaagaatgtccaagccttcctccttccaaggctcgaactggattccaactataaaagtctataaaatatgacagctatttggaccgaaatccttcattccaaactatcctacttaaaaaaaaaagtcaactttttaacatttccaaaatatcctgaagggagggaaaaatcacacattaaattctgtcaagtaacatttacctcctcaagccctgactaatcggaaatgactggacttggcagctccttttatcacgtggtctatcagctaaatttagctcctgttgtgccaattgaaaaatgccaacatcccttcccatctcatacaacatcccaacccgccaatgactctagggtctctctggcaatctggtgtgaccactcctcatcagatcaaaatataaattacaaaccaaacttaaagtgtccaagtagccccatccagaagagcaatgatgaagttagaagagacgaagacgagaagggtgccagattcattactattgattccctgctggtctttcaatgtcacggaaagatgtccattatagttctatgaagagcatttggctcagtttaaactcttttgttttcagttcctttaaaaacaaaaatcaaccacgaaggataaacaactagaaattaatggagcccaaagggtttctgcagaatgagaagccttcatcactgcaccctaattatgtaaatctgctcctgcagagtccagtacatttatttattaagtctcaccactgccatcctggtaacccagagaagaagccaatctataatgactcaagccacatttcaaaatagactccaaaggacacatgatgtcatttgctaaaatgactcaatccagatggaaagcattctgacctatacataattgattgacctttgctatgctttccccagttatttatatactatcatatgcatgaatgtatatcagtggtatttacacttggcagctacttttaagaacacattattcaattgggatttgaagctttttacgaccatttcctgaccaaacattcataaatgacgaacaaggaaagatgttatcttaaaaataatgtttaataggctctggagagtttagagaagctttgctactctagttattttaaattacaggggacaagatctatgtacataaagctgagttcaaaccctgaaactgaggataccaaaggacattttatttactttccagtttggagctcaataatgatagtaaaatatgctgtacagaaggcatggaatgttttagatacatgtgagaagagcatcaactgtggtgaaggtagttagagacaataacaaattatcagaatctaaccatggatttcattttccaaaagaggttagctgcaaattggataatacccagataatcaagatagtttcaagatgatcatagaaggggaggcagatagattagggaaggcaaatatgaagcaagcatgtctttactcccattaggaatacccaaggcagacatccataactgattactgaattcttaaccacagagccctcacttggctcaaaatacttttccaatagtactccaggcaaacaccatcaaccaaacagacttgtcctaataacataaacagagaaagttgtatcttatttactgatcaaattaattctatttattgttaccatatactccaagattcaatctaaaactaaacaggtttttaaattcaaaatttaaagtcacatctctgaatcctaagaaaacgttaagtcaaatctagtagttttccatacttcatggtaggctagaatgacccttaatgtaaatgaaaagcaagcaggaaagctaaacaggagaagatgaaaatgcttatatgttcacataggaatattatatagcagtgaaaaggaaggaactacggccacatgcaaccacaggaataaatcttagaaacagaaatccaagtggaaatagcacatggagaagactacatacagcagtgctttccaagtagtgtgcctcagtaagtgggttacaagtgttcccaatccccttagttctggggtgaatagtacctggagtagccaaagtcttgtgtcaagccagagcatttatatcaggaggttctagaatattttcaagttctatgtatgccatgatggaagaagttaggaagcactgacatacaataattctttccagagattaaaccattataaaaccattttataatacttaaaaactaaaatgtatctgcttaggcatatatatacatatatatatatatatatatatatatatatatatatacacacacacacatatatacatgtgacaaatttatttcaaaatgataaaagaaaagcaaggaaaacatgaatggatacttcatccagtacatccattcattcagtataatggttactgttggaaacaataggcaggagatgagttaggtacaaaaacacttcagtagatggtaatgttacagttcttaaggtagatggtggttcatgggtgtttagtttattatactccaagcatattattttataaatacaacatgttatatactacttttctcaaaacatcaaggttaagaaggaaggaaactttttagctgattctgagtcaatttttcacagttgaatctcaatatggcaattcaagaatagatacaactacttttggaagactgaaactcagaggtcaagattttgtcctcatgcaactagaatagtccaaaggtttctaacagtcaactcatgtaccctatttaatgattacaagattttgttctaatccaaatagagtattaatgaaaaattgttgtaaacctaaagttacatttccctactgaaacaaaaacatcacaaaacccatatgtaagcctcttagttaagatccatttagttataaaaaacaaaacccaacctgaagtgttcaagtaaaaggattctggatgaggaattagaggtatcctacagcacataggatagcaagtacagccaggccttatgaagaaccagagccagggtgtaggcagcctttcagatccgaggttgaaacattctctctctcttgggctgcaggttcttgtgtctctacttctttctggaacctttactttattgtccctacctttagctgtgctttttctgctttggcatcgacatgaccaaatatttgtatctcttgtgatttaagtttaaaccaagtagtgccctgaagacaatttcaaaatgcccagaggggaaaaagaatctaattaacccaaccaaggtcaaaatctgtctacaccgggtttaatcagacacagctgtacataaggagttaccaattccaacaactacaggggccaggcaggtaattaaaagtatgatgctgaccaggtgtaaaaccagaagctggaagaaaagggtcttacaacaaagagaactcatgctgcctctccactttggatatgtaataatagaaatccagattttcattgaaatttcttgatttttaaaatacatctgtatacgttaggccacaggcttctactgtcagcgtcctacaaaaaatgaattgtgaatatttcagtttcggggggtcacactgggcaaacctgacttagataccagccctttgggtagaagagcaggtctcacagaagggctcatggtcaggcagtactgcaacaaagcctggattatgcactactttacacaccctccccatgaaatacacacatcagctaaacttctaaaaatatcttgttcaaaatcagatactaagccgggcagagataatcatcatgtagctttgtatgggttcatagtaaaaagcattaaaaaacaaagaaatcacacaaaagcaaactagagccagaaaaacacagcaccatcttcttcttttctttctttcttttttttttttttttttttttgagacagaatctcactttgttgctcaggctggagtgcagtggcgcgatctcagctcactgcaacctccgcctcccgggttcaagcgattctcctgcctcagcctcctgagtagctgggattacaggcacgtgccaccacacctggctaatttattgtagttttagtagagatggggtttcaccgtgttagccacgatggtcttgatctcctgaccttgtgatccacccgccttggcctcccaaagtgctgggattacaggcgtgagccatggcgccgggcccatcttcttttctgtccacagccaaaacatcctgccacaaaaggaccatttgttacaaaacaactgcatattcttttttcagttaactgaaggtaacacaggccctcctgtgtcaatttcttcaccatacaaaactgggagacacagaagtcatagcttaagtaagtgtcacttcctctcggaagcccagcctgagtccctgatcttgtataaggcaaatgtccctttacaaagcacctgtttcccttgctgtggtgcctaaccacagcacaactgatattgtatatgcacaactgtctatttatctcttccacataggtgagcttctggaaagcacagatactgtctaatcctccttctctgttcttaacacctgtttgttaaataaatacattctgtagtcagacatgtcaaaaattttattttttaatttttagcagctaattttaaaaatgctgaatttagactagattcctccttattcttttgtacgcacttaaaaattttcaacaaaacacttaaaatcttttactcagaaaagaactacacatatcactctgaattactacagactcaatatcacattgttgtggggctttcaagaatctgtgcttatatttaagctaaaaatccttcacagcacctcctgtcagtttgtagatacgcatagattttctcaatatacctgtattgatatagatataaatatacctggtatagaataaggcacggtaaaattctctacctagacataaaacccatatatttaaacttatgagaaatctggagaagtacagtatatacatgtccagcaagacttatgttccattttaaagaaatgagccttggcaaatttccctagcactgagaactgtttagcaagaattaatttttaaatgaaataagctaaaaataaaatagatgtagtattatttatacttaagtcttgttctttagcaattattaaaggttacactggtatgttttatcattggtaactggactcaagtttgaccaaatgtttctctttacccatgaaaaatagttgcaatgttccaattttgactgccattccaggtctttggtggcccttcatcaagtgcaatttggtagcctaaatgatatgggagggacagagcataatttcatggcagtaagtatagctgagacagaaaggttaaacaaggtccatgtctttggacacttgaccctaagttatgacagattaactttaaaagacaatgttttatcttgaacagaggggagttttgtcttctccttccagctaggtggaagtatttggcaaatgtcttctttggaaagaattatttagcaatggaattataatcggaattatttagcaatggaattataatcaatgtagtaaggacagaaaaagcaaactaaggacaaaggaataaatgaagaaatgacagccacacttgccaaggtgaattccattcagggaatttgccaaatgaaaaggatattaacattaacttaagcaggtttccttacttcaggaattgtctgtctttaatattcataatggtcctcatgaattttccaaaggatagagtatgcagcatttatgattatttaaaggctttataaatgtaactgctcttgggcatagtggtgctatcaggcagacctaggttgaaattctggctctgtcagcggctgtgatttcatgtgctaatttcttaactcttatgagcctcaattaccttgtctgaaaaatcagccctttcatttatatttcaacagaacttctgcccttgatgtccctttgaagttatttcccataattagtcacagatcatagcatcatcagctgcaatcatcttatctccattctattaacaaatttacatacattcttttgtatgttcaacaaacagcatatgccaagctgagctggcaactggacaaaaacatattatatgtggtttctgaacacccagagctcactatcttgttggggagaaaggcagtgaggaaatagtaatgcagagcagtgacaggtgcccataaggggttcgcctagtttggagaggagaaaacatttgagttgaaatctgaagagagaaaatgaagccactggagatgaagaaaacaaacttccatggggctgagggaacaagaatgtgcaaatgctctgtgggaggcagaaagaaagagattttgaggaggaaaaagggcagtgtagtttgcgtgcaaaaaccaggtgagcaagatgggagaatcaggagaggctttttctttttttttttttttttaatgtcaacactgtttggtgtttatttggtgagcctgagggcaattttcattctcatttctttttcttattgattatttccaaccctttcaacagtgaacatgcgttgcttttgcaattacaacaacaacaagaatccctatagacaaagcaaaaaatatatactttgtaatgtttttaaaaaacaaagattaaactacactaaaatataaggtgattatctctgaatgataagttttggggcagttttttttttaccctcatcactgctttccgaattccaaaggtaaaaagatactacttgaataagaagaaaaataaagagagttgtgtttcaagctttccctcttcccttcttcccaccctatctaacacttggaatatcccatgagggtctccaacgtcagcaggaactaagagccaagagtcgactgagagatgactttctttctctttcttttttgttgtgtggtgaagaaagaaatcataatctgacgtctaaagagcacttcactgttgctcttggttggactctaaatcacattgggaaaattaaaactacaatgagaaacatcttacaccagtcatgatgactattattttttcaattttatttttattacactttaagttctagggtacatgtgcacaacgtgcaggtttgttacatatgtatacatgtgccatgttagtgtgctgcacccattaactcatcatttacattaggtatatttcctaatgctatccgtccctcctccccccaccccacaacaggccccggtgtgtggccccggtgtgtgatgttctccatcctgtgtctatgtgttctcattgttcaattcccacctatgagtgagaacatgcagtgtttggttttctgtccttgcaatagtttgctcagaatggtttccagcttcatccatgtccctacaaaggacatgaactcatccatttttatggctgcatagtattccatgttgtatatgtgccacattttcttaatccagtctatcattgttggacatttgggttggttccaagtctttgctattgtaaatagtgccacaataaacacacgtgtgcatgtgtctttatagcagcatgatttataatccttttggtaaacacccagtaatgggatggctgggtcaaaaggtatttctagttctagatccttgaagaatcgccacactgtcttccacaatggttgaactagtttacagtcccaccaacagtgtaaaagttttcctattactccacatcctctccagcacctgttgtttcctgattttttaatgattgccattctaaatggtgtgagatggtatctcattgtggttttgatttgcatttctctgacggccagtgatgatgagcatgttttcctgtgtctattggctccataaatgtcttcttttgagaagtgtctgttcatatccttcgttcactttttgatggggttgtttgtttttttcttgtaaatttaagttctttgtagattctggatattagccctttgtcagatgcgtacattgtaaaaactttatcccattctgtaggttgcctgttcactctgatggtagtttcttttgctgtgcagaaactctttagtttaattagatcccatttgtcaattttggcttttgttgccattgcttttggtgttttagtcataaagcccttacccatgcctatatcctgaatggtattgcctaggttttcttctagggttttatggttttaggtctaacatttaagtctttaatccaccttgaattaatttttgtatagcgtgtaaggaagggatccagtttcagctttctacatatggctagccagttttcccagcaccacttattaaataggaaatcctttccccatttcttgtgtttgtcaggtttgtcaaagatcagattgttgtcgatgtgtggtattatttctgagggctctgttctgttccattggcctatctctctgtttttgtaccagtaccatgctgttttggttactgtagccttgtagtatagtttgaagtcaagtagcgtgatgcctctagctttgttcttttggcttaggattgacttggcaatgtgggctcttttttgcttccatgtgaactttaaggtagttttttccaattctgtgaaggaagtcattggtagcttgatggggatggcgttgaatctataaattgccttgggcagtatggccattttcacgatattgattcttcctacccatgagcgtggaatgttcttccatttgtttgtatcctcttttatttcattgagcagtggtttgtagttctccttgaagaggtccttcccatctcttgtaaattggattcctaggtattttattctctttgaagcaattgtgaatgggagttcactcatgatttggctctctgtttgtctgttattggtgtataagaatgcttgtgattttttgcacactgattttgtatcctgagactttgctgaagttgcttatcagcttaaggagattttgggctgagatgatggggatttctaaatgtacagtcatgtcatctgcaaacagggacaatttgacttcctcttttcctaattcaatacactttatttctttctcttgcctgattgccctggccagaatttccaacactatgttgaataggagtggtgaaagagggcatctctgtcttgtgccagttttcaaagtgaatgcttccagttttgccaattcagtatgatattggctgtgggtttgtcatagatagcttgcattattttcagacacgtcccatcactacctagtttattgggagtttttagcatgaagcattgttgaattttgtcaaaggccttttctgcatctactgagataatcatgtggtttttgtctttggttctgtttatatgatggattatgtttattgatttgcgtatgtgaaccagccttgcatcccagggatgaagccaacttgatcgtggtggataagctttttgatgtcctgctggatttgttttgccagtattttattgaggatttttgcatcgatgttcatcagggatattggtctaaaattctcttatttggttgtctcactgccaggctttgatatcaggacaatgctggccgcataaaatgagttagggaggatttcctctttttctcttgattggaatggtttcagaaggaatggtacccgctcctctttgtacctccggtagaattcggctgtgaatccatctggtcctggactttttttggttgctaggctattaattattgcctcaatttcagagcctgttattggtctattaagggattcaacttcgtcctggtttagtcttgggagagtgtatgtgtccgggaatttatccatttcttctagattttctagtttatttgcatagaggtgtttatagtattctctggtggtagtttatatttctgtgggatcagtggtgatatcccctttatcattttttattgcatctatttgattcttctctcttttcttctttattagtcttgctagtggtctatcaattttgttgatcttttcaaaaaaccagctcctggattcactgattttttgaagggttttttgtgtctctatctccttcagttctgctctgatcttagttacttcttgccttctgctagcctttgaatgtgtttgctcttgcttgtctagttcttttaattgtgatgttagggtgtcaattttagatctttcctgctttctcctgtgggcatttagtgctataaatttccctctacacactgctttaaatatgtcccagagattctggtatgttgtgtctttgttcttattggtttcaaagaacatctttttttctgccttcatttggttatgtgcccagtagtcattcaggagcaggttgttcagtttccatgcatttgagcggtttttgaatgagtttcttaatcctcagttcttgtttgattgcactgtggtctgagagacagtttattataatttctattcttttacatttgcaaaggagtgctttacttccgactatgtggtcagttttggaataagtgcgatgtggtgctgagaagaatgtatcttctgttgatttggggtggagagttctgtagatgtctattaggtccacctgctgcagagctgagttcaattcctggatatcattgttaactttctgtctcattgatctgtctaatgttgccagtggagtgttaaagtctcccattattatcgtgtgggagtctaagtctctttgtaggtctctaagggcttgctttatgaatctgggtgctcctgtattgggtgcatatatatttaggatagttagctcttcttgttgaattgatccctttaccattatgtaatggccttctttgtctcttttcatctttgttggtttaaagtctgttttgttagagactaggattgcaacccctgcttgtttttttttttccatttgcttggtagatcttcctccatccctttagtttgagcctatgtgtgtctctgcaggtgagatgggtctcctgaatacagcacactgatgggtcttgactctttatccaatttgccagtctgtgtcttttaattggagcatttagtccatttacatttaaggttaatattattatgtgtgaatttgatcctgtcattttgatgttagctggttatttcgcccattagttggtgcagtttcttcctagcatcaatggtgtttacaatttggcatgtttttgcagtggctgttactggttgttcctttccatgtttaatgcttccttcaggagctcttgtaaggcaggcctggtggtgacaaagtctctcagcatttgcttgtctgtaaaggattttatttctccttcacttctgaagcttagtttggctggatatgaaattctgggttgaaaattcttgtctttaagaatgttgaattggcccccattctcttctggcttgtagagtttctgccaagagatctgttgttagtctgatgggcttccctttgtgggtaacctgacctttctctctggctgctcttaacattttttccttcatttcaactttggtgaatctgacaattatgtgtcttggagttgctcttcttgaggagtatctttgtggttgtctctgtatttcctgaatttgaatgttggcctgccttgctaggtttgggaagttctcctggataatatcctgcagagtgttttccaacttggttccattctcctcatcactttcaggtacaccaagcagacgtagatttggtcttttcacatagtcccatatttcctggaggctttgttcatttctttttactcttttttctctaaacgtctcttccggcttcatttcattcatttgttcttcaatcactgatattctttcttccacttgatcgaattggctactgaagcttgtgcatgcatcacgtagttctcatgccatggttttcagctccatcaggtcatttaagttcttctctacactgattattctagttagcgattcgtctaatcttttttcaaggtttttagcttctttgcgatgggttcgaacatcctcctttagcttggagaagtttgttattctgatcttctgaagccttcttcactcaacttgtcaaagtcattctccatccagctttgttcccttgctggcgaggagctaggttcctttgtaggagaagaggcactctgatttttagaattttcagcttttctgctctggtttctccccatctttgtggttttatctatctttggtctttgatgatggtgacgtacacatggggttttggtgtggatgtcctttctgtttgttagttttccttctaacagtcaggaccctgagctgcaggtctgttggagtttgctggaggtccactccagaccctgtttgcctgtgtatcaccagcggaggctgcagaacagcaaatattgcagaatggcaaatgttgctgcctgatccttcctctgaaagctttgtctcagaggggtacctggctgtgtgaggtgtcagtcggcccctactgggaggtatctcccagttaggctacttgggtctcagggacccacttgaggaggcattctgtccgttctcagatctcaaactccgtgctgggagaaccactactctcttcaaagctgtcagatagggacgtttaagtctgcagaagtttctgctgcctttttttcagctatgccctgaccctagaggtggagtctacagaggcaggcaggcctccttgagctgcggtgggctccacccatttcgagcttctaggccgctttgtttacccactcaagcctcagcaattgcggacacccctcccccagcctcactgccaccttgtggttcgaactcagactgctgtgctagcagagagtgaagccccgtgggcatggaaccctccgagccaggcaccagatattatctcctggtgtgccctttgctaagacagttggaaaagcacagtattagtgtgggagtgtcccgattttccaggtaccgtctctcacggcttctcttgactaggaaagggaattccccaaccccttgcacttcccaggtgaggcgatgtcccgccctgctttggctcatgctccgtgggctgcacccactgtccgacaagccccagtgagatgaaccgggtacctcaattggaaatgcagaaatcacccatcttctgcactcctcacgctgggagctgtagaatggcgctgttcctattcagccatcttggaacctcctcccatgatgactataagggaggcttttaaatggtggaaatgaatggtttccaccaggacagtggcaagattcaattatcattttaaaaatctctgtcaagctacagtgtggaaaatggattggaaggagacaataatggctgcaagggtatcaattaagaggctattgtagcaaggatgataatttaaactgcaattggaacagaagatatggtaaaatgtgacaaatctgagagatatttaggttggtaattaattgggtaagagaactgtggtacattttacacataaagtcctaaggtgcagtatttgatttggtctataaattgtactccaaatcagctgatgcttttatagttagagagaattatctcagtagacgtaatacttctctttcaaaaactgtcatggttcttaatcatattccacaatggtcagtatggggatgtttatgcctcatggaatagagaaatcaaaaatttaaatctatatttgatgttaaatataaatagtatcttcttataaaaatacattaccattactcttagcttgatatattgtaaattgctttattcacctcctcagccatttttcatcagcagtagtatatgtgctccctgttcctggcagtgattcactggatgagaacataaatgtatttgtgggaatatgtatgaacgttgctctgggaacaaaagaaacagttctgttataccacattggtggtaatcattctttcccaaaatcattgcttgatcccttaaacaaacaaaacaatgtgaaataacaagcattgcaaatacctaagactttggtgtattgactgcctatctgtcaaatttgacaggaaggattaaccatggtttcaatatttacacttggattttgaaagactagataccaagttgatgactctttgaaaataatatagaaaagtatatataaatacataggtaaaaaggatgggacaaaagtgtcaatggttactgctgaaatatggttttggagtgcaagtataggggatttctgctattcattttatgcttatgcaatgtttaagttttaggagcaggtatcagtttctaagaaaaatcgaaaaaagagcagatatgaaaaacaagatcaataaaatagtttcactgtttaataatgccaggttagtgagaggcaacattcatcatggaaactaaatgcattacactagactttcactatttataattatttttctaggaccatgatcagactggcccacggtatataatctacaaattgactactgatattgtaagagggctcagccatattcaaataccatctattaaaaaaattaaatatgctaattcgccactacaatttaaaattcaactgtaggtaaataaaagtaaattgtgccaatatgcatgtggaattacttgcttctgatcaactaaaaaaaaattagtaagaaatctggtgaacatcgtattggtaaacaaaaacaatttttaaaggaaagtggcaagatccatgtccagtctgatccaaggtgttgccagaatggcagcccgagttgagagcagaaatgtgtttctcctcacacctttccaacttttaggctgtggtcacttcaaactaagaagcaaatcacatcttagcccatgtagtaatgaggttatccacactagaatgcataaacgtcaccttgtggcttgttaaaaacacagattcttgcccatcacaagattatattaaactgactagggtctctaatataatgatgaataaaaatggaaataataaacacatttatgatctcaacaagaaaattgttaatatttcaaattaagtatgaagtctgctgtaggactttttttttttttttcgagatggagtctcactctgtcactcaggctggagtgcagtggcatgatcttggctcactgcaagctcctggggttcaaacaattctcctgcttcagcctcccgtgtagctgggactacaggcacctgccaccacacccagctagtttttgtatttttattagagacaggatttcaccatagtggccaggctggtctcgaactcctgacctcatgatccacccgccttggcctcccaaagtgctgggaatacaggccgccctgcccggcccctgctgtagttttttaaaataaatatttatctgattaaggaagctcagctctattcccattttgctgagattttaccatgaatgaatgtgtttgtcaattttttccccttatctattgagatgatgatatggtttctcagttttactctattaatatggtaagttgcattgactgattttcaaataatcagcttgtattcctggaacaaacccaacttgataatgatatattattctttttatatatcactggatttgatttaccaatgttttggctaggatttttttttcatttatcttcatgaaaaaaattgaactgtggatttattttcatttaatacccctcatctttggggtcaaggttatgctggtctaatgatgtgagtttacatataactgatattgcttcttccttaaatgtttggaagaatttgctggtaaatttaaatgggctcttttttgtgggaagatttctaattatgaagctaatttctgtaatagatataggataattcagattccctaaaaatatatcaaatttagttgtatttttaaggaatttaaccatttcatttaaatgttcaaatttactggcataaaatcttactaatatcttttttagtgcttttttatttctgattattatttcaataatttctgctcttatctttattttcttctactttctttgcatttattctgtttcttttttagattcttgatactgattactagattactaattttcaggctttcttcttttctaagaatttaaggctataaatttccatataaaaactgctttagctgcaacatcaaagcttgatatgttatatcttcattatcagaaatatttttaatttttgttgtgattactttctttgaaacatagggaagaaaatattacctaatttccaaatattggaattctatcattatcattttattactgatttccaccttaatactactgtgaacagaagataaactctatggtttaaagcctttgacatttgttcagaagtgcttatgtctaggtatatattatatttactaaatctttaaaaatgtatatgcttatttggttgttgcagtgttctatacataagattaagtttgttacaagtggtgtttgaatcttctatatgtttactgacttttttgtttgttttgttttcagacagggtctccctctattgcccaggctggagtgcagtggcatgatcacagctcactgcaacctctgcctcccaggctcaagtgatcctcccacctcagccttctgaattttttggttttgtagagatggggtttcgccatgttttccaggctggtcttaaactcctacactgaagcgatctgcctgcctcggcctcccaaagtgttgggattacaggtgtgagctaccaggcccagccgtttactgacattttgtcttcatattctattaactacctgaagaggtatggtaaaatcccaactaaggctgaagatttgtatatttctctttttcagtgctgttatttgctttcaaatattttgagaccatgctatatgtacctatacatatagctatgtctgcttcttttggaatactgtgtgtttgcacaatgtttctctttttacaactttgaatctttatatggatttatatttagactgtacctcacatagttagcttatagttgtcttgttttaataatccagtctaataatctgtttttaaatagaagtatttagtgttttgtattaatataattaaggttatatttatattcttatcactatcttaatatattctttatttgtctcacagttttctgttcctaaattctctttttgtcttcaattaatcaaatatattttatattatccattttccccctctatcagcttggtaactgtacattctttaagtggttaccctggaaatgaaaatatgatttcttgacttattagaatctaccataattgatacttttatcctgtctggataaggatttcacattattttaacttcatttaatccactctcattctacctgttattgtttgttgcctttattttaattccacaaatattttatttttcaagctttttattatggataattcccaacatatacaaaaatagacttaataatctaatgaaacgttcatatttatcatcctgctttagcaatcattagctcatgaccaatcttgttccatctctatccccatccattttctctccaaatatattattttaaaacaaattccaaacatcatattacatttcttatgactatttctgtatgtatatccaaaagatgagtatgctttttataatatataactatgatgtcattatcacacatacgaaaaaataatgataatgggccaggcgcagtggcttacacctgtaatcccagcactttgggaggtcaaggcaggtggatcacttgaggtcaggagttcaagaccagtctgtccaacatggtaaaaccctatctctactaaaaaagtacaaaagttagccgagcatggtggtgtgtgcctgtagtcccagctactcaggagtctgaggcaggagaatcacttgaacccgggaggtttcagtgagcagcctgggtgacaagagtgagactctgtctcaataaataaataatgcataataccatcaaatactctggaaatactcaaatttccaaatgtctcaaatgtgataaccatttttataggtattttgaaatcaagagccaaataaattctgcatactgtgattggtttatttgtcctttaagcttaatttaacctattgattctccctcaatctttttttttttgcccccttgctatctatgcattggagaaaggggcttgttggaactgaagttttccacgctctgatgttttttcccccatgggtattgtattaaataaaatgcttcctagctgtaatttctgtttgtttgcagttagatctagaggcatgcagattcaagttcatttgttttgtttttggtaagattacctcatggctagtggtttatgttcttttctcttttcccataaatattcagggcctggatccgttaattcattaaaataaaaaaataagaatattacacttttaaaacatttattagcaggaatcctattatcaagagaaaattcccccatctatgtttacttagtcatacaagagatgtggaacaaatgcttgattttttacatttgtataccatttttcaaaacaacaaattggttcactaacatctttccatggtaaccaatcggttataattattcttaatgttatgaactcatggatataaaatatttgatgaatttgcatctgctgcagttactgtcaatgagtgcttaaattgttctatctttagttataggacttacactccactaaacattactttgattgttttaaacaatccatattcatagacacttacttatatatttatactttttggtgttcttcatgccctccttcatttacatgatttcaactgggactatttcctctgactgaggagctccttttaatagttttgatatagatatgctgataattaattatcttagttttaattttctaaaaatgtcctttttgaaggatgtgttcggtaggtataaaattctgaattggcaattactttcttttggcactttaaccatggcatcccattgttttcttggttccattgttttggtttaaaaattagctttatgtctcattggtgtgcctttgaaaatatatcttttttcctttggatgcttttaagatgcatttatttgtcttcaatttttaagcagttttactacaatatgcctccatattttatttggctttttttttttcttacacagtttcttgaatccatggcttgatgttattcattaattttggaaaattctttactgctattcttcaaataatacttatgccccatcttccctgaaatctcctcttgggcctccaattgcctgacacagacctttacactaaccaatatgtctcttataaaattttctttatttttgcattctcttttccactctgctttaatctggatattttcccttgatctattttccagatcatgaatcctctcttctgttgtgtcaactctattattaaacctatctacttagttttaaattacacttactgtaattttaactttcatgttgtacatttgattcctttcataggatctagatctctggtgaaattctctgtctcttcttgaacatattaatctcttatctgaaacagattatagctatagatcttatagctccaatttctcagtcacttttggatctgttacttttggttggttttctgtcttgattattggccatttgttcttgtttcctggcatgcctactactttctagtgaatgacagatacactttttatggaaattgtacaagttttgaatgatgttatctttctccaaagatgatttgattttcttctggcaggcagatagagtacaggaaaatcatcttaatccagttgaggctggtatatttccagtttgctcttaccctaggttgtagttcttcaggggcctcaaggaccttgagtatttccatggtcctacttctttgaaagccctgaactctgtgagacactgagactgctacaatatctgctttgccatttactcctgtatcagatattttcagctttatattttgttgtctctccctgggagtgtacaaaaaggcctcaagggaaaattccatgcagtatgttgaacttacatctctgtggctcctttcctctgggatcttgtttcctccagtcctttgttggtagccctgaactccactggtcaggaaagaatttaagctatttccactttagaaactaaaatcttaagttacgctccttgttgatgtattcatgcttttattttccctgatttttaatattttaaaagctggtcacattctcatcattttggtatgatcacaaagaaacatgtagtaatggaaaacaaagaagtattgaccttcactaggcaatcaaccctcagataatgtcaggaaatctgaagctttctcaagtaggagtatggaagagtggagaagggagatgtgttatttatcacagacaatactcagcacaattttattgctccttggggaatccaaagcttttaaagatgatattattatttggaaggcctccagagagcactaagtattaaaaatagcacctgcattctgctaagtcaaatcacctgtttattatccagggtgatgaaaatcatttaataaaatattacagacgcttgttcaaaatcatgcacacaattcataggctcagagacattaatgtctatgcctggctcactacatatttgttaaattgataactcaggtggacattagttaatattaccactttttaaaaattaatgatatcaagttatttgaaatagccagtagaaaacctctgcagtaacatttcccatttttcctcatacaaaatttacataaaacctttgctttgtaatagccactatcttttttctttagagaaccttctcctcctcctgcctttagaatataaatataagaatgtgactcaggtctggtcagtccctgttcatcccattggccagagttattggttcagaaatgagcatgtgatctacattattccattgagactcagtacttggattttatgaacactactggaaagagaattgctgctggttggtaaagggatagaatgaaagattcaatgtggttatcaccacgtaatgaagacctgcctaagactgaagccaaaactacttaaaacttctcagttacatgaatcaataaatgccctttgttgcctaagccagtttattaggactgggtttcagacctggaaccaagagttcttactaatatagctataccaaaaaagtgtgtagcagcaaccaagtctgtcaacaagagtgattaaccctcaggtttaagaacaaaactgaaaagacgcagtagcattaggaacatgtttttgtggtgataagatttattccagtccactgataatgttttactttcccacctacatttacaggatgcccaagacatgaggcctgaaatttatcaataatatcaaataacatagccccattcttgaagttccaaagttagagtattattggcatttttcacctattcctcacagagcttagttatttggggatgaagtaagttacagaagtttccaaaaaagaaggaaatctctatgtgtttcatgtttttaaaattctgtcttcggctttggcttaagttatggttactgatggtagctgtaagtaatattcccaggagaaaggctgcaaataaaatgagaattcctcagcatctttattgtccttcaagtggacacgaattcaagcaggtgcacatactgaggatcatacatttctactcatggcatttaattaggaggaaagtaaaatgtgcagggccagaactttaaatattagtttaataacctttatgcacctaatttctgaatgattttcttactctctggagaggcatctaatgtcagacagtggcattaaggtgaaattaaggtgagtcatggtaactgaaaagccatgaggcaggcacatgtcagaattattaattttaaaggatatatgaaatattttctcctctgaaaatatgcccagttaatgtatgctgaacttgaagtatggctttatttccctcattcacaactaatcactgtctccaggaggaacagactaaagagagaaagattacaaaagaagtatagccatttcaaaatccccaaacaaatgagaaatcaaaagaacaatgacaagcttgttggttatgtagagtaaaatttttagtgtgccaatcatggctgataccatgttttgaccatgtcaaaattcatcaaggcaggagttttcaaaccttttttgaatatgacccacagtgaaaagtatttctatatctatctgtaatatgactgtgtatgcatatacatttacaaaactcttaccaaattaaatgaactctcatattttctattctatataatttcactaaaagcaatccctaaattgtctcacaactcaccagtagcttacaagttgatataaaacatataatttgacatatattccacatcttaggctaagagaattacacatattcaaatcattaccaatgccaatttcagattaagactgttctgaaatgaaatcaaatcaactctttctacacagtggaaattcttagaccgtttattaacttcactaaatattttcataaagcatttgaagcaagatgctttcttcaggataacacctccaaacatactttgtatctttcgtttttctttttcttttttttttttttttttttttttttttgagacggagtttcactctgttgcccaagctggagtgcagtggtgggatcttggctcactgcaacctctacctcctgggttcaagtgattcttttgcctcagcctcccaagtagctggaattacaggcacatgctatcatgcctggctaatttttgtatttttagtagagacagggttttaccacgttggccaggctaatcttgcactcctgacctcaggtgatctgcccacctcggcctcccaaagtgctcagattccaggcgtgagccaccacacccggcctcagaacatactttgaaacaacccaatgcaagctcaccacctcaaatccagatccaaagacgacactatctttaaaacaaacaaacgaaaaaccatgtctctataaaaaggaatgaaacataatgtcacagggtgatattctaatgagacaaagaggtagtcccattatctgttttgttttacctggtggtatcaactgttgtttcatcactgtttctgtgaagaacatgttttcttaatgaacccttgagaaggacagtgatttgatgaatgaaagatgtgacacatgaaacaaaatattcctcattccacacctgtgtatataatatcatttggctctccaaattatcttaaagtttgaatctcatttcttccttcctcaatattttcttttaccatggaggcagggacagcaaagaaatgtttcctctccagatccactattaactgaaaattccagtgctctgaatacttgtttttttttttttatttttaaaaagggacctgaatttctattaaaggatttcctttattaactcctgctgaagaatttacatattggcaggttggaaagtaagccctgtaggaaagaaatcggacttgtttttcatcatcaacatgacggtctgatgatgggtgtatgagtttcctgttgacacccatgtcacatttactgaattactgttgagaccacagggtagacccagcttatacaattcttttgtcttctttctgcttcacagatcattcataatcacacacggggtaaaaaatgagggagcgaaaattgtgtaagctaattttcactgttgctggaagcggaagcaaatagttctcagagctgagagtgaacctgggtggtgaagagcagtcagcattaccggtggcaagttcagcattctgaccaaaatgagccactctgaaccctggtgttcagtcaatggcggtttcctcaaatttgtccttaaaagttgaaatgtatcatacttctgctcagccacccttaagaaacttgagtgtatgagtgtgtgtgaaatacaaataaaacctacacagctattgtctggattgaacaaacaagcaaatgtgctcagttttccaaacaattgcagatgctgtaataattcagaaaagtgtgtgctgagcagtgggggatgctggcatgctctgttagaatcattgtggctgggtgcggtggttcacgcctgtaatcccagcactttgggaggctgagatgggcaaatcacctgaggtcgggagttcgagaccaggctgaccaacatagagaaaccccatctctactaaaaatacaaaattagccaggtgtggtggcgcatgcctgtaatcccagctactcaggaggctggggcaggagaatcacttgaacccaggaggtagaggttgcagtgagccgagatctcgccattgcactccagcctggacaacgagagcgaaactccatctcaaaaacaaaaacaaaaagacagagtcattgctaaccatgttgcttagcacaattttggaaggaggcatgatgctggcacagaaaacccttgtcagaaattcctattccttaattttatgctctttctttcattcttttctcacttcattgtcatacaggcaagtgaaaaagagtggaaagagaagaggcggtgtcaaaggaaaagagaaaaaatacacctgactcctgttgtttatgattgtcttgtcagttaacacctgggcaatcatcaaccatgtactttccttgagccaggtccttaaagaacccaagatgaaggaagtagacagaagcagctttggggtggttagggtagtgcttctagaactttaacgtggctacagatttcttgggagtcttgttaaaatgtggattctgattctagagtggggcctcaaattctgcttcagttggtgatcttgttaaaatgccgtttccgattatggggtggagcctcagattctgcacttctactcttagggaaacccaagcctcagggttagtctttgagcctggggcagtggcctatcctgggcctttttctttacaggtatttcacttgactacttctccttttttcaggggcctgcagtaaagagaaataaagcatgacatagtctgaaaagcactggttctagaatcaaacaaacttgggttggaattccaactctgcaactgatttgcaatctgtgtggtcacaggtgagttttttgaatccctcttaaattcattttctccatctataaactgggtatgccattttttaactctcagggcagctacaaggaacaaatgagatcatgtgcatcatcaggtaggttcacattcattatgaaatgaatgactaaagagcctaaagcacaaccgttctatctacaggtaataaaaaggaaggtagggtgcaacaatgtttaaatacatctttatttttcttaataccatgactttggctcttccttagatctacagctatgggttgtgtagagttgtaaccacattaagccaagcatgtcttcccatttcgaatacttttctgactccagaaattcattctctgatcatgctttcagtaatgacaaaatccagaacagattgggtttttgaaaatatttcttgctatatcaaatgaggaaaatttgaaaatatttcttgctgtatcaaatgatgaaaatacatctgatgatttacttgccctcaattaattcagttcttaggcttgctcttctggacttctctggctcctgtttccaacaacagatttcccttcttctcaagctcccctcttcccagtctctctcctccaatctgaaattgggctccctttgctcccatagtaaataaggcaaaagtgtcccttcattcccatgtgatccagctggggaatctcagtttctctaaaggaatcaagaagatacttcagagttaaccagaggaattaaagaaaaaacagttaatgccagccttctccaaccttcccacatcagcagactgaacaaagcgctcaaaactcagggtttaataaagagggaaaaaggaggaggagctactttattgggtgtagtagagacaaagagggaaatagaagaaaattgtgaagtagtgacattagctgccatgtcctacctcctctggcagttctccagggcagacagggctggcagcggatgggtgttataactcctatggatcatgcctgacccttctgggcccgtcatgacttctgtttagatgacactaaagggtctcagggcagcatcagagcaggaaggatgtgccaaccacagaagtgccaactcatgacaagaatcattgctcattcagggattgctgcccctgccatcaccccctctgtcccaggatctgcattccgctgttctctctcctgcaagctgtgacagcagaagaggggcctccttcccattagctcatttccatctcggacttagtcaaaggaataaattattgtcagctcatctgtcttattagattgagccacatgatattgccatgttgttgctccaatactggcaatttcatgtgattcaacctcatctgctgtttagagaaaggaagtttcactgctatgaaaaactaaaccatttctgtggctgagctatgctgaccagaacagagttatctcaaattcatctactcaaaagctgcatattttaaactgaaatgcactgagcgtcttccttatccctactttccacatttctaagacaagataaattcagcaacattctttagaaaacattccatctccaacagcaactatcagtcaaacaacagggaatcattgtgcatttactctgtataaagcataagaaggataaaaaaaataaacacaacatcttttctgtccctaaggagtaactgacgtagctgaagaaagaagaggggaaaaacaccacaaaaaatgtaaagaatgaagcaacaatataaggaatgtcacaagacagaccatgatcatttgctaaatgagtggaatggaaaataagtacagtgagttgagaggcaggagcaatcacctagaatctgatgtgagccactttctatctaatttagctcatcaatcacctcaccctcccacctacttactgtgggaagttatcacagaaaatgaaaatctcctctctgcctactcataactcccagatgtcggttccagaaatgtatgcccagcaggtctcagaccactcccactcatttattgggtccatctcaggaaaagatgggggaatggggacatttacactggatgcttttctttctctaggtgaagtcagcatgacacaggaaaatgggagaaatctaaatgtgtgtgcctcaatataaactgtagccacctggtagcctagcacttttcctgacttcatgactccttttaattctgaatttcaacctttctgagcagttgccaatagtaaaaaaaatgacataaatttaagcatactacaaatacctgtttagatacaaatgaggtcacattaacacctcacagcccccctattttagcaattccctgcgtgctctcactcacacaatctcccatggtaccctgctcttcctctctgctgagggcctccctcttgaggacaatgcctagccatggaccctgtctctagtgtcctcctggagaagggtgtttcctttcccagggggtcatagccaagggctctgcaaggcagcagcagccctggctgccccagtacttctggcatgaaagccatgctgggatgttccatgcagaaatgcagataatacccttctgcccaacactgtcaccctctactgcctgggttgaataaaagtgaaagtttgctaaggtcccaaggcaacatctctgaccaggccttttctccttctcccctttcttccttccttttttttttttttttcttttttttttttgacagagtctcactctgtcacccaggctggagtgcagtagcgtgatcttagctcactgcaatctccacctcccaggttcaagcaattctcctgcctcagcctcccgagtagctgggactacaggtgcacgccaccactaccagctaatttttttaaaatatattttcgtagagatggggtttcactgtgttgcccaggctggtctcgaactcctgagctcaggcaatccacccgcctcggcctcccaaagtgctaggattacaggcgtaagccacggtgcccagccacttctttccttttttgagacagggtcttgctctgttgccagtactggagtacagtgatatgatcatagcacactgtagcttcaaactcctgggctctggtgagcctcccttctcagtctcctgagtagctgggactacaggtgtacaccaccatgtctggctattttttttttaagagatggggtcttgccatgttacccaggctggtctcaaactcctggactcaagtgattctcccaccttggcctcccaaaatgctgggatgaaagccattgtgctcagccctcaccctccacttctaatccataagaaagacgtgtcaattttacctacaaaacatccctcgagtcctccccttcactccatctcggcagataccctgttggttgcttattaattaccatcacctcttacctgggcctctaccacagcctcctaatgtcctgcttccactcttgcccttccagttcattctgcacaaagcagcaagagggatcttgtaaaaagactaaatggatcatgtcttcctagacttaaaacccttcagtgctttccctgctacactcagaataaagtcaaagcccttggccctggcctacggggccttccaggacttggccccagccttgctctacaggagactgtccagtgaaggttataaactcaaagtccactgcttcccatgagaagcctgggtcagaattctgggtcttctgtttaccatgtgaactgtggagctttgggccagcttcttagcttccctgcacttcagttcctacacatggaaagttacatatctcactggattattagaaataaagtgagatacaacgtatacagtgctaggaatattgccagtcaatagtaaatgcttcataaatataatcagcctggtctgctttcatttcttcgaacacatcttttccacttcagggccttccatttgttgtcctttctgctcagaatgctctccctcctccccgtttgtacagaaaggccttccctgactaacagatctcaatggggactctccctgtctcactctgttattctctgttgcaactcttcatttccttcgtatcacttgtatcctgtgataaactgccattattttctttctttggctattcactgcttattgtctttcccttccatgagactttaatctttataagtattaccattgaattccagtactagaacatcattttgactcagggatccttcaagagcttccatcactatttaaatttttacagtgaggaagtggatgaatcttactaatctctcatctcatggtctatttccatttggcttttacttaaagggtcctctttctgtggaggtcagaccaactctctggggcagggttggacaaaaaacaccatgattgactcagtctccccaactcccctgaaagtacatataagcttcttttcaaggactccttgccttcttggacagatatttaactaagtaacctctgatggctccttttatctcaatccgatttaccttctctcttgtgtgtgtgtgtgtgtgtgtgtgtgtgtaatgcacacacttactaagatgttggcttagcccagagtcctcagaaagcacagcctgaggcaaaatcttacataatcctaatttattggaatgtgccatccagggaaggaagagggagagaagaaggaaatgaggaagggacggagaacaagcagatagatacaagggtatatttctgagctggctgccactgttactcagcacaactgatgtcagatctccaggacccatcttctgaggcaggctgtgtgaatgacagctcctttggacaataagtcagggtaagaaggagatgaattccaggttgcacatacgtgggagctgagccatctagtgcatcacaggcctcagtggcaacatgggagccctgggggagatgacaggctgacttgagagaatgggagcagtcactgtaacagcctttggcccttggcagcaacaatgtcagcagcattagtgacctggctctgtaaccatgagagcagcacaaaccaggcaagcatacagatctggaggatggcctaaactaagtctcgtactgatgggtaggaaggtgatgactgtccaaatgtagtgtttgaggatggcaagcatgggacatataggctcaccactcctgaagcttgcactcatggcagacatctttgtactttgtactttgtctggctgagcccaagtacagcctcaaaacacttcttcatacagagctgtaatcagccactacatcacaacagtaatgcaaatgatgacagcataagataaaaaaaattgtaattcacacctgaaatgataaagacaaaaacagtataaagctaatgaaaatgatgaatttcagaaagtgaaaaatccaccaaagggaagcccttccagagcatcttccatctaacccagctccatagcccagaaatcagcgtctgtggatcttcttgatattgcaggaaaagagaatgccattcaaatgacagcttttccagaactggaattctatgtacaacctagcatcacagctctcatcattctgtatttgatgacagttttgtgggtttcatatcccaaaatgatacctgcctaattcacagagcaaagtttatttcatttaaagcagttctgatcaggggaaaatgtttcattgtggtgttataaggaattgatctgctaatgttcttcttaagctttgacattaattacagagaagatgcatcatcatttctactgacccttcattccacccccacctaccaatacacccacccaaatgttcagagctttgtatatgtgtcttaataatctgtcatccaatacttggcaagtgaaatgtgctatcatatggtaccaagaatgttcgcagctctggctaaaacttcactggatctgatatttaagccttagtggtgatctaacataggcagagaactgtgctaagaactgatagatgcagaagtgaataaaacactgcccctttcccttagagtagtaagttccaaactaaaggatagaacccaatagtgggtcttgacatcaacttaggaaattgtaacgagaaattttaaaagctacaatagaattgaatatagtagaacatatctcaaataataataaagggtatagtttcatgaaggggtgtgtgtgtgtgtgtgtgtgtgtgtgtgtgcatatacatgtatttctttctgtaggtgatctaacagtttgaaagcctaagttttccaaaggtgaaaaccatcattcaaacacataatgataaaaatttacgtatagagaatccctggagtcatgcagaatcaacattcagtatgcatacaggatggcagagattagtactaagggggcctgatattcaggcaatggtgagaatctagagtttgccttctaaagcccacattcctcatattactctctgctcagaaaccactgtatgtgcccccatcactacagaacgtaatccaagctcatgagtatggcattgaaggacctccaagcttatttcccactactcttcacctcctcccacaccttcttgatgccatactgttgctataatcatttttgccattttgaatgtgttctgtgtttgaatacgttctgtgtttttttacttctggacccttgcacaaactcttccttcatgctggaatgtctttccttccctatctgaccactaaagtaatatacttacagtggtcagcctttgttttgtctctccagcaagctatccgatcctccttctggtaataatattttctttcctttgagaaactccctgaaatttcatgggttctgtggtcaatcataatgccccactgcctatggccacaggagaagctctgtgacaaacatacagtgattggttgaaaaaaacaagcatgtgacctatggcagaacattatactctatctcatgtacagacgggtacaattccttctctgaattctaacagcagccctcaaaatacagtgagcataataattacctggaagacttgctaaaccacagattggttccacccccagagtttctgattggataaatgtaaattatggcctgagattttgcatttcaaataaattcccaggtgcgttagcttcctcctgttgctgtaacaaattaccacaaacttagtggcttaaaacaacataaatttatcttcttacagttctggtggtcagaagcccaaaacaggtcaaggtgttgacagggctgttccttctggaggctccagggtagaatccatttttttggttctctcagcttctagaggttgcctgcattccttggctcatggcccttctcttgcatcactccaacctcttactgctgtcctcagaactcctactactaacgcttacctcctgtctcccccttataacgacccttgtggttatattaggcctactgagataatgtagaataatctctcattctcaacccccttaacttgatcatatctgtgaagtcccttttgccataagaggtaacttaggcctgagtcctttcacctgaggattaggatgtggacaactttgaggggtcattattcagtctaccacaccaagtgatgctgatcctgatagtccagggtccacactttgaaaaccaatgaattactatcactatcaaagccagcctagtattttattctttagtctgtctgcctcccactagattaagaggttgcagaggctggaatagatcttggcctttttaaaaattgctttaattctatgtacattctcctttctgaatactggtaaatacatctttcagttaaactggaggaataggtaaacagtctgaaatgctgatagaaaagaaaactgtgaagataaaaccccaaagtggagaggtattggttaataggattatctggattccttactgccaacagtaaatctttctacctaattatgctcccaaatttcaaatttctctattgctgacaactatcgccattttgatgccccccagttatttctcatttttctcaaaccaaatttgtgtagctggccagcctatcctgagttctacctcatgggctctggatgtcagagatagcttcaccacacactcaagaactcaagccagaaatttcaccagcatcataggaatagccgctgacagttattcccccactgatatgtgcttggcaacgttctgagttctctgtgggcacttactcattaattcttaccattcttgtcttgtccatttaaaaaatatctcccatagtgctttacatgtagcatacatacactttataagtctacattgcttggttcattcagtagaccataagctccttgagggaagggatgggtcttattcatcatcttgttgccaggatgaaactatgtcacttgtacctcatattacatttgcagtaaaatgttagagagatgagaccatatgtgagcagttggaattaagtcagtcaagttgaagtggggtctaacatcaaattgccttgaaaagcaggcagaacttaaaacatgatataataggcatctcagagctagtgcaaaatcctaagcaagagcataaagctaatgttgggagcaggccccccaaaatctggccataaactggccccaaaactggccataaacaaaatctctgcagcactgtaacatgttcataatggccctaacacccaagctggaaggttgtgggtttagggaatgagggcaaggaacacctggcctgcccagggtggaaaatcacttaaaggcattcttaagccatgaacaatagcatgagcaatctgtgccttaaggacatactcctgctgcagttaactagcccaacctattcctttaattcggcccataagagatacttttagttaatttagtatctatagaaacaatgctaatgactggtttgctgttaataaatatgtggataaatctctgtttggggctctcagctctgaaggctgtgagacccctgatttcccacttcacacctctatatttctgtgtgtgtgtctttaattcctctagcactgctgggttagggtctccctgaccaagctggtcttggcaagctaaaatcattttatagagccaaatcagtaagtccccagtttagcttagaaacaatcagacaaggaccaaaggctttctaggaggtatgattctttgaagagacaagggagattgaaattgagtccataaaattctcttccatcttcctgattctaggtgttgaggtatctgtcctttgttcttggtgatttactatatctgattgcaacttagaattcaaacattaggctctgccttcttttccatccggattctaaaatcaatatctttactatgacgcttattcccaggattaatttatgaaattgtatgatgtgctttgaagactgaaggcttcttagagagagagggaatgtcaccttgtactatcaaaccagtatattaaacagttactgctttaaaaatcagatgtttgttggttgagatgctattaaatcttaacctacaaaaccagcacatgatcatttcaatggtacaaaggcaaactaaatatagcagatgacaattgctacaacataagagaaaaaatgtaatgtaatattttaaccatttagttatatgccacatgaaaataaattcttataaagaataagttttagcacttgccccatttgtgtgatagggtacctaccatgtgccaagggctgtgcaatactgtgatgaacaaaagaatccctacgtgatggagccatcaatctagtggacaggatggatatttaataattatgaataattactacataatcacaggacagaataaaatgaaggatttccaagagcaatgtgaacatagaaccaaatatggagcatatctgaggaaacaagaggctgtccagaggagaccatattccagctgagattttaagggcaaatgagagctgacgagcagcacagaaggggaaagaatcttccagcatttgatcggcatgatacataaaaggagagtagcagggcatgggctgggaacctggaggcctgttcaagactgttcagccttgacaaggtaaagggcaagaggtgatatatttgtttgagctgaatctctcagcattttgcatctcaagtctcctagttttaaacaactttctagagaggaggctgctctttatagaactgagtatatggaagacagccttgagaaccttaaattcaatgcactgtgtagaatataaccatgattctaaacgatacttgttaaaaggcttttttttttttttcaaatggccatggctttgttaaaaaaaaaaaaaaaaaaaaaaaaaaaaacaagataatttggtaactgagtagagacaggacaggtttttctactgaagtctttggtttatggatacacctatagtgttggaaggaagcatttgtattttaaggtatctttcctaggtttgttgctaagttcatggacagcatacccccatgaagatgacaacacagttcttctaagacattatttatttatgtatttattttttaggcagagtcttgctgaagtgccataggagtgatcacggttcactgcagcctcagcctccttggatcaagtgattctcctgtcgcagcctctcaagtatctgagaccacaggtgtgtaccaccacacttggctaaattttttttcttttttttttggagagacaggggtcttgctttgttgctcagtctggtcctgaactcctggcctcaagtgatcctcccacctcagcctctgaaagtcttttaagatatcatattacggaaactttaattaagctcttgctacatataagacactttgcttaggattcaatgtatatctttcatttaaccttcacaacaactctaggaggtaggcacaattattattctgcttatcaacgttgtcaactgaagttagaaaggttagtaaatctttgaagttcacacagcaagtcagcagtgaggctgttaatccctccccactgttaaccaggaaaactctacttctgttaaattctgatcattttttgctaaaggggttagcagtgcttttgactcttttatgtttccctttgatttaccatctaatggttattgctacagtgtttaataagcaatgcattatccctgggcagtggaagtaatatcattactcagagacggtaaacagaagtttgcatctgtgcactgcctggaggtggaagcatcaataaaagcctgaggtggaaggaagagatgaatgtgcaggcttgaatcagaggcaagggacgcaatttgatgtggggtaataagaaattctgcctaggctagcaaagaaacacaatcctttaccactcctagcctcaactgcactgttagatttctcctaacactgcttttctttgctccacagggtacaacagtcccagccccgcccatcacacccacaacccttatgtacgcccaagggtgcctggcatgcaagattctaagagcaatgggttgcaagtccctttgacaaagtttgcctggggaccaggaaatttaagtctacatccgaggaccaaagatatttaaattaaaaacttcctaccaaatccaacagcagctaagagagtggcgaatgcgatattacagaaattggtctgcagcctccaaatgccaaagtggcagcttgttatttatgataagataaggagcagctcgttactaaagatatccatgtcaaccccacgcattgagcagaacaaaggatcgttaatgattcctgggcttgtcatgttagaatggggtggcgatgataaaagagcatctatatatgctttccttgtgacatttcttatttttaaactccaatataaaaatatgtgttaattgttatgatttgtgtcacatgctatgctccagggctggacaggaaacagtgtccccattctagtatttttataataagcaataaacaaacaataaacaatgacaacaagaagagaaccactttccaggatcatatgattagttctgacatttgggaaattgcttcattgccagaagtcaattcccgcgattgcgagcatcttccacacataaaattaataatgtgcccagctcccctcctgccttcattttattatatgaaatttggacctcccacagcatgtaaagtcacatttttaaaataaaactttcttcctttataaaatatataaggaaatgtcttatagagttacacagacctttgaaaacatacatttttccattcctttgtttattcaggcaatacccgtttgagtacctactaagcgccaggtacttttctagagtgaatatgacaatgagggaaaacagacaattattaatattccaaatgaacaaaataagtttggtagtagtaagtgttgggaaaaaaataaagtaagtcaacgtgatagagagacaggtccttcctaatggggacgggggtggaggggcggtcagagagggactctctaggaaggtgacatttaagcaacaagttgaattacaagaaggaatcagccataaaaagatctggagaggagcattcctggcagaaggaatggcaaatgcaaaggcccagtgccggggacaagccgggcttgttcaagaacagatgaagttcaatgacccgagggcattgaggagggcccagtggatgcgggatgaggtcagggagtgggggcaggagcagatcaggtggggccttgcaggcctaatgaagacttagtattttatattaatgacaaggacagccaccgaaggttcaaatctcggaaatgatagattctatttgatattttaaaaattacagctgtctgggcgtcatgggggaagaaaatggacaaaattgtgttccactcaaagatagcatttcccttacagatcccaaggccctgtctttgtcagtacgggtagtgattaagaacatagtgctagtcagaaaacctaggtttgaatccttgctctgccatcaatatgccatgtgatcttagggactccatcaaacttactaaagtcttcacgtgaaaactataataataactcttcccagagtcttggtgaaaattaaatgagatataacacataatacagagtagtgttagtgcctagtacttgatacatataataatagctgttgttgttattattattattattattaaaattaggaagaagaaagagaagcataaggtaaagcactcagcaactactctgatcattcaggtgagaatacagacttatgggagacaggatggaggtttccatcagcatagagcatctctgtgctccaggcccttggacaaatgtcacctctttaatgtcctgaagacattaggtagaatctagaccaaaacagaattctggaaaaactggaaataattcagatgctcaccaacaggaacatgaatcttgatatcatggatgcaactcacaaatatgttgattgaggaaagctagacaggagagactacatgctgtgtaattccatttagatgaagttcaagaacaggtgaaactaactgctgttggtagatatcaaagcagtggtaacattataagggaccgtatttggaaaacatttggaaagagcacaagggagcctgccagggtgctgaaaagtgctctataacttgatctagatggcagttacatgatggatatacatatgtaaaaatatcatcaaaccatatacttaaattagcatactttataaacttttactgatgtatgtgttataccttaatttaaaaaaatatgtatttcaggggatcagaaagtcagctacataaataaacaaatggtgactgctctcttcaggaaaacgatgacctcaggactacttaggagccagttaatttccaaagctacttcccgtttctaagttaaacagctctgcacataatgtcagccacagcaatggcaaagaaccgcagggcaggtgatgaaaaagctcggcttagcagcaggacaatggggaagtgtgttaaactgggaccatgaccaacttcccaaaaccctctctggtgattgccagtgcctgcttaatgccttacctttcaattgtgctgaatttgtctgcattaaatgaaagttcgagggggcaggatcacttcttttttgttttagaaatatagctcaagtacctgtgtgctctataaagaataaaaataataacaggaggccgtggaacaactgaagtatggaacatgtatttagaaagtactttctggcatttcaataaaggaaattcagagggcttccagcataagaacaggatccgaatggattcattttcctgatagagtgacccaacccacaatgcaaagtcattaagtcccatcgcgtggcattaaaaaatgcttttaagctaagatcagccgaaaatgtgcccagggcagatttttatggccatatcatcacaacctgaaattcaaattggtgaactagctagaaatacatgctcactagaatggttcagagtttttctgcatctatctcagtgaaaaatgttagcaaaggaaaccttattttcctggaaaaacactatcaaataataaaacaattcaggaccagttttcacaaagtaataacaggccatacataattgattgcctttagtcttcgtctctgggtattacaaatcacagttactagcgcatcgaacaagctttcattccggattcagactgtccgtcttggcactgcctgaaacggcttgagcacctttattgcacactttactgcattgttcttcagttgcttcttcagtgaagttctgctatacccaacaatgttataccctccttctttctgtgtgtttactgactgtccctgatggtaggcaaaaagtaacttctagaagggaactgatttagacttatgatctcacctcaggcttgcaaggcaatacacaccacccagggagataaaacatattcctatgaaatcatatcctaactctctccattaaaactctagaactgcactaaaagcaggaaagatatactaaaattataccaattctttggcttaccaaacatcaggcagctgcatccataaaaaaaaggaataaataattcattccaaaactcttttttgcacatctcaaggctcataacattggtttgtaggaggaggtctgaacgagggcctagaaattctgagttatgccttggctataacaggaacctgatccctctatcttactctccctttgtatgtacggctaatgatatacacctgggctgccagtgacagtagccatgagccacgtgcctattgagcacctgaaatgtgagtagtctgaaatgagatgtgctgtgagtataaaatacacacaggatttcagagatttactaccaaaagaagaatataaaatatgattctttaataatgttcaaatattaattacatgctgtacatgccgaaatgataatattttaaagatattgggttaaataaaatatactatttaaatttatgttacttcttccattgaacttttttaatgtggttattaaacatttttttaagttatgtatgtggctcacatgtatttcatttggatgacaatgatctagatattctgaattgctatgaaagctaagattctctccttgtggaaatgggtaattacaagcctaacagttacgcatgtcttaaaggatggagaacgtgggggaagaggaagcaatcaagtcaccaagtgtattacatatttagttatacttcaattttcctaagcacattacaaaaagaatggaaagaaggaagaaaaacatgcacagtccttcaccctcctgagacagaaatgagactgaaaatggactttgaaatcaaaccatttcagattagaattctgcctctaacctcagtttctccatttgtaaaatggaagataagcatactcaccttttagagaattaaataagatcatgccgatcaagtacttaaagcaacattgggcacggttgggaataaagatcttggcaccggagatgttgaacctggagcggaagggacattgagaccaaaatgtccattgggcaatgggaatctgagcctggagaccaataaaaagatggatagatgcaagtgtcctagcaagcaagccgcacaggtgagaaaacactaaaaccaggaagggagctggtgtcacataagcagctcacacttcatggaaacatcacagctgcagctgagctccagccagtcgttcccatgaaggaataataatggtacagtgttgccaggttttccaattttctaagagaatctagaaatccagctttttaaatgtttagaaattttaaaaaatttagtttaatttaaaaagcactcattattccagagagaacccacgggaaaatagtttaataccagccaggcgcggtggctcacgcctgtaatcccagcactttgggaggccgaggcgggcggatcacgaggtcaggagatcgagaccatcctggctaacacggtgaaaccctgtctctactaagaaatagaaaaaattagccgggcgtggtggcaggcgcctgagtcccagctactcgggaggctgaggcatgagaatggcgtgaacccgggaggcggagcttgcagtgagccgagatcgtgccactgcactccagcctgggggacagagcgagactctgtctcaaaataataataataataataatagtttaataactctgctgctgcctcaaaggtcaacaaggtaacttgttagatttctaccatatgaaagttaacggggatctcagatgaaattcccacaagcccccaaacagttgagctgccaaagatgaagagggagatttacctcttcctcctcccagctcttcatgctgtaggaacacagttgctgcgactacaggtgtcccagcggtctttccctctccccagaccgtgacctggatgttatgcagaatgtttcaaagagagctgcaaaagcacaaggactttttacaggagacacgtgacataaaccaaggtgctactccggctattatccattgcccgctttaggtctctctggaatattgtctgtttccatttcaggcactctcagctactacccattttggttaataaattatcatattgtgtaaatgtatacaatctgtaagcctggaagaactgtctggaaaaaggatttttaaaatatcacactaaaaaaataaatactagtggcctctctgtatctattgtaaggagtaaaaggatttacacctgaaaaattaaaattacagtagctactctttcctcaagtggttcttagcaaatgcattttaaagaggatgactttccagtgaacactttaattttaatttaaccttcccagaaaatgaagtgctttgtgtagattcttttggttttatttaaggcataaaaattagttctgaactgtgataattgtgggcttaggaatgtaatcattccaagcaccacttctcacttgcttataagccctacaggtcttgagttgctgtttattgctaattcgaagttggcaagttatttaactgtgaagctgaacttgaagtcagagtgtgacgagatggtgggaggtagattgttttgttttgctttcaacaggttatccaaagcccggatgcaaaatgcggtgcaagacacggttctagatatgtgctcctctaactcttaatcttaattaaaatgggatgatgaaatgttctaaaggtggaataaaatattacattaatctataactctatcttgtcaaaccaaccacagataggatacaggttcctatcatccacccttatgattttgttcttaattgtggcattttgttgttgctgtgaggactcaacctaaatactattgcttctatttgattgtttaaaggaaaataatgtaacaagctttggtcatgaaaaatcgtaatgtccataatacagtagatgcagcatttctaaacattttagaattacgtgtttgaatccacgaccacatactcacatacatataatcaacattaaccaaagggtcatatggcgatttttttcctttataataaagagatcctctgaaacattttaagataaatgaattcctgcttaagtatgggtgcatttgaagtgagaatgctttgaataaagttatcattttcacacaccactatgcctgaaagttatgagcattcagacagaaatcattgaagaaaacttaataaaaatatgtttggcatatgccgtatttagtgtgatcaatagtgtttagtaattcaagaaatgaattaaaatttcaccctcattttgccactcctaaatttccatttgaaaaacaataagagaaattattaactccctgaatatttctaatgggcttctcagcattattgagtaaaactaactccacattgcaggcctgtgtgctgactcaggtttccaaggtttctctgggaactctttggtctgttgttgctgttctttattctttattgaaaggcatttcctagtgcatttcctaattttaggcacctggctagactttggggatgaaacaatacatgtggcagaatccctgcccttgggtgccttaccctctccttcatacagcatctaatggatccaaaaccagggagaaggtgcacctcacagccacaggctgcaacagagaaaggtaaagtgctggtactacctggtttgtgtttgtctgtctgtctctttcttttcttctttttagtaggtgtcaatattttacataaagatctaaatttctgacttctcttaaaaaaaaaatcagaagatcttagcatactggaccagaaagactacttggcaacatctggctgaagctgtggggtgggagtgttgaggggggtgtggatggtgcacttttcctagtcatctctggatcaaaactggctctagtttgccagtgttcccaccactccctatagttttatactcactcatatccattacctgctttgtcctcgtattacagtatttacattactgacctgcaagaagtaactagcagtcagaaagcctgatactagcccttggtctgctgcttattaaatatatgacctagcatgaattcgtgaattgcataatgccttggagcctcagttttctcttaaaaaagattaaagacaaaacaaaacaaaacacgccttctctggcactgcaattgcaaatctccaaaaagaaatctatggaggggtttccaaacctggaaagcattaggccaaggaataatattattgtaattttgttttcagaagaaatatctagaaaatcagaaataacagcctatatctgattatacctataaagatcacaaagcactctcaactgaattaaatctcatgtgacctctgagataaatatcactttagccattttgatgatgaagaaactcaggctgaaaaggaccaagggatttgccccaacaccaaatgctgacatttttaaaaagtcaactttcaagatagttcccataattttaacacctatgaagacactattaacaactgacatcacatgatgaaacaataaccagtaagatgagccatcactttccaaggatatactctggatagagagtagcagcttctttgagctttcgtttgtttgcttgttattcaagagcaacattttttaaagggtattacatgttgtaatataaaggaaatattttaagtaaatatttgtaataggtactcatttggacttctaataaactagtagggttaaagcttttgaggacgcactttctcattaaatgtttgtcaacattacattattttcttagagattgtcatcagcaagtaacttctatgagaaacaaatgtccttaattttattaaagtctacttttattaatcccctccctacccctaattgagctaatttgaaccatagtgccattcagaaagaaatatgagaattcatctggctcattgtcacatacattttttccacaaagaacctaatagagttaaaagcttgatttaaacatgaattaaaggtttatcatttacctttaggaacaaactctccataggaatagtaagctcttttaatgcatttacattttattaggcttacagacattcaatttattggtgtctttaggtacacatttactgcatacagtcaaatatataacaccttcatagtaactttttttaaaaagagaaggtagacttatttaagttttttcatggttcaccataattcaggtagcgaagtctaaatgaacaagcagagggcagatgagtgactttaagtgcacaggagatctccacatagtaatttagagacaccgtgggaaataaataaggagatacgtgaaagagtaaccagctcttggcaggacatgtatatgactgagtaacatgcaaactactgtttatacattgcaatcagctggcagccaagcaaaaagcttatagatgagtaaggacactgccacagccatgtttttgttctgaacctcctgattaaacaaataaactcagactagagagccacatggagaatacaatgctagggatacaatacaatagaatacaatacacttagcatgcagggtctaaatattaacagcaactgcagaagatatcactgcagatttgagtaaactttctgaaacaataatctacaaaaccagctgtgtttggtgatggctcttcataaaaacaaacagttgcaagaaatctaacaggattccaagctacagttcttagcttatagatttcaaacactggagagaaatgcataacatcccagctttttattctccaaagtgaagattttgaaagcaaataggattactatctagtatggtcatcataacattttttaaaaagacattattattctggaataggaagtatatgatctccttacaatgaacaattccatgtagaaaaagatagaatatctgcaaagcacttttgaggtaggttaaggtcctgggaaacagattcctcatgcatttagcttgaagaaaggtttaaaaggaattctttagggatcaacacctgcagaaggaaagggaaatagaggaggaagcaggtgagctgaaggagaagtcccaatggtagcttgtggggaataatgaagatggggtgccttagcgcattctggcagttgtaaaaaatatcataaacaacagaaatttatttatgatagttctggagactgggaagcccatcaaggtaccatcagatttgatgtctggtgagggcccacttctggttcacagatgatggcttctgtctgtcctcacacagtggagggactagcaagctccctggggcctcttttgtataggcactaatcccatccatgagggtggaaccatcacaacttaatcacctcccaaaggccccactttgagggttaggatttcaacatagaaatgttgggggtacacaaacattgagaccatagcatggaatgtcctgagtgagggtgagaagggaggggcctttttaccctccagtgatcagtcactggaagcaggccacctcatgaaggaggtatgcctttgggagagggttgtctatgggcagcaccacagcaagtagggtgataagcccttagctcctaaaggaggacctgagcagtgcattacagagtccatgcgacacttctgttccaggctagataaaatatttttaagctctggctgtaaggacagtcacctttaagcttttaatcttagacaaccatcataatacaagggctatttgagacacaatggtaagacattaaaaggtcaaagcatataatgctcttactgtccatcagataacatctccaggaaaatcagtcctgctgctctttgataccaaatggcttcttaggtatcagatctgctggcttgttctgaaaaaaggtagagtgaactcatttttctctactccttccctctaaataccctggaagttattcaacgggaagtgataaagaactctaaaacctggaaaaaaaaggagatagaaactgactaggggccttagcacttgagggacaacaacctggtgagttccgtggggtttcctttttatttccaatataccctatgccgggttccagagacggctgcaaccccaaaacagcaacagggagagcctgctccctctggtcaaatgaccagtaaagaagtccagtagagacctagtggggaagccccagccccagcccctactctaccactagggcagcgatgggcagtgaggccctaggccatcccaaccatatatctgacaaagaattactatctacagtatataaataattctcaaagctcaacagaaaaaaaaaacaataaacagttagaaaatgggcagaaaatatgaagagacagctcaccaaagagcatatacaggtagtaagcacacaaaaaaatattcgacatcattagccataagagaaatgcaatttaaaaccacaaaaatattgttacatatctatcagaatggctaaaataaaaaagcagtgataacatcaaatgctggtgaggatgcagagacactagatcactcagacattgctgatgggaatgtaaaatggtacagctattctagaaaatagttcagctgttcattttaaaacaaaaaataaatttgctatattacccagaagtggcactctcgggcacttgtcacagagaaacgaaaactcatattcacacagaaatttaaacatgaatgttcgtagcagctttatttgtaatacccaagaaatgaaaattatccaaatatccttcaatggataatggtcaaacaaactgtgatataacataacacggaatatttcttagcaatacaaaggaatgaactattgatacacacctggatgaatatcaaggaaattatgctaagtaaaaattaaagccaatctcaagaagatacatactatatgattactttaatatagcattcatgaaatatgataatcatagagatcaagaatagagtagtggtggctagttgttcagaatggggtagggaataggtgttgactctacaggggtagcatgagggagtctctgatgatgggacagtgaagtatcttgatagtggttgtggtttcatgaagctacacttatgataaaattgcgtagagctacacatgcacacatatacacacacaaatgagtacctgcataactggtcaatctaaataagctctatggatatgcattgtactaatgccaatttcttggtttttatattgtcctctagttaggcaagatattaacattggggaaaactggaaaaagggtacacaggccctccctctacatttctttgtttgtttctgtgtatctactgttatttcaaattttaaaatttactttaattgacaaataatacttgtatatatttagggggtgcaatgtgatgttttgatatatgcatacaatgtagaatgattaaatcaaggtaattaacatatctatcatctcataatttatttgtggtgagacatttgaaatttatactcagcaattttaaaatatgtgatacatttttatttactatagtcacaatgctgtgcaatagatctcaaaaacttattcctcctgactaactgcaaatttgtaccctggtttttgcttttatttttgagacaaggtcttgctctgtcacacaagctggagtgcagtggcccaagcacagtttactgcagcccaatctcctgggttcaagcagttctcccacctcagcctcccgagtagctgggactacacgcatgtgccaacatgccaggccagtcttttactttttgtagagacaggttctcactatgttgccctagctggtttcaaactcctgggctcaagtgatcctcccacctcggcctcccaaagtgctgtgagccacaggcatgagccacaggcattagccactgcacctggccactttataccctttgatcaacatctccccattccctctccctatcccccagcctctagtgaccaccattccactcactacttctatgacaaaaattaaagtttgtttcttttttttttaattaggcccgttgattgctcagggtaagaaatcgtaataaaattctaggtatttcttcctttgcaatgtgccagcatctgcatctatcactggaaagtggattgcaaacccatctcagatgcccacacctccattaacctctcctactcccggcccaatttcctgctccataccccttctgatagttgcttgcctggaatcccttcaatggcttagcaaactctatggcagttcctgggttgcacttcaacactttcttgaccctggcccacctctgttgtaatccctttctcaaggtctggtgcaattaagaatgctgctgaaagggtttttgttgtagttcgtgcctatcaaacacagactattctgattacttgtggcattttgcagtgatataaaattaaaactaaagcacaggagaagaatcttaggtttttatataaataatttattgtctataaattctcccaagaggaatctatgtcagtctacagaaagtgtctctccattgagacccataccatttgcctgtaaattcagcacactgatagccatttgcaatctgcaaaagaaaagccatctatctaaaggggcacgccacactgttattcctttgtaatattaagaaatttatcctaatttaaaagataactgaattcttattcttttacaaattagactttaaaacacagccactgaattgaccaagcactaccaagcttttatcctacttttatttaaatgtactgaaacattagtgatgaaagctttcatttaaagaattctgatgattctaatattcacttataatgtccatttagctaccacattgtgtttatgccccttaaaagctgaagctatgactgctctagtactgagttctccagtgcttatcattaattaaaaggtaaaacacgattaccagggtatctgcaatcaagctttcaatgtaagaaatatcaatatccagtacttgagaacattttggaaccaattttaataggtaaaaaagtccaaagagaagaaaaaatgttctttattatttcaaattaaaaccagatcagtatatcttactgaaaagttgcaattgcccatgccttccaggcatctgcctagtttttctcttatagcagatgctaaagaagagaaatctggcatgtccatttctgtaatatttacagatataacacatcagcaatacatcagtttggttttttatggaagctaacctcaagaagcaaaacatgctctgtgagtgtacttgtgtacttacttcagatcatccttatgcttgggggtgggcagacagattattaaataatgactgtactgagtgtctactaagcacagtggtgtacttgtgttgagggcaccgagacgaatagaagaatccctaccctaaaggagtgcaaaatctagtatcggagccacatgaatattgtgcaagtgaaagaaggtgagcacagattatgtccatggtgaaacaaaagttctgaatatctgttgagactgataaaaatagatcctgctaatgttaatggcaaaaatggcctgagtgtctttagctccccaatcaactctaccagtatccacccaagccaccccaaataaagtgtttgcccagtgtacatatgcagtttcaaaaaagttgcccggtttctcctcttctgtattggtaggaattgagcaggacacagatggcccactgaaattagaataatttgaggaaggtttaataaagggactatttataaaactttgggtagtatgtaggaaaaccataagggacattcaacactctggaactgttatcatcacacgacataaagggagaaggggaaggagcactgaccagaacttggaaagagaaagtctggtggagaggtcaacctcgagaagagctatctgctttgatagaggaacatagccagctcaaagggaccccacagggagtgatccaaggcaactaataccttgacctcactctccttccattttccagtctcctgcttgggtccccccattggccagaaggcaaaaaaacccactgatgaagcatacaggtcagcaggtggaaaaggatagcatccctgattcctggtattaagaaaatcaatcagccgccaaccgcagagaactgctgtgaaaattaaatgatgtaaagcacattatgcactcaaacatacctcaaacatagtaagtaaatgagaaatgtaagttgttaaatatataatatgggatatttttcattatacaattcaatatagcaattatctatgcctcccaccattttctccccacatgagaggtacagcagagagggagaagaaccaatgtttcctgggtggctagtatgattgcagcagagtgctaagcatttgctatatatcccatcttatttcattctccctagaaagaatgtgataggaattattaagctcttaggaaaggtgagtaaatgaagctcagatatgttgcctataattattgcttataattaggatctcagatctgtcaaattcctaagctaatgacttctccattattttatgtagatgggctacctgtccatattagataattttatttttatcacgttgaggggaattagagaaaaacttgctaaaagctaagcatctaacttagggcttgccacagaagagatagtcagtaactgctatatatgatgatgaggaggagcaggatgataatgattgtgatggtgatggtgatggtactggtgatggtgatggtgatggtgacaatgataattatggcagcggtgacaaatgatggtggtaatagtgatgataagaaccaccctactttaacctaggagcaaagaacttctgcaacagacacgaagaattccttaaataaggtttcagtatatagttgaagtagtggaactgataaatatttgttaatcctggtccctcaatccaagaagaagctttttcagagcaggctgtgtggtgcatggctgggccactatgaatttcggtttccctgtgtgtgaaacgcaataattatatatgtggtgcctagagctgatgtgaagaatgaaaggaatgcatttagaacacttggaacagcctggagcacagcgaacactaggtcaagatagccacttactgtcggggaggttagttccaacatggctgggctctcagcaagtcttcttttgaggaaaggacccagaagtggaaatggcccctctccttactagctgtgtcctcacccactccactcatctacacagtttagaatctgagggtgaaagaaggaagagcaggcaagggaaggcagcagtggaaaacagctcttgggtggtaagtagggagcaggaagagcagttaccaccatgcttaaaacaaggtttttaaaaaaaaaaaattgcctgaagtcacatttgaaaataaagagcttggtaaacatgctgatggcaaagagaacttgtaaaacagtttcacttgaaaaaggccaaggttaatggtataatttcaattttgaaccttcttttaatatggattagtgctctcaaatatgggatttgacattaagatgccaaaagaagactcagaaggtaacctcaagcagtattttttaaggaaatttcttccttttatcatttgaacgcagctgaacaaaaacgttattaaaaattattctgtcataaaaacagcaacatcaatgaccataacaaatgctaaaaagcaaaattatccatgaaattaaaaatatttcacgaatccaaggtgagaaatattttagggatgacacttggcacttgagatttatgtaatgagacattaccaacttttatgtataaaatttcctttctgaaaaaaaagtatgaaaaatcaaaagaaggcaccaaaaaagtcccccactgatttggaaaacatattcttttttttttttttttacaattaactgcatttggagaactgcatcacacttttaaataaaatatacataacacattttctctttatagaaaaacctttacaaacccttaagtttgctgaattactgctgaaaaagtatttttgaaataaaatatacagaatgaataaagcatctttactccattcttcggaaattatctagatacaaatatatacatggctaagttcaaaaacttacatagtagaaagtttaataatttgatctataatattaagctgttgatactttcgattggaaagaaggaggggaaatagtgaaagaaaaattaaccacagaatatattctttgcagtttgagatataaaatgttttatcatttacattaatgtgcataacattttaatattaattgttgcctctttcatcttgctgtcttattttttaaaagcttatcatagaaaagtctctatatgaaattgttcatccaaacagataaaaagttggaattataactgggccaatgaaatgttgttgttttgtattttattgctttgcttcttctttagtaatcatctttgcagtctgtctaaacaattctctgtgcactgacatttgcaataatgtgtttacatcacaaagttagaccctgtcattcgatggaacaagaggctgtattttgtagcccccagacactctgcataacttactccctctttggcctgagagtgtaatcgttttttcatctgccatgtttaattacctttacaggcattaacaacagtttactagaaatcgatggaggagcaataaattcattaggttcagtggaggtaagaagtttcatattctttttctcaggtgaatacctatttgagaactactaacttcatcttccataaacctaaaaaatataatatatgattttcatctgtctaccagttcttaatctcctaccaaagatggagtcacaacacaaaatcaggagtcaatagttacaatgctttctcactctgacacaaaattgtgtaacttgaaggaaacgtgggttcccttatgcatgcaaatgccctatgcgactacagaatgtgttccctacacttcagaagctgttgatgttccactcagatctctgtaggatcccttttaccagtttggtgtcccattcctccctacaggtgttgctgcccatcttctccaaagaattgcccttgagtgaccagagcaacacccagaggttctggggagatatatcactaaattcggcccccacccagggtccatagctaaagactgaatggtgggaagggaaggtacaaaagtctacactcctgtctcaaggcagaactgaccctgtagtatgtttcatgctcccaagactccccatgtgatcaggttaatttcacctgaaaccacaaccttggtagcttcttccacttccttatactaattccctcactcccttcctggtttctcccaagagccctctcttactaatcacctgcacacccatctccagttctagggaattcaaccaaagaccctgtagaagcaaacattacagaacagacaggcatacaaatggttttccagtttttgcaggtaatcaatatctcagccattttaaaaggtactgtccacagtgttttataagcacaagttggggatggaggggaatcacatgcctgttatgtaattgtgtgaaaagaagttcctaagatctacaaagtcacatcatttgcagaagtcactaactgattcctgctccagggaaggctgcagttggcaagggctgcccttcttggcaggtgtcaggcagggctctgcactacaattctccctgcattgggagaacaaaaggagtctggggctaggaagaaaaaaaaaaatgacaagcgaagcattaaactacaaacagctctttgaagcctccctgatagaggtggttgtgtttgtgcaacagttattgggttgagtctaataatgaaaggacagatcaccacttactctgtgatgtcagtaatgaaagctatcaaaactaagcctgagtgggcctgactgtcaccctgtaaatctaacgtggacagcttaatgagggagggacattatcttttctcacactccaattttactcacataagaaatgtggcccacattggcaattaacttgagagattaattaaatccaataacaagttcagttccctccatagtgcattctgatatcatgtgaaggcaccaacatgctatgggcacttagcacatgttaaaaaataatggaactaatttgggctttttgtgtgtgtgtgtgtgcggaaaactggcagctaaccgcctcagtaaattaattccacaaactgatacagctactcgatagttcacacagtcttatttccaaactctgctttattatcctgaaactcccaagaaacattgcccaataattgtgtttcttccctcagcaattttactcaccagtagtatttaacatattttattgggccctctgaagaataaggaggcagccattcagacaaaacataaactctgccccagcttaagaagcaatagactgggtcccattgtgtctctttcaaaacaacggctgacactgacaaggaacaggaagagcagcaggggtgcaggcatgagcttcacttagcgtcagaaggccacgtgatatatgttctggttctctttcttttgggttccctaattcgtccttagttcctgtttttgtgttttcttctctgaaacggtaaagtgctttcctccactaccatatatgaaatttgatcttaagaaataggagtcttcaaatttgaccaattggccaaatggttattaaactgatgccttagtgaaagtcaatgaaattgttttttaactggttgctgtaaaatcatattcctataatacagatcaaattcatatactagagttattatatagatactacataataataatgcctactcctgccccactgctcccaaatcaacctactcaaagaagtgcttcctaacaatctcactaccaaggactccttttattatgatttgagaatggagtacatgtttgaaaatatttcatctatccaagattaacgattaattcatttcctttttggtattattaagaaaaatacatatcctgtctgatggaacttctaataaataaataatgaaattacaacatgaaggtaacctaatctttgacaaaaatgggaaatataatatttgggtagcctttcatagttactgtggttacaaataccctttaggaaataacgaaaagagcttgaaggtttcttttctattttggagagaattctatgacaaggtgatattttagacctaccctaatagtcactagtgcagaagatttacattaacaatctttcatacagccagaagtttcatctacctaagtggcaccttgaaactagaaagagatggtaaataacaacaagcctcaatgttctaagaataatcacatcacctgaagcatggtatctctgcgcatatcttcaattattaccaaaaatgtctatgctataaatatacttgatgacaaagcattcctacacttgattaccaaaaaaaaaaaaagtaaatggtaaacaactgattgaatttattggatctggggtgatcttatatttgtatcaaactgtaaatacatttaactcaactgatccaatattagcccattagtccatattttccacttagggtattattgcagacctactgataatcataatggctaacaatattaagctcttacaaaatgctttacatgcattcattcatttatgtgactcaacaatcccatgtaataagtactattaccattgtcattttacagatgacaaaactaatgtttagaaaggttaagtaacatgcacagccacacagcatctgggtttatctgctgcttggtaaatctggactaaacaaccaacagggatcaggcttgatattctgttccacctgatggccaaggaagatactgtgcaaatgcctgcacatttgtccttagactacaagctttctttcagtcctgtcagcattgacactgccaatattttaagaaatgtatttaaagtcccttctgatatttcttatatcaccagctaaactgcacacaaaataagttaattggttctaaggtttacctaaatatttctcattgtagcagaattgtggaaggagaagtagataatatcaagagttgactgttccatgttttatagaaagtaagagtcagaaaaaatataacctaaataattccattgaactctcagtatatgtaggagtaatggcataatgatatattgttgttataattataggtaaaagataaattcttggaaaataattttaattcacattctctaacatgagaaatttctcttcacttaaggtaaacttcgaatgtttcctttctttccacaaggtggaaatcttgaagtaatgggctactgaaaaaccagagaaattatatgcactgacttacttattcattcttaattttagattataaaagttttcttgtgtagcttagagaattttccaaatcctttataactgtggttgtggaattccacaatgttgaacctgaatagattcctatttatgacaagttacaaatttcattgtagaaacgtaggtgcaaaagacatagattccaaagatttaccactttcagtatcaaataatttacctttcatttttagcttgctctcacataaaaattgatccaaaatgctgttttaggaagaaaccagccctcataaattcttgatgaatccagatcaccaatatgaatatcagttattgaaatcctcagaacatatatgaaggggattaacactaatcatcaacacactaaatggccctaacttaggctgttacgtaccttcattcttctgctttatacagtctataactgtataaagtcttccaactggagttcatggaatcagatattcttaaaagaatacatttcaagatcctcaacttttttcctaaaattgatatgtctgaaaatgtatctgcagtaagggtatcatggggatgacaatttctgtttaaagatctcgccttttcatctgcaaacaattgtcaaagaatacattgctcctgagaaaaaagtcccatgagagcaaagcaaaatgggaatctgtaaaaaatacaatggcgatggtgtcttatttctctcaggagcagactcactgcaaacctcctcaccatatcagccaatctatttcagactgagaactcagaagtgaaatgacaggcatgggaaggaccacaaggaagtttaattgaatgtgaaaacccaagttgaaagaaagtaggcctgacctagctgattgattcagcaaataagtttttcaaaataaactataaagtggacatttttcataaagctaatgagttaaatctgcagttccaaggcttggaggaaatacactactcaaagaatgtactaagcaagagaatcttgtccaaaaattaaaaatcatatttgcagaggtatactgaaatttggaatatttcagttttcccacctctgagtctatcagattcaatatggcacctctaagagaaagaggaataggtataattaatgggcatttgagaagctttggtaagcctttggtgtacttcccaggaaaaagagaaattgaatatcttgagtgactgagcaacaaattctttttcaagacagtttttctctcaataaaattgaagtagaactaattgagttgtcagaggatgaatcataaaaaaaaatttgatgagaaattactatatgatttttggcataaaactggcaagaagttttaaaaaattcaatgacataaaaatacctccaatctcatctgcttatgtatgtgagaaagatttctcaatgcttatatctagaaaactgaaaaattgggattgtgctaaatcctgttttgttttgaaacaaataatatttgacttgatataggaatgaattaaaaaatcaaaaaaagccctgacaatctcattattaggtgaggtttcaataattttaacttttatatttaataattgttaatatataaaaaatataagaaatacatattttttgttttgatcaatcttgtgctaataatagtgataaaagctcaatccagatgtaatttttgaaatgtagaggattataaattcaaaatttttttaaaaaatttaatgttctgagactatatgatgatgcataaaatatttcaagcatattacattgataaaattctgtgagacaaatgaatgaaatatgacttatagagaaaggaatggtgcacaattttcaatgaataaagaatttgtttttatattgttaaattgacaatagtgagactcaactcattatagtatttagattccaaacggatatacttaaaaaatatttaacaatttttaaatgtcaataataagccagaaattatattctttgcaactctttaaacttataacaaattggaagcctatagtttttccagaagtctttcaaggttcagggagcaaaaaaagaaagaagaaaaaaaggagctttctgctttgtttctcctgccttgttattatttctggaattagaagatatgctttcctggccccactttcagatttgctctttgatccactctccccttagaaattggatttctgaatagctaaggtctccagatcactgaattgtggatatgataaactttccaaacaaatatgattctaattatttgctttaccctaagactcattacagcgttctttcaaataacaatcttctccagtgcttttgaaatatggttctataattataaaaattcaccttgcattctatttacaggcttttcattttatttaggtccaaaatacaaatgcattgctttgattctgtagcagatttttgagagtaatccctttttaagtgtctttacaaatatgttatctagtccaacaaggcaaaaaaggaaaatagaaaagaagggagagagaaaaaagaggaggtgatgaaatgccatcatgatatcagagaaggaggtggataatttaaagcagcaaggccctttcaaatagaagatggctaaattttatcactaattcacaataggattagaacatgaattaaatttcatttgaaaacaaagatacctattgctttatatagtccctgcctcaacagcaataccagcctgatttctttcacagttttctttctgagacaagaaataccctaataaaacaaagggaaaaatatatttcccagtgtctaatgatctttataagtcctttgacctttccatggacctcagttttcttatctgtaaaataagaaagttgatttaaaccagttatttgaggaggggcaagagacggggcaaggagggcagatgagaagaatcacaggaagggatgaatttttcgacagaatacccacactctgcatgactttccagattcctactcaagctgcaccactatccctatggatgctgagaactccagctgtgggaatttgtgttctctccttggaagaggacaaatggccggaaacaccatgcataactttaaagatcccttccagcaatgagataccatgattcttcggctatgactagaaaacatattgttactcatgtatttcttctctcctttcctttgtctctggcaagcatcactatttgctccttgctgcctagaacagtatgaggtatatatgcctggggtgtgaaaggagagatggagggagggacatatttacagcagctatgatgctcaagagctatattaatctgtagctctgtattttcatgacttcacaactccctaagcttaaaaatatatatacgtacatccggctgggcgcagtggctcatgcctgcaatcccagcactttgggaggccgagacgggcagatcatgaggtcaggagattgagaccatcctggctaacatggagaaaccccgtctctactaaaaatacaaaaaaattagccaggcgtggtggtgggcacctgtagtcccagctacttgggaggctgaggcatgagaatggcgtgaacccaggaggcggagcttgcagtgagccaagatcgcaccactgcactccagcctgggtgacagagcgagactctgcctcaaaaaaaaaaaaaaaaaaaaaaaaaaaaatatatatatatatatatgtatacacatccttatatatgtatatatatgtatatatatgcatgtatatatgtgtatatctatacatacatccatatacatatatatatgtgtacacacacatccatatatatgacattttaaaagatcctcttttctctcatcttgaagtgtgttaaaaggtatgcgtaaaaaggagctacaaaacaatgaggttactagataaggtacttttcctgaatcaaagaagctcctagacaaaatggggcctgacttggtggtcagctgtcagagtgaaacttaatttaacagtaacaatagacaaagtatgtcagactaagtgcttcatcgacaatctgaacaattttcaataaaatggccttgatgtcagttagggcagacaaccccaggtagagaaagactactcgggaaaaaaaattaagaaaaccttctgcagattcgaagggggatttttttttatccctctgaccagcctctctgtatgtaactttcagtggttcttgccttcaagaggttttcccaccacagtgaggggctgagggagatgtttgtgtccctggatctagtgacttgttttcatggctctgaagcccacagtcactcccatttagaaaatattctatatccttttggattacgcttgatctctttttatctaattaattacatctcaggaaccaagaagtaattacattaagaacttggaggcatgccttcaggaatgtcactatggctttctgtttgtttgttttaaagcaaatcagcactctggaacttggttcagattagcaattttatgcattcagctggatacaatgcaactcctggttattagaataagaaataaggtgaagaacatgaaggaatgtggttcaatctctctctctctttcccttcctttctattccactttagtatagcaattacaggcctctgagtttgggtttagcatcgtgatggtaggcaggtatttacttttttacttgagggtcaagtgggatgaaaagcaaggaaaaaaagccaggacagtccaaggactggcacatgtcaaagcacagaggaacaatacagatcttcagaggaactttttttcttttacttcctttttaaaaaactttgtcagtgtagtaagtggtgaagactatttgctaaagtgttcaacaacataactgctctgagatttctccttcactaggctactctcttaggcctctgtgaacatctgtgccatgtgtacaggccacttcctaacaggcccaaagaggatgtgttttcataaaagttgtaaacacatttaagaaattatctgaagctcataagccacctgatttcctaggcaaggcctctcatcacattaaccatattttacgtaatgagcagatgggcagaataaaaccagagggaggagaagtggaggaaaaggacagtaatgagtgatgaaatggaaatcacgtgattaatggaacatagattttaaaaagtaatgaagagtttatccctagggtagaaaacagggaacaacaaaaataagtaccacgttgtcaaaacagtaaaataagagagtagaacaaagaaacagagcaagacaaagaaatgctggttttaggataggccttattttaaagacacaggggattttggaacttaccattttgcagctatttgtttaaacaaaaataaatttatgttgcctggtgtcctaaaagttacttatgacaacggtcattaatagataagagcctgcagctatccgggtacaccaacaccagcctttgtgtttgttcaacatttctttctgtgggaaatgtaatttgtagcataagagttcacaagaaccctcagctccatggctccatcactaatgaaacaagtcctggattttcatagcaaccatcaagcataaatttggctccccagagcatgtgaactttatgtgtgaattacttatgtgtgtgcacaaactaaaggcaaattcatgtgaagcatacaggcaatttacaaactctatctgttctgaaagtctgcacagtaacaggaacacagacagaaataacaaaatgggtgtatatgtccaggtttctccacaaaagatgacctgtatacttgcaagggcaaaatatcacaaaaacaaccctaatgcaagagtagtaatgagagcaactaaaaataaaatacagaggctgggcctggtggctcacacctgtaatcccagcactttgggaggccgaggtgagcagatcgcctgaggtcaggagttcaagaccagcctggccaaaatggtgaaacaccgtctctaacaaaaacacacaaaaaattagcaaggtatgctggcaggtgcctgtaatcccagctacttgggaagctaaagcaggagaatcacttgaacctaagaagtggaggtgcagcaagctgagattgcgccactgcactccagcctgggcgacaagagtggaacttcgtctcaaaataaacaaataatagaaataaaatagaagataatgactgtgtgtgtgcactttcattattttgaatgttagtgctcaaaggaaagcaaatttagttagaaaacaagctgatagaaaaacagtttcagagattcttaagagaacttcaggacacatttaagaaccatgaaggctggtaacacaagttttgaaaaaattaggccttgtttcaggacaattttgtttttcccatttctaggaatccgatgtatcattcacacaatttgtattcccattagccttgattagggacatatctgtgctcacattagactccctgaatacagggaccaaaattcattcaatgttgccacttgggtgtctaatatgctgcaaaaatctctaggaaagatataaatgaacaaataaatgatatgctgagataacattgtgaagaatttggcaatgaggaggggcattatcttcttccataaagacattgatttattctttaatatcactcagaatcacaagaaataatcagctgatacagaaatggaacagctgtctcacacagaagtggctaaagagaaaaaatttccacaaaatactggaaaagatggtaacaaatcaaatttcaaagttgggcagccctaccaaaaagagaaaaagaagatacgagaggagtcaatagtgacagcactactgaaattcaaaaataggacttgaggtctaagacaaactgataaaaattaaaataatggcaattactcattgaacatttactatgtgccaggtactatatatgcatgatctaatttaatctttataataatccatttaggtaagtacttctatcatccttattatacagatagtcaaacacgatgataaaaagtaagtaactttctcaaagtcacccacctagtaagtgatggaaccagtactttaaaacatgtctgtctgactccttaatcaatgcaacactaagatacatgtgactaatcaaggaaaaagaaagagttttgatttttgtttctttttccaatttagaaaagatgaaggagaattctagaaccttcacttctgagcaaatagcaaaccaacttgctgttgggaatttaagtgtcatgcacattaccatttacattagtttgaaaaagaagtaaatgtccaacttttagtttctctaaacagttattctagttttcctaagtttgaccccaaaagggatttgactgtgaaacaaaactctctgtagttctcagatatggttagacagtcagatgcccacaagtaacagcctgtgcagaacatcaacacagtatatcaccccagcaaggaaagttcaaaggaaagatttctaaggctactgagataaaatggaatagaatctttccagtatatttctctttgctatcaaaccaaattagaaaagactaatttatactaaattataaatcacagcatttctaatttaatcactgtctgtttttttaatttttgttcttgttttagttttgcatttctttcacccatgggatagatacacattctcacttaagcccctgttgaaactatttccattgtcccctagatcctcattctactttaatgtgtctatcttcagtaaaacacaactgataaacctgaaagataataaactggacagactagcactgagattctaaatgagataaaccggcagtcatcctgacagtaatggaataaataaagcatgaataattacattaaaagacaatttctgatttaaactttgcttttcctgtttttacacagtagaaaaaattaggctgtctggccttccttaggagaaatctttcttagaaggaatgtgtgcttatttttaaatctatcataacaactgatatatcagcaacaatgtacccatatttacctcatatttatatgtatgtcttctctattataagcaatatgttatgaaatatattagagattagttcaaagagttgagattggttataaagaattatattagtcgggtttaaaacgtatttggaaagttcccagtataaaatagtttagttgtgttattttcctcttgatgtcttgaatgttgcaaggtactattctatggctggtaggggcatgcaacaggtgggagtaaggaaggaaacagcaagccaataataagttttgaaaataagcccaatcattaagtatatgttgagtctcttcattaccgtgaataggaagtctaatagattgccatatgcagaaacagagaaaatgctgttttagtggcacctaatgaggttccaaaaatgcagtaacttgtagattctttcacattcatactctgtgtaatataacgctatatagcacacttagctctctttataccttgatattttaatgcaaacacagattcttttctctatggctttaaacattacacaggaacaagctcccatgaacctctttcacattcctactcagagctctctgtgaaaagctgtcatttcttgttctattcaagtcagactacctagtctccaggcacaatggtaaaaggaatgtcaaggtaacatcttcatttattcatatgattttctctttttttttaattatactttaagttctgggatacatgtgtagaacgtgcgggtttgttacataggtatacacatgccatagtggtttgctgcacccaccaacctgtcatctacattaggtatttctcctaatgctatccctcccctagccccacaaaccctgacaggccctttgggtataacctagtaatgggacggctgggtcaagtggtatttcttgttctagatctttgaggaattgccacacagtcttccacaatggttgaactattttacactcccaccaacagtgtaagagctttcctacttctccacatcctctccagcacctgttgtttcatgactttttaatgatcgccattctaactggtgtgagatggtatctcattgtagttctgatttgcatttctctaatgaccagtgatgatgagtttttcttcatatttttgttggccacataaatgtcttcttttgagaagtgtttgttcatatccttcacccactttttatggggttgtttgtttttttcttgtaaatttttttaaggtctttgtagattctggatcttagcactttgtctgatggatagattgcaaagattttctcccattctgtaggttgcctgttcactttgatttcttttcaaggaagcactaaatatgaaaaggaaaaactggtataccatccactgcaaaaacataacaaattataaagaccatcaacactatgaaaaaactgcatcacctaatgggaaaaataagtagctagcatcataatgacaggatcaaattcacacataacaatattaaccttaaatgtaaacaggctaaatgccccaattgaaagatgcagactggcaaattggataaacagtcatgacccgtgggtgtgctgtatcggtgcgctatattcaggagacccatcttatgtgcaaagacacacaaaggctcaaaataaagggatggtagaatatttaccaagtaaatgtaaagcaaaaaaagcaggagttgcaatactagtctctgataaaacagacttttaaccaacaaagatcaaaaaagacaaagtagggcattacataatggtaaagggatcaatgcaacaagaagagctaactatcctaaatatatatgcacccaatacaggagaatccagattcatatagcaagttcttagagacctacaaagagacttagactaccacagaataatactgggagactttaacaccccactgtcaatattagatcaacgagagagaaaactaacaagaatattcaggacttgaactcagctctggaccaagcagacctaacagacatctacagaactctccaccccaaatcaacagaatatacattcttctcagcaccacatcgcacttattctaaaattgaccacataagtggaagtaaaacactcctcagcaaatgaaaaagaacagaaatcaggccgggcgcggtggctcacgcctgtaatcccagcactttgggaggccgaggcgggcggatcacgaggtcaggagatcgagaccatcccagctaaaacggtgaaaccccgtctctactaaaaatacaaaaaattagccgggcgtagcggcgggcgcctgtagtcccagctacttgggaggctgaggcaggagaatggcgtgaacccgggaggcggagcttgcagtgagccgagatcccgccactgcactccagcctgggcgacagagcgagactccgtctcaaaaaaaaaaaaaaaaaaaaaaagaacagaaatcataacaaactgtctctcagaccaaagtgcaatcaaattagaactcaggattaagaaactccctaaaaaccgcacaactacatggaaactgaacaatgggctcctgaatgactgctggttaaataatgaaattaaggcagaaataagtaagttttttgaaaccaataagaacaaagacacaatgtaccagaatctctgggacacagctaaagcagtatttagagggaaatgtatagcactaaatgctcacaagagaaagcaggaaagatctaaaatcgacaccctaacctcacaattaagagaactagaaaagcaagagcaaacaaattcaaaagctagcagaagacaagaaataactaagatcagggcaaatttgaaggagatagagacacgaaaaacccttaaaaaaatcaacgaatccagtagctgggtttttgaaaagattaacaaaatagatagactgctagccagactaataaagaagaaaagagagaagaatcaaatagacacaacaaaaaatgataaaggggatatcacaactgatcccacagaaataaaagcaccatcagagaatacataaacacctctacacaaataaactagaaaatatagaagaaatggataaattcctggacacatacaccctcccaagactaaaccaggaagaagtcgaatccctgaagagaccaataacaagttctgtaattgaggcagtaattaatagcctaccaaccaaacaaagcccaggaccagatggatccacagctgaattctaccagaggtaaaagaggagctggtaccattccttctgaaactattccaaacaataaatagaaaaagagggactcctccctgactcattttatgaggccagcatcatcctgataccaaaacctgacagagaaacaaaaaaagaaaatttcaggccaatatccctgatgaacatcaatgagaaaatcttcaataaaatactggcaaactgaatacagcagcacatcaaaaagcttatccaccacgatcaagttggcttaatccctgggatgcaaggatggttcaatatacacaaatcaataaacataatccctcacataaacagaaccaatgacaaaaaccacatgattaactcaatagatgcagaaaaggccttcaataaaattcaacactccttcatgctaaaaacgctcaataaactaggtattgatggaacagatctcaaaataataagagctatttatgacaaacctacagccaatatcccaccaaatgagcaaaagctggaagcattccctttgaaaaccagcacaagacaaggatgccctctcaccactgctattcaacatagtgttggaagttctggccagggcgatcaggcaagagaaagaaataaagcatattcaaataggaagagaggaagtcaaattgtctctgtttgcagatgaaatgagtgcatatctagaaaaccccatcgtctcagcccaaaatctccttaagctgataagcaacttcagcaaagtctcaggatacaaaatcaatgtgcaaaaatcacaagcattcctacacaccaataatagacaaacagagagccaaattatgagtgaactcccattcacaattgctacaaacagaataaaatacccaggaatacaacttacaagggatgtgaaggacctcttcaaggagaactacaaaccactgctcaaggaaataagagaggacacaaaaaaatggaaaagcattccatgctcatggataggaaaaatcaatattgtgaaaatggccatactgcccaaagtaatttatagattcaatgccatccccatcaagctaccattgactttattcagaattagaaaaaactacttcaaacttcaaatgaaaccaaaaaagagctcatatagtcaagataatcctaagcaaaaagaaggcatcacactacctgaggcatcccgctacctgatctcaaacgatactacaagattacagtaaccaaaacagcatgatactggtaccaaaacagatatatagaccaatgaaacagaacagaggcctgagaaataacaccagacatctacaaccatctgatctttgacaaacctgacaaaagcaagcaatggggaaaggagtccctatttaataaatggtgttgggaaaactggctagccaaatgcagaaaactgaaactggatcccttccttactccttatacaaaaattaactcaagatagattaaagacttaaacataagacctaaaaccataaaaaccctagaagaaaacctaggcaataccattcaggacataggcatgggcaaagacttcatgactaaaacaccaaaagcaatggcaacaaaagccaaaattgacaaatgggatctaattaaattattcatactattttcatgttggacagtattataaaagccaatcaaattggagaaataacatagtatattttacaaaatgtaaatttgtgatgcaagcagaagagcttctgctactcatgagagttatattcttgttacccaagaatataacttcgcatcttttcaaaacaacctacacagagtaactcttaaaaatctgctagtgagggggaaaaggagggagaaagcaaagcttcaaaggactttctaaagaaattataatactaagacttttatatgacattcaaccctgttttccccccttctcccccaacaaaataacctagccaaacaatagagaggcaacgtttaaatacaaactttcttccactcaacactagaaaactggtaagattaggtcttcaaagaggctgagctaagaattctcctaagctttaaatttcctgcaaaggctgagttttatttcttaagggaagagcttctgtttggcttttctttttctttttaagaaaaaaattctatataattataggtttattgttacatttgtatgtatgagcaaagtacaggcaaagaaagaaaaacattgtcaagaagctggttatgactaaatatataaagatggaatagtctaacaatgccagttgaataaatactgtaacaaaactgtaatttaaatgaagctaccaaaatatttcaaaagacaacgcattttatgattttaaagtttatcttcaaaatgaaatatgatcatagctattaacaatatgctgtaaaataaaatatgctaaacattgcttctgttagtaaccactagtttctcaggaaacattctttatagagcaactctgattaatgtacaagtgacagcttttttttttctgagcactaaccttacagtataccattgttttcaagacagtgtttataaaagctgtaaagatacgttttagacattaccttgtctatatctatgaactgtcagcaaaaaatatccctttttcaccttctctccactctccatttccagttagacattgtgttttcatccctatatagcttgcctaccttaaacagaaaaatgaccaacatattcttatgtgcaaaatctgaaaacatttctttcagaataatatgacctgttagacatccgaagatcaagacagggataaagatttattaggccaaaccacacaggacttatatgttatgggctgtaggacagagcgtattaaattatttccctgatcacacaactgaatgtaaaaggctaaacgtttcactgattgtggtcaaatatgattgttgctgcagtagagtaaaggccccaaaagtacccttagttaggtcagtgaccaaatgtcactctatatgattttgttcttcacgggcaatgtctccaaagtgctaaatgtgtgaaactccagcttgaaccaaggaatgaattttagtttgctcttaccctttgaatggataagcacattgaacatgaaaatcttctctcttccttatcaacaaggcactaacagaattcagatttacagatcagacacagaaatatggaaaatattcttaatgttagatcaaatacggaattatccaataaataaatattgagtttacaaaccatctaaactttgactctcctacttcccatctaccaaggaagggagaaaagtaagaaatggaagttaagctcaaattactcaggtactgtttgttaatatatctggtgactatcttatgtgagggaaaaactggaataataggaaaaggtttggtgattctacgtagcttttgtgactgtagttctagctcctaagttttactttccaaatagctaagggctgctgttctcaaaagagctaccctttctaaattcaggaaataacaatggaaagaaataattgttaaataaaagtatatgttgatgtttaccctattatatattattttcattttatatgttatatgcacaaaaatttattggtacatatttctaaatgttaaaatcttggttctctgggtgataggatcatacatcatttttatctttacatctatacttttgtgcattttctgctgttctgcaacaagcatgaaatgattttatgctcagggagaagaaaaaagccatctcccaccactacgcccacttcaagaagaagaatgaagagtaaaagaggagaaatatggtaaaggagtcagctttgtactctctgtctgctgttttttgcttcctctcatttctgctttccttagcagaagccaagagtgtttggggggcctaggtctgaggccagctccacctctgaccagtgtacctccaattctctccgagccttggtttcctcttctatagaacgacaataataatggtactcacaagaagtcaagaagaaacaggataatgcatgtaaagctgttaccatggcgcctggctcaaagagaatacccaccaacattgctgcactttttttcgccagccttacctgatcatagaaatcttaagatttataaaatactttaaagcaaacttgtccaacctgcagcccacaggctgcacacagctcaggacagcttagaatgcagcccaacacaaaatcctaaactctcttaaaacattatgagaccttttttttgcaatttttttttaagctcatcagttgccgttagtgtattttatgtgtggcccaagacaattcttccaatgtggcccagggaagccaaaagattggacgccgctgctaaagcttacaatgagctttaacaaacagtaatttaatttttaaactgatagtaaaaagcagagctagaattcaaacctcaccttcccacatcctagctctgataaccaaacaccacttttgagttggattgaaacagttgcctactggagctgcctccctgaggcttacctgcaattggtaaatttcagtaactttgcataccagctgttaaacacagacattattttaaattattatagaattatacaaattaaaatataaaagttacaattaaataaaaatattttaaataaataaatatatgaagctcgtcatgtccttatacttttttcttttttttgagatggagtctggctctgttgcccaggctacagtgcagtggcgcaatcttggctcacggcaacctctgcctcctgtgttcaagtgattctcctacctcagccttccaagtagctgggattacaggcgcctgccaccatacctggcaaatttttgtagttttagtagagacagggttttgccatgttggccaggctggtctcgaactcctgacctcaggtgatccacccacctcagcctcccaaagtgctgggattacaggcttgtgccagcgcacccggcccttatacttttattatctatactctttaagcttatttgcacctattgtatttgtagagtggaaacactacataatagagtgctacatgtatctcttcctaattcacttgcagtaaattcacattggtagcttgaaatcagccaaactggcaaatgccacaaatcaagactcaatatcatttcgttgacttgagagtgatggagaatatgcagattaacttaaagtgtgccatatctgtggctgttatattctgaataacacacacacacaaatggagaacccattcttccagtattataaactatcatacaatatgtatgacagaaagatgattattcatcagttgcaaacatagactggctatggatataagaatttggcaaaaatcaaccaaagcagtgtgtgagaatctactggctatccaggatttacaatcaagagtagtgattattttattcatatttataaattacatgttacatgtcctttatatcagtaaaattaataataaacacacatgcaagcatgcacattagggcatgcatgcacacacatacacatatttttccttgagagccagctgttaaacatttaccagcataccactaaattgaccattattttaaactaagaggaacctagaagctcttaagcagagccctaggctcatcttcaaatcactaaggttgggttataaatggttttagcttcaggtaaggctaccaaattagatcattgtatttaaatatactatgttggcaattcctatcctgcacaatgatgaagtaggctcatagcttcaagttccaccattattacagaaaaatttattctatggaaacgcaacttagggaaagtcaagatagctttctacaattcacaaaaactatggagacatacaaagaagtaagatatggctccttcctgcctccaagacagttgagcagggaggacaaacacataaacctataatataaaaggcacagcactgatagatacaacgtgctatgggatgacaagggagagatcccatgagtttacacttcaggtcctggttaatggcaccagtctcacctgcctcaaaagaagcaagggcaaggaggcaggttccagggagaaggagaaacctataaagtatggcataataggaagaaggattctagaatcaggcagcctgtgctcaaacccagactctttcactaactgtgtgaacacgtccaagttacttggcctctctaagcctctgcttcttaatctaaaaaaggagaatagtaactcctgacccagagcactgtagtgaggatcaaataagacaacatctgtgaaacacttaccccagtgccccataattcaaaagtgctcactcaatgaacattacctactactgtgatggttgttgatagccttgagagttgaaatggctgactttggggactaggagggtgcaggaactagacagagggattccaggcagaaggaagaaaataagcaccccccaccaacaaaaaaaaaaagaaaaaaaaaaacagagattacatacaggggcccacttagtagtcctgaggtagtagaatattcctggaggtctaggtcaggcacagctacagcaaataaagactgaggctagaccaaggctcttccagaatggttcaaatatacactcattcctcatgctcttctgagaaaaacgaaacaaaatcaggcttttaagatgataccctttttcttctgacaggtactgtaaattgtgtctctgatatattttgaagagcctataagggaatgataaatcaggcaatattacatatattcatcagtaccttaattgttgttaaatactaacaacacctaaaattgatctgtaccaagatttactgctctgacaaaaaaccacctggaaaagagcacatgataattaagaacgaccaagggtttgaagcaatctaacgcgtatgaacaagatttaaactcctccccgagggaataactaggtgatgtttattctgtagatgaacaatgtgattataacaatggaagattgatgagatttttttactgtgggaatctgatttagccggctagctcagataataggaggatgcaaaactaagccatccagtaccacttaaaaattctttgtgagggacacatcttcagtgacctgaaaaaaatggactgcaagtcaggcaggcatattaggcagctacaaactgtcatacaaaaaaacagcatttaccaaaaagtttctaaatgcaccacaactgagttcaaccaaattagagagaaaaggtaggaagagaattacattcttatcagaagcaaaggaatttttttttcttttggtggtcttttgggcctaccaactgttatttgagtctaacaggttattcttagtaatccctcttgtccaggaaaagaggaactgcttggtctattttaataaacacacaaactaaaagcaaggcaatattagtcttccagagccttgctatgaaaagtgtaaagagctatcacctaggagcttgttagaacctcaggctcttgggctccaccctagacctgaatcaaaatctacatttttgtttgtttgtttgtttgtttgagacagggactcactctgtggcccaggctggggtgcagtggtactatctcagctaactgcaacctttgcgtcccagactcaggtgatcctcctacctcagcctcccgattagctgggactacaggcatgtaccaccacgcctggctaatttttctatttttagtagagacagggtttcttcatgttgcctaggctggtcttgaactcctggcctcaagccatccacccacctcagcctcccaaattgctgggattacaggcgtgagccaccatgcctggccagaatctgcatttttaacaagaaccccaggtaattcctttaaagtattagaagcaatgctctaaagagacattcattcgttcattcaatacgtttgcgagatctgcagtgtcatttatggtatgtagccactagccaaatgtgactattaacatttcagttagttaaaattaaataaaattaaaattcaaggatttatttgcactaaccacatttaagttctcaattagcacatgtggctaatgtctgccatatacattttaatcatcacagaaacttctattggacacatcactgaacaaagaagacaaagatctttgtactcacaaagtttagattctagtggtgggaaagcagatacaataaacataagtgactcagttaaatggtatgttggacggacagttcaaggctaaggacaaaaattaaaaaacaaagcagccttagagggatcaggaggatggaaagacaggaattttaaatatggcaggtctggtagtttcaatgaaaaagttacattaaaggagaggcaggccgtgagctgcccgggatgggggcaggggggtagtttcaaagggtaaagcctgtgcaaaagccctagggcaggtctgtttccataacagcaagggtcccatgtggctgcaggagagtaaggggagaaggcaagtaaaatggtaggagaacagaggagtatggatcctgggtatggaaagggcttccttatccattgtcaaagatttgagcacttacatgaaacgaaataaggggtccttgcagtgttttgagcagacaggtaacatgcttcaacccgatctcaaaagttattctcgttcagcaaaaaatgactataagtaaaagttattattattttttaattcaaggtcatgttcagatgtagaaagatactatctgcagtggcaaaatgactttgtttacaagttttggtaaccatgagaagcttgttaatgatacacaaacaagttattaaaatttatcactgtaaaattcagatactttttcaaaatcctctatgaatatgcagagtcacaaggtcttacaggttaccacccagaaccagtagccatctttgctataaaacttttcagcaaatcctgaggaatgcaaaatcagagttgcccaattgcccaaaaggtggaactctgcttgagtgtctcaacctgaaaatttgttgattactttatagagagaaagagatgaaaatctgttaaatagtttcaattttttcttttttaccccaactcatgtaaattgaattcatctactctaacatcccagttaaatgtcaaagctttgggaatcaaggtagggatttttatttatttttcaaagttcagttcccagaaacaatgacacattttacccacaagtgagaatgttgttatcttgtaggtaatccagctactgttctatgaactgtaggtcactgtagcctgtctacaaaatgccatcatcagcttcaaggcctgtgttcactaagacagccacatggaagttatactgaacaggcaaccctaaaatgactgagcgccatcgcctgagatttattccctgaggaccaccaccaactgtgatccagccagaattctggcaggaaaataaagtaagttcaccttctgtaagttaaatcaaatgaacaataaatcaaggcatgttgggtcattgggaactaactgctcagatgctcatggccggtgagtgaatcaactggcatcattttaaagcatctgggcatagcatttttgagctatagaacataagaggagattttagcaaccaaattattaccaacgtcagtgattggagtccagaactggagctgctttgatagttcattcgtgtattccttcattcattcaacaaatatgtgttgaggaactcctacaggtaaataatattctgtctgctaaaaatacagaactttacatacagtaaacttgtccacatgaaacttaaagtttcagttttaacctcctcatggctccctcttggagccaggaaccttccagagctaggagacctcaagaggtctttcatggatgggaaggattcagagactgttttagagtgataaggaacataaggtgtactaccagaaggtgaatcttcacagggtaagaggtgtatgtaagcagtaagttttatattctctatcctgaagccagagcacctaagagcttctttcatttccctcatccacccacagaagtcacccctaagaactgaagcattcttcatcccacctcatttctggcacagcaaaaccagaaggagcagggaaaacacattcccagaggccagacatattaagatactggaagtaagcaaaggggctaatagacctaaacaatcagctttggggaaaagaagatcctctctgttgcaaacagagctaaaaggaacagcctagaacagagcctacaagccaaagacagtatattagccaggcttctccagagaagcagaaccaatgggataaatgtagatatacagaaagagatttattgtgagggattggcccatgccattatggaggctgagaagacccactatctgccatctgcaagctggaggcccaggaaagcaggaggtatagttccagcccaagcccaggggcctgtgaaccaggagagtcaatagtgtaagtccctttggatcaaaggcccaagatacaggagctctgatatctgaggacagaagaagatggatatacctgctcaaacagagacagtgaatttgccatttctgcacgttttgttctattcacgtcctcaagagattgggtgatgctcagtcgccttgatgagggtgacttttacttagtctgctgattcacatgctaatctcttccagaaacaccctcgcagacacacccaggaataatgagcatatctcttagcccagtcaagttgacacaaaattaaccatcacttgtgtcctgccacgtatttttgttaacaaagctttactggaacacagccagttatttgtttacatattgtctatggctgcttttgatataaattctactgtccaatatagtagccactggccacataaaatgtgccttatccaaattcagacatggtgtaagggtaaaatacacaccagacctcaaagactgagtaggaaaaaaactgtaaaatacctcatcaataattttttatattgattacagggaaaaaactaatatttttaatatttttggctaagtgaaatatattattagaattaatctcatctgtttctttttactccttgtaatgtggctactacaaaatgtaaaattacatatggggcttacatctgtggttcacagtatatttctattggacagcctggcacagaaggaaagactccagtatgtatacagaccctggagacaagttgaatagaaaaactctgttcttactctaccttccactttatgtctgtttttaatactccaaccccaggtctttcttttaataattatcctaaattaacaaacacacaaatctgaaattcttgcaggtcactattgctgaaaattcaacagaagaaaatctgtgtatatcagaatttcacacaaagatgggtcagtggctgggctgcatagtggatatttgctgcctaccaacattctttctactatagcaagactctaagcaaactccacaaaggagacactctgaagtttcatgatctacatagatgctcaactaaggtaccaagtcatttaatgaagaaataataatctcttcagcaaattgtgctggaacaactgaataaccacacatgccaagaataaagctggaccccttcctcacaccatatataaaaattaacccaaaatggagcaatgatctaaatataagtgctaaactgtaaaactctttgaagaaagcataggggtaaaatcattaccctcacatttggcaatgaattcttatatatgacaccaaaagcacaagcaacaaaagaaaaaatagataagtggtacctcctcaaaattagaaaccttggtacatcaaagacattatcaaaaaaatgaaaagacaatctacagagtgagagaacatatttgtaaatcatatatttgacaagggtctagtatccagaatatacagtataagaaattcttacaactcaacaacaataaaaacaaacaaacaaaaacaacaaaaaaaccaggtaatgggtagaggactttaacagacatttctccagaaaaaacatgcaaatagccaacaagcacctgaaaagatgctcatcattagtcattagggaaatgcaaatgaaaaccacaatgacatgctacttcacacctaataggatggctattattttctttaatggaaaataacaaatgttggtaaagatatagagaaactggaactctccaacaatgctggtgggaatatacagtgacttagccactgtggaaaatagttttgtagtttctcaaaaatttagatatggaattaccatgtaccccagaaatctcactggtaggtatatatccaaaaggattgaaaacaggttctaaaacaggtacctgtgcatacatgttcatagcagcactatacacaatagccaaaaggtggaaacagcccacttgtccatcaacacccatcaatgaatcaaaggataagcaaattgtaatatatccatacaatgcaatattattcagccctaagaaaggaataaacttctgatacatcttataacctgggtgaaccttgaaaacatgccaagtgaaagaaacaagacacaaaagatcatatattgtatcattccatttacataaaatatccagaataggtaaatccacatagatagaatacagattggtggctgacaagggtttggggaaatgaggagaagctgcattgaaatgaggagttttattttagaaggatggaaatgttttggaactggatagagatgatgattgcacggcactgtcagtgagttaaacgccactggattgctcactttaaaatggattttttgttatatgactcttatcttaataaatttttaaatcatatattttttgcatttcacatgtcacaattctgatcttttaaatgtaaaatacattttacattacttaactatttctagtcctcacttctcctccaaaaaaattacattacagttgacactagattttgttaaactacccaaaatttactttgcatatatccctcttgtgcacaagttagtcagaattagtttctgttgtttgcaatcacataactttaattgatatggtaccttagtatgtcagtcagggagcctgaggtctaattctaggtctgcatctaattagctggtaatctcgggagaaattatttaaattagcttggctttagctttctcatatgtaaactgaaaggattagactaaattattcctgagggtttaaaattccataaatgacataacatctccttttaaaatattatccaagaagaagtaattgtcagatagtgatgatgtgacattttttccagtaaaaagtaaatttggaaggtaggccctgcttttactctagttagtccctccacctcactcttctggctcctcagtaatgtttagcatgcatattccaatagataaaatccctcaaaggtgttcagtttcatttctctgatgtgaaagggcaaatcaaatgaaatggttagagacaatgctcaaaatttaaagctgtatctaagtttcccaactcgattaggccattcttacattgctatgaagaactacctgagactgggtaatttataaagaggtttaattggctcacagttctggaggctgtacgagcatggcactggcatctgctcggcttctggggaggcctcagggagctttgactcatggcagaaggcgaaatagtagcaggcacttcacatggggaaagcaggggcagaacagagtgtggtaggttccacacacctttgaacagccagatctccaaaactcactcactattgtggggatagcaccaagggactgatgctaagctattcatgagggatcagccccccctgatctaatcaccccctaccaggccccacctccaacactggggattaccattcaacatgagatttgaggagacaaaacatccaaactatatcactaaccgagtgttcagattgtagtatagaaactatccaagggcacttcaaatgttcctcttatcattgaaggggctgaacaataatttgacccaaaagcttggcattctgcttttactagactaggctggtattataatgacctttccttttgaaaaacaatagtggtttctatctgttgtcttgtaaagatgagttttatattattaagaataataaaagattaaaaaatgttttaagcatttcatccagaagctacaaagcattatgttggggaagtttgaggagtttattaggtcaatctaggctctaatatactcagattattgatttaaaccggtgagcacaataaatcacactggtcatggaggtggcaccagctgaaagtgagaacacagatcaattacccgagagttctgggctttctcactgacttgccattaaaaaattaccttcgtggtttcacctcaaagatcagtctgctttgttttttttttttgtttgtttgtttttttgagatggagtctcgctctttcgcctaggccggagtgcagtggcactatctccgctcactgcaagctccgcctcccgagttcacgccactctactgcctcagcctctcgagtacttgggactacaggcacccgccactgcacccggctaattttttgtatttttagtagagacagggtttcaccgtgttagccaggatggtctcgatctcctgacctcgtgatccatccgtctcggtctcccaaagtgctcggattacaggcgtgagccaccgtgcccggcccagtctgctttttttatgcaaactttgaccgcttagaaaagcgctacaagactggagtggttatgcttggctctggtgtcagagtgcttggattctagctaaaatccacccagggagtgtcgcttaaccttattttctctccgtttcctcaactgtaaagcaagaaaaataatagtgtttcccaaagcctggcacatataccactgggagtataccagatgatattagatggtacatgagtggttttcttcttctgttaacaattatgtgtttaattcccagcatattaaaatatatataattagcacatcaaatgctatggtttgaatgtgtcacccaaagtccatgtgttggaaacttaattcccagtgcaacagaggtgggtccttcaaggggcaattaggtcacgagggctctggcctcatgaatgaattaattatgttatcagagaagtgggttagttatcaccagaatggattcctgataaaacgaatgagttaggcctttttccctcactcatgtgtgcatgtcttttatccttctgccattggatgactcatcaagtaggcctttgccaaatgcagacccttgatcttagatgtcccagcctctaggaccatgagacaaatacatttctattcattataagttacccagtctcacatattctattatagcagcacaaaagggactaaaacaccacactaaaattattgcgtaggacaaatctaagtcaaggaaaagaagtgcgctccaaacagtcctagtcagtcagggaaagttctttacagaaaaagtctagttgacaaatggaaaataattaacagaattagaaatcatgatttttgcaattacttaatgacataattgatttaagtaacaatcatcaattgaagaaacaatcacatgaaaaattaatatggaactttaaaatggaatagtcagtctgttacctgccaaaaccaatgatgaatctcagcttcaataaaacaggttctgaatagtggatgcttcctaataaacgtagtaaagacaccctctgcaaagcattcttgccaaaaacatttacgttaaatcaaatttagagacagcatcccttaagaaaaaataagagtggtgaaggaacacattaaagaagagcatatgaaaccagaatgtgtgacttcctacagaacaaaagatcctgcttctataacaagtctacagtgggaatggaggcaggatttctctaggttaagagacttaaggaacatatgtaatataatgtttgaatttgtttgaatatgaaaataaggaaaaacagtaaatgacattttcaagtcagttggggaagtttcaatgtggagctggattagacaataccaaataattactgtttatattgcttgatataataatggcattgtgcttaagtacaaaaatgcccatatttgttacagctgcattctgaaatacatcagagtaaagtgaagtgatgtctgcaatttgctttaaaatacttcagaagagaaaaagaaaggaggggagggaaaaagacaatatgaagaaaatgtagtaaaaatcttgatgattattgaatctaggtatacaacctgcttgataatttgcaggacccagagcaaaataaaaatgcagggtctcttataactgcttaagaatttcaaaacagtgacagaagaaccaaataaccacattaaaccaaatgtgggccttcataagccatgggctctgaacaactctcaggctgcatgcacatgaagcctgctctatgtgttagataatatggaaattaattgcactattcactctacttggtgcatatttggaaaacttccataataatttaaaggggatcacttaaaaatatatatatataaagtaaagattatatgaggaaatagcaaaaatcaggaaggctacaattggccgcaatttccaagatactgatgtaatcatgaaagacactcaatgtggtgcctgacacacagcaaatgctcaggttagctcctactactgttgctaccaccagcactaccattttgacaaagactacccttgtatctagtaagaaacatgaacgttttatagagattactacaacaacattttacagaaaggttactttagacatcgtgaaatccttactgggagatctacttatatacagaaagtcttacaattcttaccaatatttctgattgtattttgctcccttgtgccctatattctttaaaacttgcgagggatttccatcaatgacagactggataaagaaaatgtggcacatatacaccatagaatactacacagccataaaaaaggatgacttcatgtcctttgcagggacatggatgaagctggaaaccatcattctcagcaaactaacacaagaacagaaaaccaaacaccacatgttctctctcataagtgggagttgaacaatgagaacacatggacacagggaggggaacatcacataccggggcctatttgaggggtaggagtctgcgggggttagcattaggagaaatacctaatgcagatgacgggttgatgggtgtagcacccaccatggcacatgtatacctatgtaacaaacctgcacattctgcacacatatcctggaacttaaagtataaaaaaacaaacaaacaaaaaaacttgtaagggatatcaactgtgggccacaacagcacttagaacagaatattattactaacttgaagattcttctgaaagccagactcctctttgtaattcaagtgacatcacttacagtagcaaagaaagagcatcagaatgaaataagtccttgtgggtctcaatcatggtgaataatactgtggtttttcttgaatgagaaagggcatttgcaaacctcaaaggggtttaacgaaaccttactctcccctttaaatgtccaaattaagcttctttggaataaaaccttctcaaaagaaagcaaatgtaaaagttagattattgtatatgacctaaaacatttgctgaatcacaataaacacataccagcatctactatagcctgttacctaaatcaagtttcacagacccagagaattcctccgccttattttgttttttaaacattggattgaaagtactattgaggatcagcatgatcagtgcaaaccttattttgcacaaagagcaatttaggaaaaatggataaggtgataggccaccaatttatttgtctatccagaatgataatggttttattaaatcccttaaagaaagatgaatttttataagctagactatctaatttgttaaatagcacatcaatctgaatattgtcactgttttttaaaatactctaatgttaatattttggcatgtttgaattgaggcaacacagagttttctaatcgttaatctttaacttgatgaagggatctacacagaatgaagcagactacacacggcccaagggtagtggagatgtgtgtggtatctgttgcttctattaaacatttgcacatgaagcatgggtatatgctagcagaagaacactttcagacatcccatccctattcagttatccttcaaatcatatggcaacaacacaataagagccacttataccttattcccccgatggaaactctttgcctcttcagagagcccataaccagctgagggcccaggcctgactggtaacccctcagggagggagcatgtccataaatcagcaatatagcagagatggggcttcttatccttggcagccattttccctgcctccccttcctcccctaggacatcccctctctgccctggtatgcatcttggacactggatgtctcaactcagtttagaacttactaaaacaaggtttaataacctcatattaaaattttcaagactggctgggcacggtggctcacacctgtaatcccagcactttaggaggctgaggcaggcagatcacgaggtcaagagatcgaccccatcctggccaacatgcggaaaccctgcctctactaaaaatacaaaaattagctaggtgtggtggcacgcctctagtcccagctactcaggaggctgaggcaggacaatcacttgaacctgggaggcagaagttgcggtgagctgagatcacgccactgcactgcagcctggtgacagagcctggctccatctaaaaaaaaaaaaaaatttacaagactaccgagaatccgcacctcctaagaaatggagatcaagtctgtgcgagtcatcattcctcttgggtctcttgatttatctatcaattagcaacactatttgaccttctacctatgtgtgatcatggatattaatcagcccttctttttactgatataattcctactttttcagaaatctgacaaactcacaattgctgatatctaccctttcctccttacgaagatagaaatgcccatctataatttatagacaggtatgattccacaatttaaaaaataaagcaaaaaaaaaaaaaatccgctcaactcaaggcttatacatcactgattccctcaatgcccttacttggaaagcagtaattcttttgagctaataaaatgcatgttatgaaccagaacaataccttaaagatataacaaaagtaattatgataataatgaaaaaagtgagaatttcaaaatctttgtgtagttcttgaaagtatagtgcagtataatgtgagaactgaaggctgtttaccaaaaattcatatatctctccttctaaatatttattatttttgaacagacccgcttgtgtggccaggtgactttagccagtggcatatgtgccaattctgttaagtattttaagaaatggttttaccttctttctctttctctcccttccaccgtctggatgtagatagcactacggacctagggaaaggcagaaacacaagatgggagacatatgaaatatcccaggaagaaaactcttttgcagaagcactgataccagactcttacgtaaatgaaaaaaaacttccatttagtttaagccattattacattttggagtctataatgctaaagcagctagtatcaccctggttaattaatgaagtaaattaaatggttaaaagcatataacctacctgggacatcttgtagggcagtaagatggaagttaaaggacaacaggattgaaacttaaagtgttcaaagatgaaatcataagcagtatggaacctcggaggtaagttggggtataaaagaaacaaaactggccatgagctgattatttttaaaacagaatatgggtatatgagaattgatcacatattctctctagttctgtatatatttgacattttacacaataaaaatttaaacaggcagggtgcagtggctcacacctgtgatcccagcattttgggaagctgaggtgggcggatcactcgaggtcagccgttcgagaccagcctggccaacatggtgaaaccctgtctctactaaaaatacaaaaaattagctaggtgtggtcgtgggtacctgtaatgccagctacttgggaggctgaggcaggagaattgcttgaactcaggaggcagaggttgcagtgagccaagatggtgccactgcactccagcctgggtgacaaagtgagcatctgactcaaaaaaaaaaaaaattaaacacttttttttaaaaagtaaggatacctggagttcccactggcctaggaagggaatatctgagcatcaaaaaggttaagaacagaaacaaattaaaacatacaaaattttttttagaacaacagggagaggttccaagatggccgaataggaacaactcctgtctacagctcccagcttgagtgacgcagaagacaggtgatttctgcatttccaactgaggtaccgggttcatctcactggggcttgttggacagtgggtgcaccccatggagtgtgagccaaagcagggcaggcattgcctcacccaggcagtgcaaggggtcagggaattccgtttcctagccaagggaagctgtgacaaatggtacctggaaaatcataacaaccccaccctaatacagcacttttccaactgtcttagcaaatggcacaccaggagattatatcccgcgcctagctcggagggtcccacgcctagctcggagggtcccacgcccacggagccttgctctctgttagcacagcagtctgagatcgaactgcaaagcagcagtgaggctgggggaggggcatccatcattgctgaggcttgagtaggaaaacaaagaggcccagaaactcaaactgggtggagcccaccgcagctcaaggaggcctgcctgcctgcctctgtagtctccacctctgggggcagggcacagctgaacaaaaggcagcagaaacttctgcagacttaaacgtccctgtctgacagctttgaagagagcagtggttctcccaccatggagtttgacatctgagaatggacagactgcctcttcaagtgggtccctgagacccaagtagcctaactgggagatacctcccagtaggggccgactgacacctcacacagccaagtacccctctgagacaaagctttcagaggaaggatcaggcagcaacatttgccattctgcaatatttgctgttctgcagcctccacaggtgatacccaggcaaacagggtctggagtggacctccagcaaactccaaaagacctgcagctgaggatcctaactgttggaaggaaaactaacaaacagaaaggacatccacaccaaaaccccatctggacgtcaccatcatcaaagaccaaaggtacataaaaccacaaagatggggagaaaccagagtagaaaagctgaaaattctaaaaatcagagcgcctcttctcctcgaaaggaacgcagctgctcgccagcaagggaacaaagctggatggagaatgaatttgacgagttgagagaaggcttcagacgattgttagtaacaaacttctccaagctaaaggaggatgttcgaacccatcacaaagaagctaaaaaccttgaaaaaagattacatgaatggctaactagaataaccagtgtagagaagtccttaaatgacctggtggagctgaaaaccatggctcaagaactacatgacacatgcacaagtttcggtagccaattcgatcaagtggaagaaagggtatcactgattgaagaccaaatgaatgaaatgaagtgagaagagaagtttagagaaaaaagagtaaaaagagatgaacaaagcctccaagtaatacgggactatgtgaaaagaccaaatctacatctgattggtgtacctgaaagtgatgaggagaatggaaccaagttggaaaacactctgcaggatattatccaggagaacttccccaatctagcaatgcaggccaaaattcaaattcaggaaatacagagacgccacaaagatactcctcgagaagagcaaatccaagacacataattgtcagattcaccaaagttgaaatgaaggaaaaaatattaagggcagccagagagaaaggtccggttacccacaaagggaagcacatcagactaacagcggatctctcagcagaaactctagaagccagaagagagtggaggccaatatccagcattcttaaagaaaagaattttcaacccagaatttcataactagccaaactaatcttcacaagtgaaggagaaataaaatcctttacagacaagccaatactgagagatttagccaccaccaggcctgccttacaagagctcctgaaggaagcactaaacatggaaaggaacaaccagtaccagccactgcaaaaacatgccacactataaagaccatcaatactaggaagaaactgcatcaactaagaagccaaataaccagctaacatcaaaatgacaggattaaatacacacataacaatattaaccttaaatgtaaatgggctaaatgctccaattaaaagacacagactggcaaattgggtaaagagtcaagactcatcagtgtgctctattcaggagacccatctaacatgcagagacacacacaggctcaaaataaagggatggaggaagatctaccaagcaaaaggaaaacaaacaaacaaaaaaggcagggcttgcaatcctagtctctgataaaacagactttaaaccaacaaagatcaaagagacaaagaaggccgttacataatggtaaagggatcaattcaacaagaagagctaactatcctaaatatatatgcacccaatataggagcacccagattcataaagcaagaccttagagacttaaaaagagacttagactcccacacaataataatgggaggctttaataccccactgtcaacattagacagatcaacaaggcagaaagttaacaaggatatccaggaatagaactcagctctgaaccaagtggacctaatagacatctacagaactctccaccccaaatcaacaaaatatactttcttctcagcaccacatcgtacttattccaaaactgaccacatagttggaagtaaagcactcctcagcaaatgtaaaagaacagaaattataacaaactgtctctcagaccacagtgcaagcaaactagaaatcataatcaagaaactcactcaaaaccactcaactacatggaaactgaacaacctgctcctaaatgactactgggcacataacgaaatgaaggcagaaataaagatgttctttgaaaccaacgagaacaaagacgcaacatactagaatctctgggacacattcaaagtagtgtgtagagggaaatttatagcactaaatgcccacaagagaaaacaggaaaaacctaaagttgacaccctaacattacaattaaaagaactagagaagcaagggcaaagaaattcaaaagccaacagaaggcaagaaatgactaagatcagagcagaactgaaggagatagagacgcaaaaaacccttcaaaaaatcaatgaatccaggagatggtttttagaaaagatcaacaaaattgatagactgctagcaagactggtaaagaagaaaagagagaagaatcaaatagacacaataaaaaatgataaaagggatatcaccaccgatcccacagaaatacaaactaccatcagagagtactataaacacctctatgcaaataaactagaaactctagaagaaatggataaattcctagacacatacaccctcccaagactaaaccaaaaagaagttgaatctctgaatagaccaataacaggctctgaaattgaggcaataattcatagcctagcaaccaaaaaaagtccaggacccagatggattcacagccgaattctaccagaggtacaaagaggacctggtaccgttgcttctgaaactattccaatcaatagagaaagagggaatcatccctaactcattttatgaggccagcatcatcctgatagcaaagcctggcagagacacaacacaaaaaagagacttttagaccaatacccctgatgaacttcgatgcaaaaatccttcataaaatactggcaaactgaatccagcagcacatcaaaaagcttatccaccacgatcaagttggcttcatccctgggatgcaaggatggttcaacatatgcaaatcaaaaaacgtaatccatcatataaacagaaccaaagacaaaaaccacatgattatctgactagacgcagaaaaagccttcgaaaaaatttgacaggccttcatgctaaaaactctcaataaactaggtattgatgggatgtatctcaaaataataagagctatttatgacaaacccacagccaatatcataccgaatgggcaaaagctagaagcattccctttgaaacctggcacaagacagggatgccctctttcaccaatcctgttggaagttctggccagggcaatcagacaatagaaagaaataaagggtattcaattaggaaaagagtaagtccaattgttgctgttggcagatgacatgattgtatatttagaaaaccccatcgtctcagcccaaaatctccttaagctgataggcaacttcagcaaagtctcaggatacaaaatcaatgtgcaaaaatcacaagcattcctatacagcaataacagacaaacagagagccaaatcatgagtgaactcccattctcaattgcttcaaagagaataaaatgcctaggaatgcaacttacaaaagatgtgaagaacctcttcaaggagaactacaaaccactgctcaacgaaataaaagaggacacaaccaaatggaagaacattctatgctcatggataggaagaatcaatatcatgaaaatggttatactgcccaaggtaatttatagattcaatgccatccccatcaagctaccaatgactttcttcataggattggaaaaaactactttaaagttcatatggaaccaaaaaagagcccacattgctaagtcaatcctaagccaaaagaacaaagctggagccatcacgctacctgacttcaaactataccacaaggctacccaaacagcatgatactggtaccaaaacagagatatagaccaatggaacagaacagagccctcagaaataataccacacatctacaaccatctgatctttgacaaacatgaaaaaacaagcaatggggaaaggattccctatttaataaatggtgctgggaaaactggctagccatatgtagaaagctgaaactggatcccttccttacaccttatacaaaagttaattcaagatggattaaagacttaaatgttagacctaaaaccataaaaaccctagaagaaaacctaggcaataccattcaggacataggcatgggcaaggacttcatgtctaaaacaccaaaagcaatggcaacaaaagccaaaattgacaaatgggatctaattaaactcaagagcttctgcacagcaaaagaaaccaccatcagagtgaacaggcaacctacagaatgggagaaaatttttgcaatctacccatctgacaaagggcaaatatccagaaatcttccaagaacttaaacaaatttacaagaaaaaaatcaaacaaccccatcaaaaagtgggtgaaggatatgaacagacagttctcaaaagaagacatttatgcagccaacagacacatgaaaaaatgctcatcatcactggccatcagagaaatgcaaatcaaaaccacaatgagataccatctcacatcagttagaatgacaatcattaaaaagtcaggaaacaacaggtgctggagaggatgtggagaaataggaacacttttacactgctggtgggactgtaaactagtgcaaccattgtggaagacagtgtggcaattcctcaaggatctagaactagaaataccatttgacccagccatcctattactgggtatatacccaaaggattataaatcatgctgctacaaagacacatgcatacgtatgtttattgcggcacgattcacaatagcaaagacctggaagcaacccaaatgtccaacaatagactggattaagaaaatgtggcacatatacaccatggaatactatgcagccataaaaaatgatgagttcatgtcctttgtagggacatggatgaagctggaaacaatcattttcagcaaactatcacaaggacagaaaaccaaaaaccgcatgttctcactcataggtaggaattgaacaatgtgatcacttggacacaaggcaggggacatcacacaccagggcctgttgtggggttgggggagtggggagggataccattaggagatatacctaatgctaaatgatgagttaatgggtgcagcacatcaacatggtacatgtatacatatgtaacaaacctgcacattgggcacatgtaccgtagaacttaaagcataattaaaatatatgtatatatatttttaaaatccataacttcataatgacacatgcatgaaaactcattagacgttaatgaatgaatgcctaataacttctagttggtaaccaatgttaccaaatagaagttattaggcattcattcattaattaaaaattaaaatatgataaacaattaatttcctgcctatgtgaactgtatatcagagtaaccaaatggttgataagaaaaagtttttttatagatctccatgaataaatgcaggagaaatgacacaactagaaaactgctattttgcatcccctaatgatataagacctatatccagatataggaaactactatgagtggacataaaaccatcagtgtaagcatgatagggaacttggtaacagaacagtctgacaatacctgaatgaactaactcatgttatcttcactaaaaggacatatatcattatttccttcatgctgtgatgaaataggacatacatagcaccatctatgaagtattcttgcctaaaaaatctctataaaatctagccaagactccagactaaataccaggttatagtggtgattgggttcaggacatgctttcctaaaatatgacaccttggtatttaagaaaacagcagaagcgggaaggtcactctcaccttctgccgttctctcctgaagcaggtcatgaaccaatggaaggatttttttgagcgtcccctggagcaggtcataagaccattttagaggtgccctccttatacatggaggaaaggaacatccttacctctgaagacacagggacacagagaagaagctgaacaaacaggccttgctaagttccctcccccagtttattaccattagatcacactcccaatcatatgtccaatcatacttcacctcttcccactcttcatcaaacctagcataaaaagtacacggtttaaccatttctttgggccttcatttccttatgaaggctcccatgtcacatgaaacttatattaaataaatcggtttgcttttctcttgtaaatctatcttttgttatagcggcttccatcataaaactaggatgggaataaaaggtatttcttttcccatacagagaaataaattaaacactgccacaaaaaagcgaacagccatcttcaaaatatagagcaaatgatccagtttctctcacaaatcaaagttattgagaggaaggggataagaggactaattaaaaaaaaggagacaagcaacataacaattcaatgcaatgtgtgaatctcttttagattctgacttgaacaaaaccatcaacaaaagaacaattagggaaatgcaaatatggactggatattagaaaatattaaggaattattattaatttcattaaatgtgatgatggcatggaatttaaataaaggaggtaaggcccttatcagttagagatatctactgaagaattttcaggtgacaagatatgatatccagcatatgctttaatgcgctcaagcaaaagaaaagaaagaacgaaaaaataaaatggggacagaggaagtaagattggcaagatattgataattattaaagctggatgatgcacgcatgggtgttcattatgctattagttctacatttgtgtatatttgaaattttccaagatacagttttttaaggcacaagataggagtcagacattggttggaccagccctttcacttccagctgggagaaactgggcagatcactacagcctgcacattgccctcctttgtgtcatcaagtgcacagatatttcttctaagaatgctccaatactattccttggattttcttccgagccatagacacctattttgtgagttttgatgcttccctttcaatactcatacacgtgcagacaaacaacagttgtcccaactgctacctatctgaagtgattataagtgactatcaattatgacatatatcccaatttcaaagattaaaatgtgaaaaaaatgtgcgttaaaaaaatctatgaagaaagagacctggagatgaagttataataaaaatgtctatgacaatgagattttctgaatacctacaaggcatctcctgctttggctccataagtaccactatctctgtttgtttgtttgtttgtttgtttgtttgtttgtttttgagacagggtctcaatccctcgtccagactggagtgcagtggcaggcactccccaggctcagatgatccttccacctcagcctcccaaatagctgggactacaggcatgcgccaccacacctggctaatttttgtatttttggtacagacgaggcttcaccatgttgcccaggctgatctcgaactctagcctcaagccatctgctcacctcagcctcccaaagttctgggattacaggcctgagacaccacccctggcttcttgggttattttgactgacatatctcactggctaaaatacttccatttttctagaagctacggcaactaccactgggttggcaaatgacaggccctggaaatgtttctgatagatgtttgttgcatgaataataaatatgcaaattttaagccaaaaaagaaatataacacatgcaaagagatgtggggagtctcgtgcccttctgtataaagttctggaagctaattttggaaactctatcaagaagttgtgtgtgactatttttccaaagtagagtcaaaattcatgaggcagggcaaaagttacactgcatctaatgatgagtaagaatgcacatctgttccctggagctgctctctatacacatattctagtaatttccacacaccatcagaagatagaagatggagaaaaccagtaaagatataatctttgagaaaagacttttgttggagcctaaacataaacttttccttcaagtccatgtcctgagagaggtttgtaaatgtgtgacctaaatgaggctaccactgaattttgtttcccaatatccctcagagaggctataaggcatatacaaattctacttaaaagcaaatcatggtaaacatttattaaattttattacgcaccaagtaccacactcgtgttcttcccaggactgccaaagttggctgaaccctgatgcagtaactctgcagatgtacctataacatctcaactaatcctagcagcaaccctgcaaagaacagtaccaccttacttatattttcaggatagagagtatgacctttagaaagacttgctaactggcccaagttcgacagccggtaaatagcatatccaggactcacacccacggctatgaaaaatcggtgcttgcggcttgtgtttttcacctaaatacacaagtgttacatgaatgaactgtgatggaggatcagcattgttcctgccaaccacacccacctgcagtctagcgcagatcaatacttttacaaagtgcaatgaaaatgaatcactggggaataaaggcattcaaagtaaaagtcaaaagttgttattggagtcaacagacaaatttatgctgttattgcccacgagtttctaaatccttactctcaatttatatgcttattttgttgcatactggcaccaggacaaggaccaccctttgagtagtgctgcactacactttattgttagatccatgcttagaatgaacacatttataataaggttccaagatccctccacctattgagaggctggtaattcttttagatgttaattaatctatttttttttaaatgaagatgacttttagcattttcttctttcctataaagattcatcaagatatcagacataggttccaaagtcaacaaaaataaagaacttgtgaaattttctgctgctgtatgatacaactgctgtggtattttgataaatattaacagaaaatgtgaaactttgaaatatgtttccttaccaagggaacaatgaataataatgaaaccagggaatgaggactagaagcaccaggtgcccccgcctcccatccactgcagggaaggactctcttccaaatccaccctgaaaagtgagtggctgttgggaaactaaaaaatgtacttaagagatctcaaatatatggtgacacatggaattcttcaacctgccatgcctcttgagaagttctcaggtaaataacaagaatgatgcccacaatacattcacatacataaaaaaaatgtcctggaaagaaaaagaggatgggagaagaagttaatgattcttggggctttttaaaaaaattgtgttcggctgggtgtggtggctcacacctgtaatcccaacactttgggaggccgaggcaggtggatcacctgaggtcaggaatttgagaccagcctgaccaccatggagaaaccccatctctaccaaaaatacaaaattagccgggtgtggtggcgcatggctgtaatcccagctactcaagaggctgaggcaggagaatcacttgaacccaggaggcagaggttgcagtgagcctagatcgtgccattgcattccagcaacctgggcaacaagagcaaaactccgtctcaagaaaaaaaaaattgtgtttaaagtttcaagttaattttttttaagtcaccatagctcatatggccttggtatgagttgatgggtcaaacccatagcttctctggctactcaggaaattagtaaaggagggcaaggaaaggcacaatatggaagagagaaattactagacaagaatcagcaatctggagcgaacccaatctaaaggaaacaattagaaactggcacaggtcccaaatcaataagcagaggtgactgtgggcagtgagcataatggctgggtaatgaaaactaaaatgcaggtaagcaagcgctgggaaaggagcagctgatgacagggtcatctgtccagaggcttgaagagacctgtctgaacaggctctcacagcccagctagtccctgatgtcacagcctgtgtgaataaacagcactggtgtggtatccccaaacttcataagaaatgaagtcttcatggctcaccttgtcaaggccagagaacaatcccaacaggaaaaacacttcttacagattatgcagtggattcaaagagcactggaactgtatttcccattagctctaatggaggttgtgctaataaattccccagctctgggctgaacaggtgtaattcagtaatgtagctataattgagtgatgtcaactcaatataatttgtaatgtttttgtaacaaattatctctttttttttccagaaaaaaaggcatctgtgattccatatgataaattactttaaaagggtgacatacagtgctaatgataaagatctttaattgatagaaatgttaatagtagcatcagctaagaattatctttgctgattctttatacacagtaacattttaaacataacaagctttcgtttttgaccaaccaatgtttttgatttgtgactcatggttttcagatatttctgtatttcatcaatataactattctactagagaggttctgtataaaccctgcaatttagccattcccttccctgcacagttcccaagccagatctagacatttctacctctgtgcctaagagaacactggtctcctggtctggatggacagctgtctcctcctcttccatgtacctaagaatgacctgttggcccagtcaaaaccctccttctatgaagctttccagacctatagccaggattactctttcacaccctatacccctgggacactttggggtccctctattacattcttacttttcagacccccttgtacatgctattcctctgctgctctccctggttagggcccactcatccttggggtttcagttcaacgttatacctcaaggagaaccttccctgctttggaacagggcacattacacgtgcatttgcatacctctgcattcctttcctttgttgcactaaccacagttgttgttagtatcttttgtttgtttgtttgtttgtttttcaggaaaaaaaggcatctgtgatgcgtctcttttccactagggctaggctttagacaaggtctgtgttgagttttcctaaatctagtagcaaggacatgatgctccatatctgaagaaagaatgcatggatgaatgaatgaacaaacactatctctgtctgtctctccctacctctatctgtcctctccactaaacttgaactcaaaggtaatacagtgctcattgtagccacaataatgcctaattagggtctcgtccataatagagatgagaaaaactcagttgaaataaatttaatttctcctactgtagtgttaacatcaggttagtcatagagaattcagttcccaaagcttatagtgtttttcaccatatgctatccactgaccctcatcaagctccaaccacgtgctagcccctctgcaagatactgtggaagagaagtgaatgatatttagaaccaagtactctacagtttctgggtgattcccatgtataaccacatttctgcattcatgccagatactgggggaattcaaggttaatcaaacacagatggtgtcctcaaggagctcaggatctgggagaagagataaaagtgaagaaaaaatatcatgaggtggaatccatgagtgacataaaaggagtcccaatacagattctaggtgttctaatgagggacagagagaatgtaggcttaagtgggggtattttttttaagttttatttttaatttttgtggatacatagtgtatatatttatgggttgcatgagatattttgatataggcatgcaatgtgtaataatcacatcagggtacggtctccatcatctcaagcatttatcctttgtgttacaaataattaaactcttttagttattatcctaaaatgcacagataaattgtttttcactctagtcaccctgttgtgttagaaaatactaagtcttatttattctttcttactattttttgtatccattaatctttcagtggggacagtttttaaaatgagtctttacctgttgggtgggatggctcacgcctgtaatcccagctctcagggaggcagaggcgggaggatagcttgagcccaggagtttcagacctgcctgggcaatatagcaagacaccatgctccacaaaaagggaaaaaaatgagtctttacccaggtgaagattgggattagggacccagccaaaaggaagcgaggttgaagagcaagagtgtttattccttggttcaatagatctttgtcacctactgtgtgaggcataaataaacctaagtccattctcaatgcagcttacattctaattgtggagacaggtgaaagcaaacaaacaacaatgccaggttataatgagtgctctgaaaaaacagggcagagtaagaagcgaagctgatgagagtgctaccccagacaaggtggtcaggggaggccttcccatgtcaatgacactgaacaatgacttgaatgaagcgaaagagtgagccatgtaacacgccttgggaagtgcattcccaacagagaacagcaatcctctccacagaggaaggacagatgacccacacctttttcaaactggggtctctgagcatgttcttagggatctgaatgttcttgatgagactttttatttttggttttatttagataatactcacttaaaatagttcaagtgtattctgcatcagctacatagcacctaaaatacgggtaccagcacaaaagttttgtgactcctttatgtttgcatttataattgtggtggtatcaggtattgctgttttagctgtcacaagcaaaagataaaaaaaacaaacttactacttaaataatgtgtttgtgcctcatgatctcagagtaggggtggagtacatatgaattgtcccagtaatagcagctggaagtgttagggaaattgagtcatcacacagcctaggctaacacaaacatgacaagctgtgtagaacctttgacataacagacatcccgtattgatgtttccagagatgattctgtttaaacaaataatatcattcatcttgttaatgcaatattcctcatttgaatttagttttgtcattttgattgcatgtaatttgtaaacgtgttatggtttcatatttgtctaagaaccacacaaagaaattcatacctacttttgtattttcatgtggttcaataatccaataacaaaaacattaagttaacattgggggttcataagacttttttttcccttggaatggcatccatatgttactcaaggttggtcacagtgaaagctggtggtggaaaaggcctttgttttccagaaccatgaccaggtgatagctctggatggtttccaatgaaacacacagtaagtacaggaaagaagggagatgaatatctttggtaggaaaaaaaaaatcacaaatcagatatacctaatgactgtaacttttattattctctgaacaccaaggaacgtaaaggccataaattatgttacatgttggttaattctccttcagaacacccaggccattggaacattaaatgtggaaagtatgtggcgggggagagagggtgaagaagctataatgaaaggttcactgcactcgggtggcagattaaacacagagccagatgaggagtcaagcgtcactaaaaatgcaaaacaaatccagctaaattatttcacctgcaaggaaaagtttttctcacaacacaacactgttctatgccaacaaatgtaaacaagagctaagacgactatctgaaaagctcaggcagttggtgaggaaggctccttgggtcacagaaccctccaaaacttctcactgtagcagctgagagctggcatctgaaatcaaactgggtagagttcaagaatcacctctaacagagattagctctgagacctagcaagttctttaatatcacagaaaaaaaaaagacaaaacaacacctacattacaaagttgttgaaaggattcactgagataatcctcatagaccacttagaacactgcctggcacgtaataagttctccataaacgtgagccatgagttttatgatgctataggtctatgattatataagcatgagtctccacatatggcacaacaaactgctctactcaactctacagccctggatgatgtctccacattttacatattccatgatagtttccaataatttatatacatgtaaagtatatttgagatggtcggtaagataacatcattctcattcattcccctccccaatatagttcctaaggaggaaagatatgaatagtgctatggtttggatttgtgtccacgcctaaatctcatgtcaaattgtaatcttcagtgttggaggaggggcctggtgggatgtgactgaatcatggaggcagacttcctccttgctgttctcgcaataatgagtgagatctggttgtttaaaagtgtgcagcacttccccctttagtctctttctcctgctcccaccatgtaagaggtgcctccttcctcttcaccttctacctgaggcctctccagccatgcttcctctacagcctgtggaatgtgagtcaattaaacctcttttctttataaatttctcagtttcaggtagttctttatagcaatgcaagaacggactaatgcagatgggtctacagaaagagcataacccaacaaccttacatggtaggtaccattattgtccctattttacaaataaacaatgtccagagaagaggatggacttgctcaaggtcatacagctcataaatgatgcagccaggatttgaggtcaagtagtcccagtctagaatctaccttcttaatcaccacaagactctactcctccaaacaagtgtccttcctctgtgtccagtaaagaggaactctgggaactgctggtcacataattgtttattcctccaggttccccaatgtctggccctagaaaatgaggatgtttcactcccaactaagcatttccctaagctactatttgttatgctgttagctaagatagaaagtcaattttaaaatcgtccatttgaacagttatagtaactttcgtaaatggtaaatgaaacaatttgaaaacactgtccaacattttacacagtatcccatcgaccacagctaactaaagtaattcacatgtgaattttattctcaaaaaaagtgtatgctttgcttttgacagataatgaaagccatttaattcaatgtggctttttttctttgctttttcctttttttttttttttttttttttgccagaaagcagtgagataaattgaatacccataaactgaagaaaatctgttaatttggggtgtctggttacacctattcttgtgcttttttaaaagagagtctgccaaagtttattctcttcttaaattacctcatctgagcagtattttcatttgtaaataatggccacatattctctttaaagtaggaggaaatggagaccttaagtgtttcaaggaaacttcaggtccctcaaacctccttcaaagaaaacaactgatgattgtctttgaggcaaggagacactagtcatcaggccatcaagggcagggaacaacctgaacactttgcagctctgcactacaggtcctcaacgtcgttcttgcattagcccattcttgcattgctataaagttcattcaatgccatctggttataacaccgacagaaaataaattgattcccagtggggcccctgtctatgtagggtctgaacattctccccatgcttgcatgagttttctctgggcagtcaagttttctcccacatcccaaagatgagcatggtaggtgaaccggcatgtctacatggtccccatcttagtgagtatgagtgtgtgtgtgtaggtgtgtaggtgagtgggtcctgcaatgggatgatgtcctgtccagggtgagttcccaccttgcaccctgagctgctgggacatgctgcagccatccgagaccctcaactggaatataaataattatcttacctgtttttattactctttcttaaatgtgtatatagttcgcatagatttcaatgtaaaatattcaaagtgttttggtctatttagaagtttgatggtatagttgtgaccagaaatatgccataggaacttaactcttatttatatcaattagtctatggtgaaattggttatatgttgctttgctttatgtcccagtttccaggaacctatcaatgacattaagtaaggacttactgtactttactatagctgaacaggctgccacccaaaaccataatgagctactatgacgacagtcaatcaggagacatatctgtgtttcagagaagaaagccagcagctttctgggaaaaagcacagagggaaactcccctaagctggagctatttcctagcagtaacttgctgctgcagtttagccctgtcatctgtgtgtactcctcattaagtaccacattatgggccatcatatcttctccagctgcaagtaaaggcaatgtcctggaattgccctatggcccaaatgtgtgactaatgactgagactttggcttcttgcttgatgtttggccttcagtattacatgaacctgctctgaaagacacaacactgtcacagatgtatgcggacagattaagctccagatggaaggctgtcaatgtcaatcagtcactgttcttacagcctggctggcttttcatctaagcaaccacagagcatgatcctgcagcactcagttccttagctcaattaagtcttaggattggaggtcaagttaccctggtttcctaagcattctctaccaaatgattgtttttgcctcactcctactgattcatttatagtagcttcttttgatgcattcatccttgagcatgtcttcccatttccaagtgacttgtttcactattctgcagaatgttccagccctttgatgaactatatataattgtcgaatcagctgtcccacaaagagataaaatctgaattaaatacaggacttgttgtcaggagagaacagataaggtgaagaattagaagactagctgggaagaagtgagatgattgaagtttatgaaacattttcccccctcctttgagtctcccaatctgctagtttcagtcggttggttttgtgttcctgttgtgatatatgtttagttcaaggctgtggactttgtgccttggttacaggtaagtgcctctgtgtttctcatctttatctatccagtcacttgtctcctctcaaagtttcactttttaaatatatatatgttatttaatatcaaaagaatatcttcacctttcataaattgctaaccctagactctggatgcctagggtaaatttttaattctattttatttattttaattaaatttaaattaaaatttgttttaattaaatttaaattaaatatctaattctacttttatttatttatttaattctatttttaagtctatggacttgcttgaacacacagctcagcaatgatgcaggcaggattcaagtccaggcaaatcatggctctagagcttgtgttcttaacttccacatgacattgtccctcgggaggaatattgtaactccctacgtttccattccaaactctcaaatataaaatgataattacaaggtacacgttattgcaaaacatgtataaaagcatataaatcaaagattacattttgcctcctcttctttttcccatccctctaccctcatatccacacaatttcattccctgagggagcctatattaataatttggcatgtacatttttgcatacagacatatatttttctaagtttctataatacatactgttctgtcacatgtttgacatcttttcatgtcaattcatagagatgcttgttaatggctgcagagtaatttcaatgtatagacatataatactatatataatactatattgaacctctttagctacttggtcaaatatatctacagaatacgttactagacatttcaaggaatttctatgtcaaaatatttcaaatagttaatagttccaaacttcccaatccaagtataatatttttatttatatccacaacagggtatccccctgattttgcccatagtgcttattatcctaaccaactgattgatatttttagtttaattatttaaaaaatgaggttataatgaggtccctaagagtcccttaacctaatttactaggatctactttatctggagagtaaaataaagcaactacccaatctcaaaatatccttttgcccctcccaaatgactcttctggaatcatttatatgctgacctccatataatttattggatttatacgatcttatatctctagattgagttacaaatggatgaatctcttgaaacctagaccaaaaaataagaatagaataaaaaaagagtttttggtatggaaactgtgactctccaacgtcagtagagacattgagaatggtttcccatgtccccaggcataaactaaaatatccactgcttttggacagtataaatgcagaatatgcccccagatgaatagaaatgagcaaatcttgagtgcagaactgaatttcttggagctgtattggttacctggagccatgaattaagtggatctgattctatctcttaaaggaacagaaaaaaaattattccaggtgattactgctcctcaagcatgtggtcactcaaaggaccttcttctagctccacgggatacatagttgctattcatcagctctgctcactgaagatgctgtgctacgcattccaaatggcgccttggaggactaactgatatcattaacacagactcgtagagatgtcatcattttcttcttcatcatcttcgtcaagattagttttaagtgttgggagtccgaggtgggtggatcacgaggtcaggagatcgagaccatcctggctaatatggtgaaacctggtctctactaaaaatacaaaaaattagccgggtgtggtgggtgcctgtagtcccagctactcgggaggctgaggcaggagaatggtgtaaacccgggaggcagagcttgcaatgagctgagaccgcgccactgcactccagcctgagcgacagagcgagactctgtctcaaaaaaaaaaaagattagttttaagtgaaccatgtactagttctcaaatcaaccacatcgggtaggttccattattatttaattctgcagatgtgaatacaaggccacaagttcgtaagtgatactgccggggctcaaaccacttatgtattatgtcaaaagccatgctcttaaccattgcactatactcccttctacaggcataaaattttaaaaatatataccagaagagcaaaacaatcccaagtatgggaaggatgaaagagaagggtggcagttggcacagtggagcataatgggccagtctgactgtaagactcctgtttcataatgtctgcatgtcactaaaaaggatctagaccaaggttcacaaacacaaatgaatatgggggccaggacgttaacatacatgagtaaagaggaccaagtgcatgacagaaagagtggtgaagaacgtggtaaactgaaacacatgcctcaagggaagaaggcaatactctcatgtgtgtatgtggttcaaatgttgccaaatctatgaatttttttaacagaagaaaaaaaatccaattttaatgcaaaatgtttctatttccaaattatgatttcaatgtcatgtttaaaaacactttgacgatgacttagttccctctgacctccacacataagcattaacatggacagaagtatagcagcagtgtgaggtgcttttccagcagccatcagtccttcatccttgctaacataccttgatctttctcaggtacctgcaggtggtagtgtgtccagggaagataggccttactctcagcataagaggctgaaacgtactggtctcagccagtgaaggtaactgaatacttcattgacattgactggtctgggatgggatgcatgtgtgactcagttctagccaaagagaaatcgaaagatatctgctaagagactttaaggaaagattttctttcctgaaatggaaagagagagagaggcccaccacgagatggccctttttgctcccttccctcctatcctgtgttgaatgctaatccaggacactgtggtgttgaaagctctggcagccattttgtggcatgaggtaacaagtctaaggattaaggccaatacaccgccaatggtggaatgaaagcatgaaaggagcttggatccttgtttagcagccaaatcaacactgagactacttaatttgaggtttcttatataggaaacagtaaatctccttgtgatttatggtactattagttgggtgttctgttacttcatactgaatacattctaatgaaggatctcactttcaaccttacttcagagttctagctttttgtttacagcatccttcatgcaggaaaacttcaagtttacacagagtgtgcaactagatgtgagataaggctctgccacttgagaacgcccacacgctgcttcaaaaatttaaattatgctgttagcttttcaagatggatgaaatccttcataggatcatatagcaaggactaaattgctctcacagttgccaggcaactgtgtatatgctgcctagagacaaaaattcatgacccttgactccccaaaggagagtctttacccacaactgatatgcatgtgcccaagtctaacacttccatccagcaaaggtcatggtgtacatctgggctatccaacatcccaagctcattatactgccaacttatatcattcttgatcacaccataaattatgatttctgcatgcaaatccaaatgacagagcagagagtgtcctggggcataattccctgtcctttggcctgtcttattatatagactgattgggtaccatccaggcaaacaaaaaaaagacacatgaagattcctattagcctgaagaatcactgtcaggtaaacagagttttgtaaacagcttccaatattcaaggaaagtttgagttttcacagtgagtaatgtgatcaactttaataatgtctcaaggggcttctatctcacgagtcattttcaacacacacacacacacacacacacacatacacacacaggctaagatgtgctcatcattctattagaaaggaaatctcaaaatgcaaatatagatggtgtgttcacatttacatttcataatgatctaagtgttttgtttttgcatgtgaatttcataatactttaaatcatagaatcatggaatataaaaatcaaaagtgaccctgagatcaagaaggtccaatccaagagaaattaaatggcacagctgcttaggggtgaacactgaatccaagttgctggactctcagtctactgcgcttccccaaaactaacatgcttgtccctcaggcagtcaacccttaatcattgtgatgataaacatcagggacaacttaatttcaacttgacaataaatcaaactctccatgtagccattagttgctgtactagtcagaaaaaggttaagttgaatgtgaaccactctttcactacctcccacctcaaaaaaaaaaaaaaatgaacggaagcttgaatatacaagcttttattctctcatttaacaagtttggagatcagtagtctagtgctgacatggcagttctacagacccattacagacctagatgccttcaacttactgtatctccattcctagagggtgactgtcttagtctgctttgtgccgctataacaggacctgagactaggtaatttataaacaacagagatttattagcttacaattctggagtctgggaagcccaagatcaagggcccacatcttgtgaaagacttcttgctgtgttacacatgtaataaggcaccacatgatgagaaacagcacgcaaaggagcaagaagtgactaaactcacttggataacaaacccactcttgcaatagtgaacccattaacataataatgacattaatttattcacgggggtagatcccccatgccctaatcacctcttaaacaacccacttctcaacactgttgcattgaggaattaagtttccaaaacataaactctgggggacacattcaaaacacagcattcatcttcttaacatagccaaaaaggccgggcatggtggctcacacctataacctcagcactttgggaggccaaggtgggtggatcatctgaggtcaggagtttgaaaccagtctgaccaacatagtgaaaccccatctctactaaaaatacaaaaaattagccttgcgtagtgacatacacctgtagtcccagctactcaggaagctgaggcaggagaattgcttgaacctaggaggcaaaggttgcagtgagcagagattgtgccatttgactccagcctgggcaagaagagcaaagctctgtctcaaaaaaacaaaaacaaacaaacaagaaaacagcaaaaagtattaatgagccgttatgtctgcaccccagttggcagcaaggaggaagctgtaatgcatcttctctttaagaattctcctagttagtgtacccctgaaagcaaagcctaagacaaggaccaagggcataggtttgggtagattatttggatggtgatctcagaaaatttgaaagaaagagatgagacagtaaacactggaaggaaaaaggaaacagcatgtgttatcaacacctggggtgctatgtgaggagctgtgtggaatgtacccacaactgtccatctgatagaaggctgtggcaacccaccaattggttaagcattgcctgtagtgctgttacttccccggctatgcttgtgcgtgggctgggaagccttcttttggttttgagtaaggcctaaaccagaatagtagatgtacagcacagcagaacttgaggaccctggcagcacatgacagcatctgccacagctgcaatgaaattaggtggggatagggaatgtggcactgtgcacctgctacaagaaaatgtccagaaagttgctcataaagtttcttattatctctatgcatcaggagtccccaagacaatccttagactcaatgattcactaaaagactcccagaacccagaaaaactatgtactcatggtgatggtttgttacagagaaaggacacagattaaaatcagcaaagtaaaaaggtatataggaaagaatccaggagaaaacaggcacaagtttacagtgtcctctaccagtaaaatcacacagctggttcttaattgtcccagcaactatgtatgacaacatgtataaagtattgccaacccaagaagctcacctgagccttggtgtccatgatttttattgggggtcagccacatagacatggacttcccacacgaatgaccttaattacccagtctccagtccccccagaggtcaaattgatacaacatagcccagggcttcaggtgaacagaaacagcattcaccaacaatcacattgtcagtataaactatctggcaagacccacagtttcaggtattcaaaggcacttttctcagttagggtgcttcaaaagctccaaggttatctctttggagatggtcaagggccagtcttttatttggtatctgcagaatttgaacaccccaagccttgagttaaccctttactgaacaacctgtttggtcagaacttagtcaaatggccataaccacctgcaacaaaagtaagaaatgcagtctttgttctgggcagctatattcctactcaatatttgggaattctattattgtataatggtggttctcaaacttcagcacatcagaatcacctggagaattcattaaaatagactgcacaaccccctcctcagagtttctgattaagtaagtgtagggtgaggcctgagaatttgcatttcagtaatttaccaggtgtattactatccgaataaagccagaacaaatttacacaaactttgggcttaaaacaacacaaattcattatcttactattctgtgggtcagaagtctgacacaactcgcaccaagctcaaatcaaggtgtaagcagactcctttctgcagtctctaaggaagaatgtttccttgctcattccggttgttggcagaatgcagttctgaagtcctgtttccttattgcctgtcagctgaagatcattctgaatttctaaaggccttccacatttgttaggaggttgacccctccttccatcatcaagtcagcaatgaggggttgggttcttttcatgctttgaatctcacctgcctcctctatcgccatatctttctgattgcagcctgaaaaggttctctgatttttagagctcatttgactagactgggcccacccaggtattcaggagaatccccccatctcatggtctgtaatcttagtcacatatgcaaagtctgttttgccaggtaagatagtatattcacaggttctggagattagggtgtagatatctttggggggagggcgcatgattctacctaccacaccagtcagttcactctgattctgtggttagggaacacactttgagaaccaccaatatagaaaataagagaaccagaagactcttccacaatgtagccttattttacattgttggaaagtcaatgaaagcttttaacaaactggttgactgcagctttacctcttcagtgggcccctttcctactcaaaaagtaatgagaaaaaggcagcaagggggaccagagaatagagaaacaaaaactgaaatcactccctgactagattaatcagctcttgcatactctggccatttatcagatatattcagtgaaattcttggttgagagaaagagggagaaaacacaagccaatcctgaatcaaaattaatagagaattctactagaattcaacaggtttttcttttttattttttaatggcaagatccctgaaggcctttaaaatacgaatgtctgctttaaatctccaagaaggagggcagagttcttgaaaatgatagccatggtttttttcgtggcacatataatggaattgggctgcctggaaaaatgcttgagtaaaggttgctccacaaggggaaaggtggtaactcaatgcaccttcactttctaggttggtgcttctcaatttggctgcatattgaaatcatcttaggagctttaaaaagcgctgatgtctaggtcacacaccccagtgattctgaagcaattgctctggggcatgtcttgggcattgtgcttttcccccaacatctcgcagatgattctaacgtgtagccatgattaaggactgttatggtaggtgataaccctgttttcctgagtctattagcatatgtagttactaaccagagtcagtaaactaggtattgttctctgtattttaattcctgcccaaccaaattaaggaagtaatttcaaaaattaaaagagaagagataatctagagtggcaggcagtactaaccaactccacattcaagaatagcatcctttcttaaccagcattgcgtgattttaaactcttcgtatccccagaatttagcacagtgccccacacatagtatatgttcaggaagaactgtggtaaatgataaagaattatgaacaaagtcctcttcaaaatgaagattgcaggagaatcaagcttcagtcagatctaagtgcacactactctagtgagataagccaatcagataagcaggatggggaaccaccattttggttttgttgttgttgtcattgttgtttttgagacagagtctcacctaggctggaatgcagtggtgcgatctcggctcactgcaatctccgcctgcaggttcagctgattctcctgcttcagccttctgagtagcacgcctggctggctaatttgtgtatatttttagtagagacggggtttcaccatgttggccaggctggtctcaaactcctgacctcaaatgatccactcaactcggcttcccaaagtgctgagattacaggcatgagccgtcgttcctgaccaggaaccaccattttgattggcatggtaccaggtacacagaatttagccaataaactatttgatgtgtgaaagaatgaataaattttggcattaaaaggcaggcttcggtatgtcagagcaagaggtaattggatgaggaccagaggatggagcccagagcaggaaatgaagctcagagaagaggtagatgttcaacgtactgtgtctcctcctccagttttgagtaggtcactgaaaacacttggcatggcagtgaaaatcactcaaaagacccccgtggaaatggacagacttgtgtggaaatttgcagatcttggctgcttctaattcatttgtctttctaacctattagaatccaattcagtctctttggctctacccaggataatgcaaaactgaattgtacacataagcttcctgccttctgctccttctcttcataaccaatatgttgctaaacaacaatttctaattgccccttcccaggacaccttttgagagcatctctctttgtaccccctgaaatacataatactaattttctttgacatgctatatattttgaggatccatgcatccctaacaagtgcccagtcttacgatggtgcagcccctcatccagtgttctatcatttaattcatgatgctgtttatcttggctgcaagagagtgaattattggcatattcagacagtctcataccacctctcgtcctctccattatcataaaagttaaaattatttatttatgaaccaaataacttgtctgaatattttaacaatgcacgagcacttatggaggtttttatttcaatttgggtagagatacaaagtcaaatatgatttcagtacaagttgtgatggtttttctcaatatcttatatggggttccatttttgccttgtacaattaatacaagaagcataatgaactcagcaatccccttgagaaataacaaataggtataagcaataatttatctgtggaatgcagggccttgatacataacttccatatctactccaaaagaaaaagaaaagaaaaaaaattcctagctaagagccatgaagaaagagtccaaacactctcacacattgttgttggaaaggtagactatacaacatacttggattgcaatctggcaatatgctttgaatgttcacaattttaaaacatatatttcctgacccattatttcaaagactgtatcctgatcctgatgaaataataaaagatgtgcctaaagatatatcatgtgtggatgctcatttacagtgttacttcccataaagagaaatagggagaaacaaataagaaacctttctaatatattttgttatctataaaatggattgctatgcagtcattaaaaataatgttcctaaaaattagtttataggaaaatgtataaaaatgtacatgacataaagttaagtggaacagcaagatataaaacagtctatgcagcctatttccaatatgtttataataagtatttccatatatatttctacgttggcatattattctacacagaaaatgatcagtacatatttttgagtgtataagcagggtgtgtgtgtttacaaagacaaagatgaaataccccaaaatattaatagtggttatggctagatagtgaagttatgggggatatttattctttgccttatgttatcctacattttctaaatagtctcaatgcaaatgttgtttttataacttattactgatttgtgagctaaacagacccattgacattttccctggaatattctagtgacacaatcactctcctgttagatagtcccacccctcatgccccctcatttggtctcttccaagatccaggactttagagccagaaacatttggattcaaatcccagctctttactttctagctctatgaccatgggtaaggtcattctctctgggtgttctggacctttgggatagagttgttgggagagttaaatgaggagtgttgcattcctatccgatagttatttctccctccccttcctttctaataggatctgactttgtgattttattcaggtattgactgcccacaacctatacccagggacaagaggctggggcctactcagacctaaggcttgaagcttaactagactaggacaagcatggtaacttcattccccttgcaagggatcacttcagggtatggtttgaaattctggccaatcaccaagtgggacaattgttggaggccagggtcgttctgaaaaagttttcttcacatttaagaaaacaaaggacacccagaaggatgagtattcattgccgtttctggccttcagacactgaggatttctggatgcactatagccaaacttggaccattagaggacaagcctgcaaagaaaagtaacacctgaaagaggggagaaataaaagacagaaaaaaaccttgatacttgataatgttgttgctgaattctggcatggccctattttttttatttatatttaaaatttttgtttaaatcagttgaactaggatttctattacttttatctgaaaggatcgtaagtgatacaaaaagcaaaagtgccaagctcatgacagagagcagagttcaacaaataaaaaataaaaaaaagtcttttctttctctcaccttccaaatacatatttagtatacacagtatatacttgtttatggcttgtaaatgtagttaatagagaaagtaacaagaaagaaaggggtaaatgcaccttttcctcctcttaaaacatgcacaacaggacccaatttctctaatttttttataaaggcccccaaaaactatggacaaagacaaagttttccaaggaaagacatgtgctgtaatggattatatcttgctaaaaattcgaggccttctaaaaaaaacaaaatcttgaacaacaaagacctcttccaatccctcctccctgtaggtcttgaacaactagccagaggccctgcttttgtaagaggttccctagatagatcaggatggatggagtgtatgctgttagatcaaaagaaatcatttgctacttgtatgcatggactaccttaactgtgagtcttaatcaagtaatggagactgacaggcttcttggcctataggggccctatagtaataaagtgtgcacttttctaaaaatggtattcataagagtcaagtgactggacaattactttgtttgattccacatcccaggctgaacaacctcctcttcccatattcttctgcgtctgatcctgatggagaagaataagccagcctgagctatgcttagatattttaaattttagtgaaaaataaaatatatgttttaaagcctggaatattatttgtgatttgggtctaaggtctaaaaaatatggacaagtgggaattcaaaaatcaccctaccagcactgcaaagaattcgtgagtattcaagctttaggagttgggtttgtgcattttccttttataactattgctagccatcccagaatgttgcactcagtaagaagggctaacagtgtcctgctggccctattcctatgtgtcatcttgcggcatttccagttaatggcatgactgtaatgactagcaatttaaataatagaggctgaagcagaggcagctataaggacacaatgcagaaattgccacagtttatcaacatcactggcacccagctcttcattacctccttgaatagggtcaaagtagttaaaatgatgctgtaaatacatgactaaaacaaagcagcggtttattcttgatttggcattgggtatttataacaaacaagttgcatttcccaggcatgggttattagacacgagaatgtaattgatattaaccaactttcaggctccagtaactttttccactgcatgtcagtttaattttttttaaagcataagcagcacatgccaaatggaaaacaagaggaagaacacaaaaaaccccttaagccttcagtactaagtgaaaaacaactaacccatttatcttatagaatccttcagagttttgctataaactcactcggaagagaatatcacagtcttctctttttgagagggtattcgagtgatttttagaaatgagacatctctaactgtaatcttgttttttgttcagaactaaaagagtatgcaagaatatctaaaaatacaaattgtgcacctactgcattacggcagaggttgaacactggtgacccatgagccaaatctgacccattgctctgtttcatttggaccatacagtaatggttgactttgtgttttaacattttaaaattattttcaacatttgtaaatcgagagatttcacagaaaatgctggaagctctgaccctaccggcaccacactcctacaagataacaaatggctggggctgagttgaggctgctcttatcctttgcctcaattgtatcactcctacagtctccttgtctctgaggcctaatgtcaattacctctcttcttcttaatagtattgttatttttcctaagtaatgatcaaagacaaatattcattttggtgagccttgatcataaatggggaaaataaagatgggttaagaggactgagtgttttagaaaatgaaaaggctgtaattccttatagaagtaaataatttcttacttaaccccctttaccccataacagaatcctcccagctggcatccaagagcattgagtgtgtgaacctttgtgaaaagcatcaagttaaacgttctgtgtaaaggataccagacacatggaaaagccaagctaggttcagtctcagacaaaagctgtcaagctgagaaagggaaaagaaagcactgcacttgtaagaaaaacaacaaatggcaagcacggaattgacggctagaaagaacaaagcaggtttcaatgttctaccaaaaaatgtcttagcccctggctaaactccttttgggaaaaataggcacaacaggaagatgccttcacttcccaaagtcatccagacattctcagtgggagcttctgcatcaaccttgtgtcgcatctggagctgcagaccctcactgcccattggtttaacaatctctctcctcctgcaagaagagggtggtggcaggggggagtactataagggatgtttgttttattaaaaagaataaacatacatgcacatacacacctacccagaaaatactatttcatggcatctacacttatagggaattcactcagaaacagctttttagtaacacaaagaattaaaatcattagcacccaacaagtcagaaatgatggaagattaggaagaccattgcatagaaacaaaattaaaaaaagataaaaccctttatagaaccagaaaaggtgaggagaacacaaacaatccttttcactgagattgagaacccagaaaaaccttttgatataactagggaaagttaagtagagtcaggaaaggaataagtgtgtattaatttcccactgtgtagaaagcactccatatacattttaatacattttgataataaataataaataatactttatatttttgttcatttatccattaaataagtattcgttcactgccttctatgtgtcagacatctctagggatataaacatttaaagacatggttttcctattaccaagttttgagtctaacaaggaactagacaaacactctaatgaaaataataatgattataaatacaaacagcaataatacaatagcttaataacagctgtcctttactgagtgcttccaatgtggtaagaattgtgttgagcactttacattattattcgtttaatccctcataagtgccctatgaccaagttactaatatcttcattttacagagaagggaagtaagctatagactaaatgattacctaaggttataaaggtagcagatgaaagatctgagatttaaacactacctgttctctgcacaccaggccaacagataatctgcgatatcaacccctaccagctacgatggaggcatgccaaaaacaagcgatgcagaggggagacccttaaacccttttgaatttgcaaagcacttccccatagagaaaataagcctccagaattcatcagccccaagaggtggtactggtagaaaatataatagtctttcataatagcttaggtcagggtgtgaaagacagagctataagggctggtaaaagaacgaaagctttccaatccagagacaaaaggaaaagtgagatccatccatgacatgtctcttgaggactcttttaggaccaagatggtgaatgctgaacggaccatgcatgcctcagtctgtcaaattgtatgtttctaaggacaaataggctacaaaactttcaccctatttttatatgggaagtctgttgaaaagaatacaatacataaaagatgaattacttattgagtctttaatatgtctctagcacagaaataaacatcttgtgtatattgtttctaatttccacaataccatgagctagaaatatacagaatagaagaacagtgggatcagagaggttaagtgatttatccaagaccacacaggtgttaagaggtagaggaatggtttgaacttgcaacaatgtgactccaaaatcaatacattttccttacactgaaatacaaagtatcaggccaaatctctctgcaaatattcatcctgtttcttttggttcttcattcatttaattaaaaacaagtttattatgcacatacaaggaacatagtattcatccttgtgcatctgacaagtaagtcaaggagacaggtgtgtaaatacctaaccaaacttacaggcaggatgaatgaggctaaatgtgtttattatttaaataaactccatgaagtcagatacttcagtttgttgatcattgccacatacctgaaacacaatcttgaaccaacaaacatttgtttgatggaaggataaatgaagaaaatcccacttaaggaagtacaaacttaaggtagaattaattctgcctaagataaatcaacgaaagcccccaagtgcagtgtcattgaattggacttggaagaatgtatgaagtatatactagtgagaaatgaagtgacaggagctatggctcagggtaaacacaggaatggaagcatagaagcccacaaaatatttgggtaatagagttcaagcatacttagagcacaggaaaggcgagaaattagagtgagaactaaagtcaaaaaggtaatttggcaccactttgcacaaagccttcaagtcaattattaaaaaaaacaaacaaacaaacaaacaaaaaaaaacagccatgccagtagaatgcagtaatctgacagcttttagcaaagtgggaatgtatcacccctacttcctccccactgatcttagaagaatcctaagtgtttacacctagtttgtaagatcccaagaaactctccagtggtctaattcccaccactcagctaagaactctcagctcaaaagatactggcatctggaaagcctttttcaaagtccctaagtctgagttccttacatcccacacttcacccatctcatagtgtgtttttcttatctctctccaccatcactggcttccatgtgagcaggcactatctttgttgattcctagcatgttgcaaacagcccggcacatagcaactactcaataaatatcctggaaataattattacattagtgaattgaatgattgatgcactgactgactgttgaagaaatagagtcaaggagagccataggaggctgccacaatagcccacggaaaacacctctttataaaggtccagatgtatttctttaagtaggcactttgctaactggggagagcggtggttagttaaagcagacagcaaagcagaaaaaggcagggccagcgggcagttgctggggagaccacaattccatgggactatagccattagcatgcaacactgggtaatctgattttcatgacagacagatttattatgacttctaaatatataaatcccaggttatgctttccagctaacctaacaacttgatatatgtgtctgacatcccgtcttaaaatcagattccagcttctaattaatttttattcacccatcgctctaacaagagaggcaggaagtctcagggggataaacaatagacagggtattagtcgttcctactctgtggcacattttccactgagtctctggagttttctttttctttgctaccaaaaaaggggggccttacccattctctctgtggcttctaggaagaacgagtggaaaacattacacaggcacccgatagtcattatttctattaagcaaccaatgcttcatccatcacttccacctccccattccctgctttcatctacccatgcagaaattggaatgacatcatggtctagtcagtttaaagactgatcattgcttatgtattactatacatcttgctttctccaataatattatcagcaaatagttcttgaagctgaattgcaagtgccacaatgacctgactttaaaccaataatagtgatcataaaggctaaaagtaccacctaccgctttttatataatctgaacaatattaataattcactcacattcagatactttattaacaatgaaaagtgatacagctgtacccaggaaaagttttgtaatccactgatttctttaatgagcattctatgaatctgtgttttttaaatataattttcatatatgaatacaatttaaagaacattttcttctatgtcctttttccaaaacatgaaagtcaatatgggtaccacagaccaggttagaaaaaaaaagatggtcacattcaactttttaagttttttaatatttagttctcactatgtgctagagattgttctcaaaatgttaaatgcattaaatcctcctcaaaactctatcaggtatcataatttatccttgtgacatgtttaaaaagttgtttgcagtcacaaaagctagcaagttgtacaactgagatttcaattgaggctgatggctgaggctttaccaccttggtcttaatatactgcctggagatttaattactaaataactaatagtataagtagccagttgtgtttgccaaacccataaagccaaactacacaatcatcttcactttgaggacactatagtgtttctggctttttgcaagcagatttaaaaaatttggataccagtctgtttacctgccataatatggaatataaactaggaggagaaacacattcagcaaagaactttgtttgatggacttcacgaatcaaaaaaaatgtcatttttctgttcataataaataaatagtaaaaataggataataccaaaaaatatgcaaaatcttctcctccctatttattacaagtatatactttctaaatctctagtgtctatgtaatttatttgatggtatgaaagatgtatttcacatgtacatgcacaggcacacatgcgtgtgcacacacacacatacacatgcaacctatgtataccagaattactctgtgctcaatttatcttcagttaagcactgaaaacaaaatagaaccaaaaaaatggattcataaagtgacaaaaagaagttcattcacttgcccttcaggtacataccatactcatatgaacaaacttatatattctccctacaaaatcacacttaaatatgtgatttaaagtattttttgctaagtatttttatttctttccccaaaattatttgtgaaaatggaacatgtcctatatatcaataaatgtcatttaaaataaataaatttttaaattaaaattatcatcaaactcttaaagtatttcattttttaaaaataaatttacactggaatagaagtcaaacaaacatttaaaagcacacagaaagcattcatattacaactaatctaaatggctgatttggtaagttttagagccttttaataaaaccatatttttactcaagtactatttagttagagctttatcaaaatacttaattacaaaataagatctaagatgttcaggtaaaactatgcacaatataatcaaatccttagcatgaagccattcaagttgtcatttagagatctgttttctgagcctactccagttttaaaatagtttcctcagtaacatcaaatctgcccttcctcccctttgccctcagaattattagagcataatgtaattcttttaccagccttaggaaaacactattggaatgcatgagccaaaatgcagagatgaaacggaactgaaaaaaaaagttttttaaaaatggaaaatcaattactatttttaataagtagaaatagcttttgtgctaagaaaagaaaaattgcccagagacaaaatagatgttcgatattatagtgcactaatgagtacatttacatgtaattttctgaaatttatgtccaagactaactgcaaatagaatttagtatcaataggagtttacaaaacccattcatttttcctctaatcatattgaatatttaaggtgcttgattagactcaattatttttctttcggtgccaaaaaagagccctgacagctttgaaagagatggattagtggggcatttcccaccaatggggaaacattcctggctcccacagcaggaaaaaaaaaaacaatgagaaagttcatgccaattcacatgcatgccactgaatgaaatctgcagagaactcagagaaggtcagcttgtcaaaggatcacggcaaaaagcggaagaggcagatacccaaacttagtaggactttgtggcctcccagctcacaagcctgcttcttcatttcaaggcggcctggagagaagcatctgacaaagatctatctcccactgcccagaaaagattaaaagaatatgggccctagcaaatctcctagtacttggaattgagaaatagaaagggaaatgtagctaatttgcagtagccctgcttccttgttcagatttcccgaagcataataaaatagagaggctgtgtctccagggttccacttccagctgtgccccacaacttggaaaaaacaagaagggacatgttacctactcacaccaacctgcctctcctgctgcccctcctgctgccattctttcaattcattctaagggaggttgtcagccctctctgaaatgctttaaaaagaagctatattcctaactggtcaaggagatttaggtgaattcctggctgaaagcagaatgaggaaaaaactgttccctcaaagtgcccaatctttgatgcattatgttctactgtctgctaaaaccatcatcgtagccttttaattaaattttcaaattctggtttgatggtccatgttaaactcaatttggtcaattcagggcaccatccacccagatattcctccctctgagacttctggtagaatccttccttgcctcttcctaatttccagtctctgcctctgtcatcatgtgacgttctcccctcatctgtctgtatcactgtgtcttttctcctcttctatgaggacaccattcacattgcattaaggttccatcttaactccagtatgacctcatcttaactaattacatctgtaatgacagtatttccaaataaggtcacattctgaggcaatgagagttcaaacttcaaatatctttttgggggcacacaagtaaacctattctgtgcagggcacacaattcgacctactaacactcccatattaaatcaatcaccaagtcgtgagcagacacctaatacctctcaaatctgtcaacttctttctatacccaccactaccctgaatcccatacaattgtctcacctgggtaattgtaacagcttcctttaggaagctcccctcatttttgcattgctccaatagattctccaaaaaaaaaaagtgcttattgaaatgtaactgatatagagaaaagtgcataaatcagaatgaatttttacagggcacacatacccacttaaacactacccaaatcaagaaatataatattatcatcatcctagaagcacatttcatatcccttcccaattaatttcctcctgctccagcccaaaggaaaccattatcctgacctctaacaacattgattagttttacatggtttgggattttatatgaatggtaacattcagcacatgcttttgtatctgtcttctgctgttagaatgatccttgctgttgcaactagaagtaattgattcattttctttactttataaatatttcattatgtgaatatacccttttacttattcattctaatgttgatgaccattcagattgagttccatttggaaaagctattaaaaataatggagctacgaacattctcacatttttagcgtatatctagtagaagtgaaaggtcacagggcctacaattgtttttcactaaatattgccagttttctaaagtaattatattaattttcaatcccacaccactgtatgatagttccagttgcttcatacccttgccaacacttagtattatcaatcttctttcattttagtcattcagatgagtgtccaatggtagctcattgtctctaataactaattatgataagagctttgtaatatgctgtgtagccatgtgactatcctcttttgtaaagggcttgttcaaattcattgcccttttttccaatgggctatttttctcccatccaagtactaatcaggcccatccctacttagctcccaagatcagacaagattggatgcattcagggtggtatggccgtagactacctctttttcttactgatgtgtagatgatatttatatgatctgaatactagtcctttgccagagatattgtaattatcatctcccattctgtggcttgccttttctctcagctagtgatgtctttagttcataaactttccattttgatgtactctaatatatttatcttttcattttttgctattgttttaaaaatagttttattgagatataactcacataccatccaattcaccaatcaagtgtatgtgactcaaagttttttagtatatccacagagttgtgtaacaatcactacaatccaattttagaacattctaatcaccccagaaagaaacgttggcccggcgcgttggctcacgcctataatcccagcactttgggaggccgaggcgggcggatcacgaggtcaggagatcgagaccatcctggctaccacggtgaaaccccgtctctactaaaaatacaaaaaattagccgggcgaagtggcgggcgcctgtagtcccagctactcgggaggctgaggcaggagaatggcgtgaacctgggaggaggagcttgcagtgagccgagatcgcgccactgcactccagcctgggcgacagcgagactccgtctcaaaaacaaaaagaaaaagaaaccttatacctactagctgccactccctattcctcccaacaccttcaccctcactaaactctaaccaaccactcatccactctctgtctttattgatttgccttttctgggtatttcttatcaatggaattatatgatatgtgttttttttattttgtttttgtgactggcttctttcactttgcatgatgttttcaaggttcatccatgttgcagcatatatgagtacttctctacttgtttgtctaataatattccattgtacggatataccacatttatttatccattcatcagttgatggtcatttgggttgtttccactttggggctattagatgaaatgatgcttggatagtgttttttcatgtcctgtttaagaaatatttggctatcccaaaatcatgaagacattctatgatgttatattctagatgctttattgatttagctctcacactcagatcagcaatccaactggaatttatttctgtttatgatgtgaggttcatttttccctgccctgatacccaaatgattcagcactatttaatgaaaagatcgccctttcttcattgctccacagtgtcatctttctcaaaattcaagtgtccctacatgagtggctctatttctgtacactccattctgttccattaatctattgctatttgcttatccttgtgcaataccacattatagtaattattgtagatttataatgaatttatgaagagctgatagatagtatatgtcctccaactttgttctgattccccttcagaattatcttgcctattctttgccttttgcataatggtgttttgattagaattgcatgaaatttagagatcaatttggagagaatagacctcttgaccctattgagtcaccaattcatggatatattgtgtcctttcatatattaggtcatctttaatttctttcagtaatattctgtacctttctctgtagaggtctaatacatcttttgttagatatattcctatgtttttaatatttcaagctattttaagtggtaactttttaaatacatttattgaggtaaaatttacatagcatgaaattcatctatttagatgtacagtttgatgagttttgaatacatttatatagttatacaaccatcacctctacatagttttagaacacttctatcaatccaaactgttacctcatgccctttgcagttaatccccactccccacaccaggcagcaactgatttgctttccatctctgtagttttgccctttctaaaaattgaatcatacactatagattcttttgtgtctggattctttcacttcacataatacttttgaagcatatccaggttatttcaggtatgggctgttcattcctttacaatgttgagtagtattcccttgtataaatatactaattattgcttacccatttaccaattgatagatacctagattgcttctataatagcttgggaccattacaaacaacattgctataaatgtagacatacatttcatttctccacaagttttcatttcaagaccttgaagtggaattgctaagtcttatggtaagtacatgtttaaccttttcaaaaagtgccaaattgttttccaaagtagctgtaccattcacattcctaatagctttatttaaaggttacagtttctccatatcttcaccagcacttcttattgccttttttactttagccatcctagtgggtataaattggtatttcaatgtggtatataataatatttcatactattcctctcctttaaatttgcattttcctggtgatgataagcatttttcatgtgattatttgccattaatgtatatgctttggtttgttttcttattaccgacataagaattctttatatattcttgatattaaatgctttatcagatatgatttgcaaatatctcatcccattctgtggtttgtctttttattttcttaatagtgtccttaaataactcacgttttaaaatgttatgaagttcaatttatcagtgtttttttcttttaggaaatcttgattttggtgttatatctaagaaatatttgactaatataaagtcataaaacctttcctgtatgttttcatctagaagttttatagttttaaagcttatattttggtctgtaatccattccaagttaactttgtatacagtacaggctaatttttggataaagacatgcaattgttccacctcaccttctttggaaaaacaatttgttcatagtttataaccctttttatatgttgctggattcattttaaatggtatctttttaaaatttcattttgtaattctttgttctggtacgtagaaatacaattgatgttttatactgactttgtatctagcatccttgctaaattcatttgttaaatttacataattatatgttctgcaaataaaagaattttattgtttcctttcaaatgctcatatcttttttttctgtctctctacattcaccaggacttccagtacaatgctgaacagcagtggtgagaacagtcacccttttctcagacctaatcttagggcaaggctctcaatgtttcacttaagtatgatatttgctgtagtttttaaaaaatatatagagagtctttattaaggatgtttacttatagtcctagtttgttaaaagttcttatcaggattagatgttgaattttatcatatggcttttctccttttctgttattacatcatttgatttttgaacattaccttaccactcatatctataataaatacaactttgtcatgacatatattgtttttctatattgttcagtctgctattgctttgtttaggatttttgcattcttgagacctccaaaatctcttccccatctctttagctgctgctttctattggacttttaagcttttcaggtctttgtcatttacaaatcaacaaatgcttcaaaaagaaaaagaatgagaatgttgaagtcacttcaatgcacctcctccctccagggttctgacccctcaagtcctggatgccttggtagcccttcaataccttcaaacaaatatcttctctttattttggctggcttttctagttattctcttggtggattattagctaccctatcattaccagaagcagaaattcatcctataactaaataaagtcatcatataaactaaatcatattattcttcctccttgaatttgctaatgtgctgataaaaactccatattctgtactatgtcctataagattctagtgatacagacatagcctttccctccatcatctcctaccactcactcccttgttcactcctctcccaccatatgtatctactttctgttcttctaatcccattgggttaattcccaaatcagtgcttttgcatttgttcttccctctccctggaacaccctgtccctgatcttcacatgcctgcctcacttttgtcaatccatctcagtttcaatgtcacctcttcaaagaggccttctcaagacaatttatctaatcttgtgtctctcctgcctgattccccacaaacaatattctatacatgaaagaaatgataatgaaattaagccaacagaaatagagtttgaactttccaaaagccacaatgttatctctatcccacttccacatccaacataaagagaacaacaaactaagaatatgtaacacctttggggaccacttttgtatattattatacagatcttaagagtatataatctttctctggagtgtgacaaacctaaatcaccgctacatcactttccagatgtataacttccagcaaggttctcagcctcaacttcctaaactataaaatggggataatggtagaatccattcgataatattgttgtaattataaaataaatgttattttgtatgcaaagtgcttaatacagtgctgagtcataaaaagtgttccataaacaagagctattgtgatgactgacaatgatgctcatgatgataatgatgacaaaaacaataaggctctggagcatctggtaaaatgctaagtaattcaatcaaacacacacagatgtacacacacacatacgcacaaaattacatgttgtaattcatttccaccaagtagatacagcctttatcacttgcattggtagatttggtagagacttcatttctttgatttctgtactaggtaagtttggtggcaagaaatataggccagccctagcaagtctattcaaaaataagaaaaatgaaaagaatactacagtatctcacaaaattgaaaggagaatgaaaacccaagctttgtgaagaaggaaatcaaggtagcttcagagaactgagaggccggatcttagagacctccctctagagcactgctatttgaatgactaaaataccattaataactactttttgctttcaattcaaaattcaaaattcttagaagagagaatctgattggcataatcagatacctagccctagatcactcatctctgccctcaagttaaaaagtcaaacattatggtctcagctgctgggagcccacctctgtggatcaggggacactgcccagaaaagagttttgttttagaactggaaggtcatcccaagaaatattactataatagaagggactctgtctaagatgggctctctctaaaagaagtcattttgttctactatttgcccatccagaatagcagtgaccaagttatgcaccattagctgcttgggagggagctaattacaaattaaatataattgaatcagtgagtctgctttcaagtcctctaaatagaataacaacatgctaccttgtacagccaatttagcaaatcgaagctgaatcccttgctttctatgaagataaagagcctttgtgaaatttttaaagtatagatgtaaacttcaaaaaattttgcaaggcaagtcatcaaaatctgggagaaaatatattggaaactgtgctccaacaggagccaatgaaggaaccttatgagggagtataaaatattaatattcaccaatgccaagaaaattttcatattatgcaggtatccaaaatgggactactatctttgatttcacaattcctttctacttctctaacacgaatttttagtgacccaaaatgctgggaagaactacaaaatacagtgaatgcattctacttgaacattatcttatgctgttgtacctaccaaaaagacaccatgaaaactgcaagtatggctgcgctggaaaaaaccgaaataagtagtcatctgtgaagtactgcaagtgtgggaaatggttgagagtcatggacattggggaatatcaacaaaagaggaagaaaaagaagattaggatggaggtagaaatgattcccatggaattactgacatcagtatatattcccttagcctattattacatcagtgtctcctactgggaatatttactgaaccagtggtactcagactttttttgagcagggaaaaaaatttattcaacatttggaaaactggcatagggcatccaaagtggggtgagaaggctcttgtgtcagactaccaggtccattcccagctcaatatatacatactgtggtaagatatccgtaacgtaaaatttactattttaaccatttttaagtgtacagttttgtggcattaagtacattcacaatgttgtggaacaactacctgtatctaggtctaaaacatttcatcacctccaagggaaatcctatacccattaagcatacattccccgattccttcttcctccagtgcctggcagctactcatctgctttcaatctctatggatttgcccattcaggcatttcatataaatggaatcttctaataggtgaccttttttgtaatggcttattgtacttagcatgtttttaatgctcatccatgttgtagcatgtatacttcagtaaaaaaaaattgaatacaattgtaaatatttgtttgaaacacataaaagaaatagttaaagggattgagcctatttacagaagacttgaactctggggcaaggagagatgaaaagggggactaggatagcagttgtcatttcaaagactcattgtgtgtaaagagactaagttttattctattcagccccaaattatccccccataaccaaagagtagaaactataagaagagagatttcaatttgacataagaaaaatctttcaacagtgttatccaaagacagaatagactgtttttataaataatgagttccacttatctgtaggtattcaagtataaatggaatattcccttcgcagaaatctttagagaagcaagcatcagataagattgatctgaatcagtggttcctaaaagccaatcaacaagcgcatgccaatacatgatgaagttttcattcactcgtggtgaaatgccaaaatcaaagaggtttttataaagctaaatatatatttaattattttaattccaagattatgcctttcatccttttagtatcaaaatagccccccaaaatagtgaatgatagttttcttcattcatgcccttttttggggcaaaacttcaaggtgacaaagtaaagtcagccctttgttttaggggggaaattgtaccagtctcaaagtgtgagaatcatttgaataggtgattcttaagacattttcaaaattccaagaacccatgtttatgaccaaggattgttatgaaagttgcttttgttgttcattttatccatatttcaactgtgtatgcaaggagtggagcacctcccaagaggattttccccaaggcttctgcctttgtagggatggtctgaaatgatatagaatttgaacggatttctagtctcacagggatttatattacatgaaaaaagagagagctttgctttagagatgtttatccaaattcaccacggagtcaatgggccaaattccaaatgccatgggcctcccagtgggtgtcaattttactgggcggctgtgtttgggagaaaaagtacatatgcatgtgtggctgtgaatgtgtgtgtgtagagataaagagagaaggatatgaacaaatagatagaggcatcaacaatcacaagagggaaagggatgatatatgtttagaattatatctaaggactgtctaaagataaacaaaaataacgtttttccccttttttgtcacccttgttaaaatcaataggaaaaatttgaaggtaccaagttattttattgtcaggcaccaaaagagtaaaaattgatgacatcactccatacaaaacccccagagctttctgattctgctgtttatgctttctcctgcaacatctccatttggatcctgctggaaacacttttctttctgtcactcacaatctgtcaagacagcattatcttctgtggtttaaaaacagaaactccatttaacttcgtggttgataaagacatctcgttcacatcccttaactaacaataattattctaatttaccacataaagacaagaaaaaatatgcacttaacattttgcagctggttttgtatcaaggaacacatggaagagaaatggtcccactcttgcgataaaaaaataaggtattaagtaaaaaatagacctaacatgaatgtatgcttttggtacatcctccctacatgccaatcagtgaagcaattaggagtttgggctctcaaaacatacttggattccaatcctggatttgcctcttattaatctaagaaggcaagacacgtaaccttcctaagtcttcttcatctgtaaaatgggagcatatatcaatatctacctcataagattaaattagataatcaatctatgtcagctgctgttactattgttgtcctcctcctactcgtcctcatcatcaccactattaacatcaaatcaacgtattagttaaggttctttggggtcaagcaacgcagatcatcctgcctaacgttagcaaaatagaaaagagatctactgcaagtatacagaatagtgcctaaaaatcaaagtaaaactaaatgaagcttagaaccaacaggaggctgggggcagtggttcacacctgtaatcttagcactttgggaggccgaggcagagggatcacttgagcccaggagtttgagacgagcctggacaccatggcaaaacccagtctctacaaaaatttagctgggcgtagtggcacccacctgtagtcccagttactagggaggttgagatgggagaattgtttgagtctgggaggttgaggctacagtgacccatgatcatgccactgtgctccagcctgggcaacagagagaccttgtctaaaaaaaaaaaaaaaaaaaaaaaaaaagaagcaacaggagtcaggctcccaggaattcatggtcagttagttcttcaggctactatcagcaggaagaatcagcaacaaccattttccatccttgggtcaatgtactcaagattcagaatctctgaaaaaaaaagagtggtggggtgggggtaggggggtggggtttgggacttgggcactgccttggtcacatgaccactgcttggcctggggaaggcaaggtgtttgacagctccaataatactgtgtttggtggagaaggctattccccaagggaaaaatctactttataactcaaagaagaggagtacagatactgagcaggtacatataccaagaactatttttcttacaccattacatcccaacgacccactacgtcaagctcaattaagcctgcaccctcttctccatcatccttcctatttggtaattactcttttaatacatgtttttaattttgaagttgttgttaaaactcaatttgagaaaagcaaaaaggccccagagctctaaagtatatatgtcccttaaaaatatatatatatatatactgcttgctgacaataaattattttgttaaaaaacttccgtattagaatttccagaaaatttattgtctttatgttcaagttatttagtagtaatctgtgctattaagaagcacataaagcacccattgaaaaagttatctgaagatgatttagagaaatagtttgttctcttagaaagaaatctcttttatgttttaagttcaataagatgatatttatgctcataaattagggtcaaaggcaacattttgttttggtaatttttttgtggatgatgatgttttagtgagaaaggattgacaataaaagcaagaatgtaagaataataaaaataaataataacgaaatacatgacctacaatttcattaaaattttcttccagcttactagctgaacaaatcccaaacaatgaaaatatacagagtctgattaatttgaagccctaaacaactctgtagctcagtgaaaacatttctcataaagcccagggccctgagggcacacagagctaagacaaatcccagtgtggtccacccttagcagctgtgtgactctaagcaacttactaatctgccaaaatacccaggtctcgcctcatctgtaaatgaagtaaacaacgtggtgggatgttttgaggacttgatataatgcatggaagggtcttgacactttttctggcaaacaatgagcacacaacgataaacgtttataattctatgtatggagagagagagagagagactgagaaagcatacaaaagagcaagaaagcagtagttctcaacagggagtgatttttgctcaccagaggacatttggcaaggtctggagacatctgtgattgtcaaaacctggagggtagagggtgcttctggcatccagtgggtagaggccaggcatgctgcttacagggaagctcttacaatacagatgacaagcccccacaacagaattatccaagccaaaatgccaataatgccaaggttgagaaacagaaagagattgagaaagagaaagcaatgtgatgtaatgcagaacctgtaacagatttggaaggaaaggtacattcaaagccgggataggaaagtagatcagagcagatttgaaattagattgacaggcatctgccacatgtaagctattgaggaagtgctctgagcctgaggattctcatttgaacaacgggcataatatgtaacatcacctacctcaaaaagttgttagcaggcatgatattcacccctgaccaaatcattacagatgcccactgcgtataaccagtaggacttcaccagtgtgtatacccactgtcaaccctaagagttaggtacacgtaataaataaatggttactagtcttgttatatattagaccaacagccaggtttgaagtttgactctgctacactggaaatacttgaaagggtttgttaatatcagcaagaattagtgccctcataaggaagtaaacagcaactagactccaagttcaaatgagttttccctgtaggttaggtgtcctcaacttgggatccttaaaacctctgaaattaaaaagaaaaaattacacatatgcacatatatacatgtatgaatgcaaccaagtgtgtgtgtgtgtgtgtgtgtatttttctctgaagaggggtccaaaaatggtgacgcatcactgggttagaggtatacagttttcaatataaagtaataaccaggatgcagtagagtttctgaagatatcattgtaatgtgaaggagacagtatttggaaatagttatgaactcagatctgggagtttgaattctgcctctgccacttactgtctgtgcaaccttgcataactgacagaacaataacttctttgcatctcacatgcaaaggtggaatgctcataatatccacctaagaagaatcttagagcaataaaattagacaattcccatatggtattcagcacagtactcaacacatagtatagaagtccctggttatccgcaggacagatgcttcaagatccccagtggatgcctgaaaccaaacagtactatgtttctcctacacatgcatacctatgaaaaagtttaatttataaattaggcagagtaagatattgacaatgatagctaatgataaaatagagcaattataacactatgccagcattactactcttgtgctggggccattattaagtaaaacaagggttccttgaacacaagcaccatgataccatgacagttgatctgataactgagataatgattaagtgatgaatggacagggagcatctacagtgcatatgctggacaaagggatgattcacttcctcacaatggagcgagacagcatgagattccatcatgctacttaggacggtgtgcaatttaaaatttatacattgtttatttctggaattttatagttaatatttttggaccacagttgaccatggttaactgaaaccacagaaagcaaaaccgtgaataaggggagaccactgtatgtgaggactaagaattagatactgcaatggaagtatttgcaaagactattatattcagatggtggtgaaggtttgagccttctctaactacgtatggcacacactatcagaaaaatggcagggattcatcaattaatctatccatttactactagttcagccagaggatccactaattctgagacatgccttgtataataatatctatacaatgttgaaaagtggacagaagtagctgtgaatctggtcacaaaacctctttttatacaagaaagcctcattcaaactttctcctctgacacatttcccagggccccctctgggatttccacaaacatgatgttgtgcttgactgtgcattactatggaacaattctaagcctgtctcacctacatataagatacagactccgcaagggccttttcaatctccttcattcctctcagaacctgtgcaaacaggattttatgcacaggtaacccaaataaagcagggttgccttgagacttgcatctgcccaataacatatccacgaagaatgactctgtaggcatttgccagtgcattgcacagcagcacagcctaaaattcttcctcacccatccattgccccaaccttaaagcatctgttttaaaaaaaaaaattcatctttccctatctctcattctaacctatccccacccaggatgccctcagtgccattctgctttttcgctgccaccacatttactgtgctcatgacacctgtcccctctcttcagggtatcactcctgcaaggcagagagcctggcctgaatacctttcttctggaagcagccctctagaattctgggtaacagatttgctatcttgttctatagagaagttcattacaagaaatgcctccattcctggctcaacgctcacttaaccttcttctagaggccacaggcagatgatcttccaagtttctcttaccctagaatagtagtgaagaaaaaaggacctcatctgcactctacctgacttgcagggcaaagtcagtattaatcagaggtgccctttttgctactgacagacaaagtagatgcactcataaccaagagcttttcaccaaaccctcagggctttaaatctttctcaaacaaactgcaatttgcaaagaaacaccctaaatgatgctgtgcaaggaagttacagcaggcacagaaggatggagtaacatttcaccatctgcttgtgataataataatgcctctaccttgcaaagtgtctaattgattgtgtgacacaggcacaaagttcctgccacaatttcaccaacaaaagttattcctaaattgtaccctcacagagggagagtgctaaggtcagtggtcctaaggaccaattttgagcatatgaactttctggtggcagaatgataagagtcctgggacacagttaggcaagattgaaccaactcaccctataatagttgtttcaagcaatgtccagccggggacacagagaacagagaggtaggggatggatctagggcagtgttttccacttgtggaatggaaaatgccttaaggtaatatggatgaacaactgtctgggtttcctgtggaggaagcctgggctgctttactctctagggtgttgagccagaaggctttattctggtacagccacctcattgatagtgaggtagcaatgcctgacaaaagtagatgttcatgctttgtgctagaagagcatagacttagccagatgccatctttttctaaattggcagcactcaggcctcaactgaaggggttgggaaaagtgagctggaaaaaagaggccgggagcggcagctcacacctgtaatcccagcactttgggaggccaaggcaggtgcaacacctgaggtcaggagttcaagaccagcctggccaacatggtgaaaccccgtctctactacaaaaattacagccagctacgccgaaggctgaggcaggagaatcgatcaaacctgggagggggaggctgctgtgaactgagattgcaccaatgcacttcagcctaggcaacagagtgagactcaatctcaaaaaaaaaaaaaaaaaaaaagacgggggcgattccaagatggccgaataggaacagctccagtctgtacctcccagcgtgagcgatgcagaagatggatgatttctgcatttccaactgaggtatcgggttcatctcactggggcatgtcagacagtgggtgcaggacagtgggtgcagtccactgagcgagagccgaagcagggcaaggcatcgcctcacccgggaagcgcaaacatgtaccacatgttctttatccagtctatcattgatggacatttagattgattccatgtctttgctattgtaaatactgctgcaatgaatatacacatgcatgtgtctttataatagaatgatttatattcctttgggtatataaatacccagtaatgggattgctgggttgaatggtagttctgcttttaggtctttaaggaatcgtcacactgtcttccacaatggttgaactaatttacactcccaccaacagtgcataagcattcctttttttccacaccctgaccagcatctgctactttttgactttttaataatagccattttgactggtgtgagactgtatctcattgtggttttgatttgcatttctctaatgatcagtgatgttgagcttttttttcagatttttgttggccacatgtatgtcttcttttgaaaagtgtttgttcatgtcctttgcccactttttaatggggttgtttttctcttgtaaatttgtttaagttccttatatatgctggatattagatctttgttagatgcatagtttgcaaaaattttctcccattctgtaggttgtctattcactctgttggtagtttcctttactgtgcagaagctccttagtttaattagatctcatttgtcaatttttgcttttgttgcaattacttttagcatgtttgtcattaaatctttgcctgttcctatgtccttaatggtattgcctagttgatttccagggtttttatagtttggggttttacatttaagtctttaagctatctcgagttaatttttgtatatgatataaggaaggggttcagttttaatcttctgcatatggctagcagcttaacccagtaccatttattgaatagggaatcctttccccattgcttgtttttgtcaggtttatcgaagatcagatggttgtaggtgtacagccttatttctgggttctctaatctgttccattgggctatgtgtttgtctttgtaccagagccatgctgttttggtcactgtagcctcgtagtacagtttgaaattgggtagcatgatgcctccagttttgttcttttagcttgggattgccttggctcttgggctcttttctgcttccatatgaattttaaaatagtttgtttctagttccgtgaagaatctcaatggtagattaataggaataacactgaatttctataaactgttaagggccatatggccatttgcatgatatttattcttcctatccatgagcatggaatgtttttccatttgtctgtgtcatctctgatttctttgagcagaattttgtagttccccttgtggagatctttcacctccctagtttgctggattcctaggtattttattcttctgtggcaattatgaatgtgactatgttactgatttggctctcggcttgactattgttggtatataggaatgtttgtgatttttgcacatggattttgcatcctgagactttgctgaagttgtttataagcttaagaagcttttaggctgagacgatggggttttctagatataagattatgtcacctgcatttgaatgcactttatttctttatcttgcctgattgccctggccaggacttctaacactatgttgaatggatgtggtgagagagggcatcgttgtcttatgctgattttcagtgggaatgcttccagctttgcccatttagtatgatgttggctgtctgtttgccataggtggctcttattattttgaggtatgttcctccaataaggagtttagtgagagttttttaacataaatgggtattaaattttatcaaaagccttttctacatctattgagataatcatgcagtttttgtctttagttatgtttatgtgatgaataacatttatggatttgcatatgttgaactaactttgcatcccagggataaaggttacttaatcacagggagtaagctttttgatgtgttgctggattcggtttgctagcattaggtcaaagatttttgcatcaatattcatcaaggatattggcctgcagtttttttttgttgtatctctgtcaggttttgatatcaggatgctgctggcctcatagaatgagttagggaggagtccctcctcaattttttggaatagcttcagcaggaatgctaccagctcttctctgtacatctggtaaaatttagctgtgaatccatctggtcctgggctttttttggttggtaggctatttattattgtctaaatttcagagctccctattggtctgttctaggtttcagtttcttcctgattcagtcttgggtgggtgaacgtgtctaggaatttattcatttcttctagattttctagcttatctgcatagaggtgtttataatatactctgatagttatttgtatttcggtggggtcagtgataatatcctccttgtgatttctgattgtgcttatttgaatcttctctcttttcttctttattagtctagctagtggtctattttattattaataattctttcaaaaaacagctctggattccttgatctttttttatccaagtaattgaacaattctacaagtattaaattttacaccaggaatgtatgaaggttcccgaatccttgctgatgcttgttattgttgtctggtttagtgggtgtgaagtggtgtcatattgtggttttgatttctatttccctaatgacagataacgctgagcatcttttcttttttttattatattttaagttctagggtacatgtgcacaatgtgcaggtttgatacataggtatacatgtgccatgttggtttgctgcacccatcaactcatcatgtacattaggtatttctcctaatgctatccctctcccagccccacaccccccgacaggacccagtgtgtgatgttccctgccctgtgtccaaatgatctcattgttcaattcccacctatgagtgagaacatgcggtgtccggttttctgtccttgtaatagtttgctgagaatgacggtttccagcttcatccatgtccctacaaaggacatgaaattatccttttttatggctgcatagtattccatggtgtatatgtgccacattttccttatccagtctatcattgatgggcatttgggttggttcgaagtctttgctattgtgaatagtgctgcaatacacatacatgtgcatatgtctttatagtagcatgatttataatcctttgggtatatacccagtaatgggattgctgggtcaaatggtaattctagttctagataattgaggaattgccacactgtcttccacattggttgaactaatttacactcccaccaatagtgtaaaagcatttctatttctccacatcctttccagcatctgttgttcctgactttttaataattgccattctaactggcataagatcgtatctcatcgtggttttgatttgcatttttctaacgaccagtgatgatgagcattttttcatgtgtctgctgactgcatagatgtcttcttttgagaagtgtctgttcatatcctttgcccactttttgatgggtttgtttggcttttcctgtaaatttgtttgagttctttgtagattctggatattagccctttgtcagatgaatagattgcaaaaaatttcccccattctacaggttgctggtttactctgaaggtagtttcttttgctgtgcagaagcactttagtttaattagatcgcatttgtcagttttggcttttgttgccattgcttttggtgttttagtcatgaaactctttgcccatgcctatgacctgaatactatcgcctaggttttcttctagggtttttatggttttaggtctaacatttaagtctttaatccatcttgaattaatttttgtataaggtgtaaggaagggatccagtttcagctttctacatatggctagccagttttcccagcaccatttattaaatagggaatcctttccccatttcttgattttgtcaggtgtgtcaaagatcagatggttgtagatgtgtggtgttatttctggggctctgttctattccgttggtctatctctctgttttggtgccagtaccgtgatgttttggttactgcagtcttgtagtatagtttgaagtcaggtagcaggatgcctccagctttgttcttttgcttaggattgtcttggcaatgcaggctcttttttggttccatatgaactttagttttttccaattctatgaagaaagtcactggtagcttgatggggatggcattgaatctataaattactttgggcaggatgggcattttaatggtattgattcttcctatccatgagcatggaatattcttccatttgtttgtgtcctcttttattttgttgagcagtggttggtagttctccttgaagaggtaattcacatcccttgtaagttggattcctaggtattttattctcttcatagcaattgtgaatgggagttcacttatgatttagctctctgtttgtctgataatggtgtgtaggaatgcttgtgatttttgcgcattgattttctatcctgagactttgctgaagttgcttatcagcttaaggagattttgagctgagacaatggggttttctaaacatacaatcatgtcatctgcaaacagggacaactggacttcctcatttcctaatcaaataccctttatttctttatcttgccttattgccctggccagaacttccaacactatattgaataggagtggtgagagagggcatccttgtcttgtgccagttttcaaagggaatgcttccagtttttatccattcagtatgatattggctgcgggtttgtcataaatagttcttattattttgagatacgttccattaatacctagtttattcagagtttttagcatgaagggctgttgaattttgtcaaagaccttttctgcatctactgagataatcatgtggtttttgtctttggttctgtttatgtgatggattacgtttattgatttgcgtatgttgaaccagccttacatcctagggtgaagccgacttgatcatggtggataggctttttgatgtgttgatggatttggtttgccagtattttattgaggatttctgcatcgatgttcattagggatattggtctaaaattctctttttttgttgtgtctcttccaggctttggtatcaggatgatgttggcctcataaaatgagttagggaggattccctctttttctattgaatggaatagttgcagaaggaatggtaccagctcctctttgtatctctggtagaatttggctgtgaatctttctagtcctggacttttttggttggtaggctattcattattgccttaatttcagagcctgttattggtgtatttggagattcaactttttcctggtttagtcttgggagggtgtatgtgtccaggaatttatccatttcttctagattttctagtttatttgcatagaggtgtttatagtactctctgatggtagtttgtatttctgtgggatcagtggtgatatcccctttatcattttttattgcatctatttgattctcctctcttttcttctttattagtcttgctagtggtctatcaattttgttgatcttttcaaaaaaccagctcctggattcattgattttttgaagggctttttgtgtctctatctctttcagttctgctctgatcttcgttatttcttgccttctgccagcttttgaatgtgtttgctcttgcttctctagttcttttaattgtgatgttagagtgtcaattttatatctttcctgctttgtgttgtgggcatttagtgctataaatttcactctacacactgctttaaatgtgtcccagagattctgctacattgtgtctttgttctcattggtttcaaagaacatctttatttctgccttcatttcattatttacccagtagtcattcaggagctggttgttcagtttccatgtggttgtgcggctttcagtgagtttcttaatcctgagttctaatttgattgcactgtggtctgagagacagtttgctgtgattccttttcttttacctttgctgaggagtgctttacttccaactttgtggtcaattttagaatacatgcaatgtggtgctgagaagaatgtatattctgttgatttggagtggagagttctgtagatgtctattaggtctgcttgttgcagagctgagttcaggtcctggatatccttgttaaccttccatctcattgatctgtctaatattgacagtggggtgttaaagtctcccagtcttattgtgtgggagtctatgtctctttgtaggtctctgaggacttgctttatgaatctgggtgctcctgtattgggtgcatatatatttaggagagttagctcttcttgttgaattgattcctttgccattatgtaatggctttctttgtctcttttgatctttgttggtttaaagtctgttttatcagagactaggatttcaacccctgcttttttttcttttttttttttctttccatttgtttggtagatcttcctccatccctttattttaagcctatgtgtgtctttgcacatgagatgggtctcctgaatacagcacactgatgagtcttggctctttatccaattttcccgtctgtgtcttttaattggggcatttagtccatttacatttaaggttagtattgataattgtggatttgatcctgtcatcatgatgttagctggttattttgcagacttgtttatgtggttgttttatagtgtcactggtctgtatacttcaccatgtttttgtagtggctggtagccatccattcttcccgtatttagtgcttccttcaggagatcttgtaaggcaggtctgctggtagtgaattctctcagcatttgcttgtctgaaaaggatcttatttctccttcgtttatgaagcttagtttggctggatatgaaattctggattagaatttcttttctttaaaactgttgaacattggcccccagtctcttctggcttgtagggtttctgctaagaggtctgctgttactctgatgaacttccctttgtaggtgagctgacctttctctctagctgcctttaacattttttctgtcatttcaaccatggagaatctgacgattatgtgttttggggatgatcttcttgtgaagtatcttactggggttctctgtatttcctaaatttcaatgttggcctgtctagctaagttggggacattctcatgaatgatatcctgaaatatgttttccaaattggttccattctccccatctctttcagagataccaaagaatcacagatttggtctcttcacataatcccatatttctcagaggttttgttcattctttctcattcttttttctctattatctgactgtcttgtttcagaaagccagtcttcaaactctgaaattgtttcctctgcttggtctattctactattaatacttgtgattgcattatgaaattactatagtgtatttttcagctctatgaggtcaattacattcttttctatattgactattttttctgtcacctactgaattgttttatcatgatttttagcttccttgtattgagtttcaatgtactcctgtagctcaatgattttcattcctatccgtattttgaactctgtttctgttatttcagccatctcaacctggttcagaacccttactggagaagtgatgtgattgtctggagaaaagaaggcactctggttttttgagttttcaggattcttgtgctgattctctctcatctttgtgggcttatctacctttaatctttgaggttgctgacctttggatgctttttttttcttttaacctctttgatgaccttgagggtttcattgtggtacaagatggatttgccccactggcttcgtttctggaaaattttagggggccaacactcagcttccaactcatggactgtgtgctgtaactctggggtacttgtattgttttaattttaaaacaggaaatggcattgctttattttcactaagtctattattactttctatttatggtcagtaatgctgctcttacattcatggtgagagtctgcaaattctgtttgatatgtgaatataagtaaataaaagtgagtgacttttttaaattaaaataataataataaaaaaaaagtggtctgcatatttggcccaaagcaaaaaagtctgggatcaactctccctgaaccccagctcttcccatcccaaccacctatttttcctcaaaagcctggatttgggtgtgaaggtttttagattctcctttcttctttacccttatactcacttgggatccttcacaaccagcctatcaacataatttgggaaaagttatttgtgcagaaaaggtctggttctttcctactggagaattgcagaataaacaaaacaaatgaatcaattcaaagacgctttcagcctccagcaactgttgcatttttacaatggtaaaaggcagccaaacctctcatttgcccagaagttctttctttttccaatggttttaaatggctctaaagagaatgatccaacttagcagataaaaggccaagcctcctgtatagagaggtcttaatgttttcttttcagctttggaaccccctgattattagcattgtatccttggacaagtcactgagagcctgaatttctacacttgacaaacaaggacctacttcacaagggagataatgagcatcaggcacttagttgagggtcaggcacatataagggctttaaagagctattacaattattattattttgtttgtttgttttaatatatgtatacattgtgaaatgattgccacaatcaaattaattatcatgtccattactgcccagttatgatttgtgtgtgtggtgagaacacttaagatctattctcttagcaatttcaagtgtacaatgcattattattattaactgtagttaccatgctataaaatagatctccagaacttcctccgctctaattaaaactgtatgttttaccagcatctccctattcccccacctcctcccagcccttggcaacaaccatcattctactctctgcttctatgagcttggcttttttaattaattaattttttaatagacaaataaaaattgtatatatttatcaggtacaacatattttaaaatatgtatgcattgttaaatggctacattgagtgaattaacatatgcattcatcacatctttttgtttgtttgtttgtttgttttttgagatggagtctcgctctgtcgcccaggctggagtgaagtggcgcatgtcagctcactgcaacctccacctcctgggtccaagtgattcttctgcctcagccttctgaatagctgggactaccggcatgagccaccacgcctggctaatttttgtatttttagtagagatagggtttcatcatatcggacaggctggtctcaaactcctgaccttgtgatctgcccacctcggcctcccaaagtgctgggattacaggcatgaaccaccatgcctggcccatcacatcattttttatagtgagaacacttaaaatttattctgtagtgcttttcaagaaaataatacatggttattaaccatagtcattatgttgtacaatagatctctttaattcattcctcccataactgaaattttgtatcctttgaccaacaattctccaactgcccaccctccgcgccaactcctggtaaccaccattttattctctgcctctatgagtttgactgtttaaaatttcgcatgtaagtgagatcatgcagtatttgtctttctgtgcctggcttatttcacttagtataatgtcctccagtttcaccagtttgtctccaataacaggattcccttcttttattaaggctgaataattttccagggtgtatgtatatcacattttctttatccatcatatattgatggacacttaggttgattctgaatcttagctattatgaataatgctacaataaacatgggagtgcagatatccttagaagacttattttatttcctttggataactacacactagtgggattctggaatcatatggtggttctaattttttgaggaagttcatactgttttctataatggctgtactaatgtacattctcaccaacagtgtacatgggttgctttttctctacagctcagcaacacttattatcttttgtctttctgataatagcctgataaagaaaaacttcagccaaattaaatttaaaggagtttaattgagcaatgaacagtttgtgaatcgggcagccttctgagccagagcaggctcagagactccagtgcagctgcgtggtagaagaagatttatggacagaaaaaggaaagtgatgtacagaaaatggaagtaaaatacagaaacagctggattggttgcagctgggcgcttgccttatttgaacagagttcaaacagttggctacatttgattggccaaaagtcagtgattggcacaagggtaggctatggtttgtttatacctccgcttgttatagttcacgatgtacggaaaaacctttaggctgaacttaaaatatgtaaggaggcagcttaggctaaacttgatctaacaaaccattctaacaagtgtgaggtgacattttattgtgacttgaatttatagtcccctgataattagggatattaagcatttttttcatatacttggccattcatatctcttcttttgagaaatctcttattattatcatcttcattatcactctaattattaataatgttcactaacccatacagctacagtgatttttgttacaacaggagctttctgctttcaaaaaaaagtgctgctaccttaagtaatcatttatcctaactctaggctgcaacttactattattattattcattcaacattcactcaacacttacttcctagagccactgtttgggcactggggaaatagcactgaacaacacagagcaaagtctttgccctgtggctcacattctggtgaagcagagaaacagtacacataataaatgaatgttaattacagtatgtttggcagtgatgaatgctagagaaaaaatagcctatgacctggcaaaggcattacccattaaggtaaaggacctatctcctagagcacttgagttttgtatcacataattcatcaaggcctttagatattacagtctgatctttgggccagtggtctccctgtgtcacaaggcaagcgggcctcaagaaagtaaaaaaggaaaatatttcctctatttgctattgccaaaacttcctccaagagggaaaggataggacaaaaagtattttgtgtgggtgtggcagccatagctaggctatcaaatactatgcacatatgatatgccactctcagtccctataatggcagatatgattaaggtttcctctttcctgctgagcccagaaccagcttcacaaactttttcagcacagttctctgggcaagcaactttagtgattaaagttagcctaaaagactaaatctatgtgccatcatagagtgcaaagttaggtttaaatgtaaatatatctagcaaaggtatcatactgacttaaaatcacactaagtcctaaatgactggtcttcttccaagtgaacattttattggaggtagggaatggctaagaagaaatgctgttaagtgtatagaggggaggggcagaaggcatgtatgaagaaaaggacaggttttataatcccacccacatttgtatctgaacatgtgtgtatggcaaacacacctgatagcaataacttaagcataccctaagaataaccctgtatggcagatgcacttgaatgtggttaggtgtcccaagctaagaatccaagaatggccaacccagagagttgttcctaatctataaggaacatctgagcccctggcctgtccaatggaacatggctgtatagggaatcaaggccctttgtttggggttaagtgaaggttgccaggtagagactgtcacagggagagtgctaagtaaatatgccatataaactgcatgttttttgcaagttgcctggttctcctgtccagcccactgccactggactctctcccctgtatgtaagcccccagtaaaagcccatgtcacgtttcctgtctctgggtctcttcttcagcctcttgaacctggtgccatccccactgaagttgataggtgttcagcacaacagtgtcattaggaatttctacaatgtcataagcaatgtcataaggcatttctacacactctcacttgaaggaaccacctccattagtgtaccttagtctttcacacaaacacatacctgagcccacaaataaagtgctcaaaaatagtggctctcttcttctagttgttcaggccaaacaccttggagtccaccaccaaatccttttaggacaaccttcaaaagattaacagccacttcttgccatccaaccataccatccatgataatccaaccatttcttgccagctctaccctgacctccaaaatcaagccaccaccaagtcttggcaagaagggctacaataattccccaacagtctcagcttctgcctgtgatcctggactgtctatctctacttaggagcctgctaaaacctaagtcaggtaacatccctcctctggccaaaaacctctagtaccttcctatctcacccagagtaaagtcccacaaggtccctcacgctcttgttcccaactgtctctcaggccgcttttctcttgccctgctttgtactcttccttccagcccacaggcctccatgctttcctcaaacaggcctgctatgtttccatcccaagaccttttcccttgctgctgcctttgcctgggagacttttactccaaggtgccatatggcttcttccttactccagtcacatcttcaatgtggccatgagaggccctgctagatcacttgatctaaggcagcacacaagccagcccccacctccaccctctccctctaattctccttaccttgtttgataattcctcatggcatttatcactttctaacccaatatccttccttcctttcctccctccattccttttttccttcttttcgtcactatctgtcttccaatagaaaataagctccatttgcataggggcatggtctgttctactcattcttctgcctagaataggatctggcccagagcaggctgaccaactctttactaaaaactcatccgtcactgagaactagcaccacaccacagaaggaagaaggctctgcatctacaaaatacagctgctttgtttgagtgctttgagctctgtctcctgtaactgggtgacaaaggtctaaacacataatgatagtgctggtgtgatagaaagtgaaagttctttactcttgaaaaaaagctagattttatcaagtgctggatttgctcagtggcatttaggttttaccgctataaaacaatattcctatttcttaagttcttgctaggaaaacaagtaactttgatttttcagtctgaaactctccagcgccccttaactatggcccccgaaacaaacattttatactgaatttttgataacacacaatttattaaaatgcagctattacattagtgcagaataagctatatacattctaagatttagcatgctgtcaaaaggtttcctcattggaactgatagctacccctaaagcagagatggtcttgagcatatcatttacccactttaagcctcggtgcctttaatctgtaaaatgaatggctacaccaggctctctctagcatttattccaaatgatacattcaggcaggcaggcatgggatccagtggaaaagacttgggatttggagcttgagatctggctctgtcacttacaagccacactgaatctcattttttttcatctataaaacattaatcactggaaataactaccttgtctataccaccttttggtatcttaggacatacatttggaggatcaccaagacagggctgtgaggacatctatttggtttcccaggatgagcagagtacctgacacatcacaggcactcacgtgcatttgctgcgtggaggaaagaatatatggacaaataaaaaaacacttccacacctccccagctgttgtaaggacttactaaagcaatgcatgttgaaagagctttttaaattctaaagtaatacaaatgataataattactgtgatagatctatttcacatttgcccagttcagccttggttgtcatactaatttaataccaacatgactggaactggaaagaaactaatattgattgaggtcttactatatcctaagcagatacatatgtacgtatgtgcacgtatataatttgagtcttctacctttttaaccaggtgggtgtcttaatgtagttataagttctagccagcagaagtcagaaactgagtcaaaactgaactcacaaatcagtcaacagttacttagcactcagtacttgccagcctctatgcgtggtgctttgcaggcatgggcacattcagtttttcaacagcctttgaggtaaccacagatacccctttttatagatcaggaaacacagactcagagcagttaagtaacttgcttcaagttaacagctaggaggtggcggggccaaaatttcactgtctgacttcaaagtccatgcccttaagcagtatatattatgcagtacattcatgtaagcttatcactgaaggtatgcggaataattcgggtgcttttatttttgttcaataaaaagctgctttagcactctatcaccactgccttaatttttttttttttttctaaaatgaaaatctgtgcctgggaatatgggtataactaaaaatgggacaggagaccacccccagaaagacaggcggccccagtttcaagttcttatttctcacattggcccttctggtgtgtcccagctgtattgtcataacctatagggaagttccgcagtcaggaaggccaatgacaatatatttcccctgacaacaccctggtccctttctgagttattcaatgacaattgaaatgtcttttcaatattttcttttccttttcagggcaaacatgtccacttgagtcattatgatcatcagctgttctgatttgcaagcagttcctaattgagtaggactagtgaatgctgtgagatatgaaatatcttgctgctaaattgcacacaggctgaaggcaataagaatttgtttagctatgcatagcgctttatattcagggaccagtggttatggagacactaaaaccagtcatcattaggacaatcctatcttggctaccagagaatgaagatccccacacagagctacctgaacagactaacggtcaagaggctgatgaggcattaatgagaccatgaatcaaaatttaccaaacaaacagtgcctccaaggcttctagttgtttctgtttgactttatcttggaactaactatggaacaagatggctgtgtttagatgtcttcattcatggcctatctttgaacactgtgtgtgtttatttgtttgtttgtttgtttgagacagagtctttctctcttatctgggctggagtgcagtggtatgatcatggcttactgctgccttgacttcccaagctcaagagatcctcccatctcagcaccccaagtaactgggactacaggcgtgcaccaccaagactgactaatgtttttatttttaatttttgtagagatggggtctcactgtgttgcccaggctgctctcaaactcctgggctcaagtgatcttgccacctgggcatcccaaagtgctggaattataggtatgagccaccatgtctggcatctttgaacaattcttccaagcaactattttgacttcatttctttctaggaaaaataaataaacaagatcatagagttatattatacaatataaaatccaaatactgacaaaagtcaaccatattagtcactttccactaaataaagttgtgtctatggttctttctctgggaaaatttaccatgtagtaactatcatttacttagtatgtgctaagcaccatgctgagagctttgttcctaactcttagttaggttaccttagaaagccccccacacctgggttatttcctagttctatgttctaggtacctctctgtcattaagcttaccacaaactcatttgtttatttgacatctctcttgaattgaactgtaagagtcactagagccaggaccatgtctatctttgcccccattgtaaccccagcctctaacataacacatgatatacagcggatgctcgataaacatttgaggaataaatgaaggaagcaagtcgaagaaacatccctgggttgctatcgctgtaagcagtagaagttgcatttgaattcagactccaaagcctgtgttcctcacctgcagcacacggtctctgtctgagctgaatagtctgttgcatcaaaacacatcaaacaggaaataaacaagagcaactattattaccacggtcccatacagccactagagagcaaaaggggtttctctatgactattgaggtatattaaggactcattacagaataaacactactgggcacaaaagcatatgagaaaagttttaggagtacaatgaaatcatgcccaatctttcctcagggtccctttccattctctatttatattgtttccagtttattattattataactgaacatttaggacccaagggatgttggccagtggagctacagaattctcagtcctctgaggaacctagcaactagtgttttcttacctggctcttaggagcaaaaggagaaaacaaatgtgcatccctgagctgttgtctagcatataaaaaagatgctattattaataacattttgtcttattaacatttgtcctactgtgatttattggcagccagaagcccaagctttaggattagtcagacctgaattgagccacttagttcttgtagggcctccaccaagttatgtaacctcaacctctttcttcatgcataaaataggattagtaatactatctacttcacataagtgcttggcatagaatctggcacagaggggaaaaaaaaacaatcattggtgcttattttcatcagcttcctcctaattattatttagtcagctgtgagtaaaaagaacctagcgttggccatggaacctggaaatatgacctttgaccctgtcctgttaatgcaattgtagtgagtgaatttttttttacgtgttcccatccccgagcagtccctccctctctcaaggacccggtggacttcctggtcttggcaaagtatgcaacacacatttacctttatcctgccagggaagtgaaggtttgagaccattaagctgggggcttcccacctacagtagctccccaatgcttccagtacaaagtttaaactccttagcttgccactcaatacccaacatcatttgatccaagcaactttgagcttgacatcagggccaaaagatgctttttccacttaagaacagaaattcagtccagtagactagtggaggatatgctaatattttacttccctttccatccggaacagataatatggtaaatcatctgttcatttagtcagaaataactgttgttctaggtgttggggctataactgtgaaaaagaagacttgattttatggaatccacagcctagtgaaagaaagagacaataattaaatggtgccattgtgtataatcagtggataattataattggaaataagtgaaaagcaagataaccatccttggactggaagagaaaatgccaaaagcccagaggagggctaagagttcaccatgtgaaggaggtatcactgtgtctagagagagcctggcatagaatggatctgaaagcctgataagaggcaggagcgccaagagtaaaggccaagcacaaggaggctggagcaataggtagagcccaactgtccagtgggaggaaggggaggaaatgatgggagataggcaaggaggggtgacagcaggaaggaaggaaaatgaacaaatgccagatatattcagcagataaaatagaaataagctgctgataaaatggatgacagggaagggaagtcctgagggtgtggcaggtagccagaatgactctgagatttgtggagtgtggaaataaaaggatggaagtgccatttattaattttattcttaaagataccttgagacagttgagaggatatgatgagacaactgcatgtatacagttgtgcataaggttcagagaaacactccggctggccattgcagcttgtaggaaagtatagggcctgggaagaagagtattgaaaaaagaaaaaggtgacacgctgttcatatgagagatgcaagaatgaagcaatagtggcattccacaagccaggactgagaccgtctcccaaacagccagatgactctgaacctcaaaccaacttgcagtcaccttagaattttattagctgcaccagatggcttacataatatcattaactcctccaccctcactacctaaaaatgctagaagataaaagggacggctgaggaaaatcctggaattttcttacagaaacaacatttacaacaggtaactagcccatcagtttctctagtatttctcagacatttccagttaagtctctagaatgacaaaagcaaatgatcctcgggtcttggtggtgccatcttaagtttccctctgtaaatgtaaatgatttttaaagcctcgtctagtactttaaaaattcatgcaaattttgcatgttactgcataatatcattatgctgcttttaatacgtacacacacttttaattctcccaaatactgaagcaaaaatgatgtgccacaaatgtgcctccattattagcctgtgactttgggaatgcccttgtccacagctttgcatgcagggttgaactcattaactaagttgagaaccatgaaattaatcagaaatggactagggaagtttttccttagagcagaagactagagtcatgacctctaaaaatcactcttcgttcctacaaattctaaaataagtggtaataataacattaatattaaaatcacactaagtggattttaaattcattctctcacactagaggtagttactatggtacatagtatgagagaggtatcaatttaaagataaagatgaggatacaaacacagaaagttaaagtatctttcaaagcaccataatttgaagccagacagttctagtccaagccaaactactattgtcctctctgctacatattagcagcaaactcatcttactactcttgctgatggcttatatttggtgataatcaagaacaatactgaaaagcatgcttcaaaaatagaaaaaaagcttcatcttccccaaacataattttatttaactgaaaaatatcagtgtgcaaattgaacatttttggtacataaagtcaagtgttactaattaagtaaatgagtgatgaatcataatatcaacccagtcattaaacaaaattataatgaaattacatttaccaactagtttacagtacaaaaaatataatgagccaactttaaagaaagcttccaataattttattaaggccttccaataattttatttagttaaggattctgttgtattatcttaaaagattaatacaaatagaaaatggaagagtaaactgtgcaatgacttctgtccctctcaacctttctctagagtcacatcttttaagcaacatgagacatgatttaattcacccaagagaggtcaccttgcttgccgggcaggtgccttctgtttaaattcagtttactcaatcaaatgtaccacggaatagaaaatggggcatattcctgtcctgaaattcttcctatgttaactaaaatcaccttacttttgtagcaaatgagccatgagatacggtgccagaaattgatttggaagagtaagtacacagtctgaaaacagtgtctgtatgttttgtaataaaaaggctctggatggccctagatgccaaagagaggctataaaaggacaaaggaatgcaaacaggggcagaactatacaaaaagattaaatgcatcaccactaaaagcgatacttactcttctataaacatatacatttactgattgctaatttttatctgacgagtggttttgaggtggcctcagtgcaatgtcatctcccctgagcttgtgtcttggacctagctagagtagatcattactccccaatacagctcccattattttcttcctagcactttaaaaaggctctaattattttctctttagttttccacttgctaattgcctatgttccctttgtcattaccagtgcctagctcagtgtctggcccatagtgagaagatactataatatatttaccgaacgaatgaacaaagctgcgagtggcaaacaggatggggcactcttttgagttcatttatacaaatcagattctatttcattttattaaatacttttatttactcattgtcttctgaaattactctgggttctcattaataaggagaaactgattctatcttcaggaaggaggggaaaaaacactttcagtcacttgttccaaaggtctttcaaaataatgttgtagtataatttggtttgaaagcaaggtccaacattttattacctccaaatttattcagaaaagctgaaggcccgtgataaggctcattaagtcgctgaaaggcctatcttcacgtgcctttcacacaaaaggtctcaacttaatgccaggtaattactgttcattttcccctggttatctctatttcctgaagattcccagagtagttggcctcagtggacactacccgcagtctgagatgtgagcagagcaagaaggacccatgttcactggaggatctttttggagctgtaacgaaagacaatcctaacactggggtctagaatttaaacttagatcatctacaagttaccctctatccagaattaaagccaagagggaaaagtttctggcatacaaactggtttgtatttccatttcaaagacatcatttttcatagcacctggacctcattccacacctgtagggttacagatgtgggccctggctccagattacctgggctcaaccctcaacttcatcactttccactttgtaactttgagcatgtaacttagattgtcagtgtgtcagttcccttatttgtgaaatagggctcattgtacctactggagtgttgttgtaagaattgaatgtaaagtagaaggaactttatctcacacatggtaagttctccataaagttatttatttattaatattaattagcattatcatgatcgtctctgatatcccatttgcaagcaggacttatccctgttatttataactttgatcctagtcccactggacccatcatggcattgagggagatcaaatttcactatttgtgaaacaagccaacagaaggtgaatgatgatcagggaagacattttactgggcaccatcatttcagttttgcacggaagagtggtatagccccttagaggtcactgaagtcaccatccccaagcatacacctgtttttatatttaatcaattgatggctgcaatttactaatctgcactgcagtgatcctacaatagccttccctcacagtgggctctcctcacttcagccaggtcattcataagagcttagcttcatagatactgtgatagtaattttttttttttcgagatggagtctagctctgtcgcccaggctggagtgcactggtgtgatctcagctcactgcaacctccacctcccagggtcaagcgattccctgcttcagcctcctgagcagctgggattacagccaccatgcccagctaattttttttgtatttttagtagagacggggtttcaacatgttggccaggcttgtcttgaactcctaacctcaagtgatctgcccacattagtctcccaaagtgctgggattacaggcacaagccaccgtgcccagcctgttatagttaattttactgtcaacttgactgagctaagagattcccaggtagctggtaaaacattgcttctgggtgtgtctgtgaaacaccctgtgagggtgtttttggaagagattagtatttgaacctcagtagattgagtaaagataactgtcctcacaaatgcatgtggccatcatccaatccactgagggcgcaaataaaacaaaaggcagaggaagggtgaatttgctctctcttatggagcagggacatcagccttctcccgcccttgggctgggacttacaccttcagttctctggttttcaggctttcagactttaactagaactcacatcatcaggtctcctggttttcagcccttcagactcaggctgagactataccgccagcttttctgaatctccagcttgcagacggcagatcatgggacttctccacctccataatcaaatgagttaattcctcataataaatctctttttattgattctttttctctggataaccttgattaacacaacctctgagttacaagagataattaaatatagcagctgagagcatgagctcaaaacttgaatgacctgggttcaattcttcactgtcactagtgaaccagggcatgttactttatacactaaggctaagttcaccatctagatatagggttaatagagtggtaacaaatccaaaggactaaggactatgataaggattatataagatcactatgggtgactctgtaaaactcttagcatgttgtcacttatataacaaacattcaataaacattagctactatatttagacatgtcttgggcatgtatgttccagaaatctttttatattagatggtcactacagaaaggcaatctatatgccaagcttttcaatgaagcaaacattatatttgaatactgagtcttaacctcaaaaggttacagaacaattttcattcaagaacaaatcagaaatcacaggttggagtgtacatcatcccttggcagtctcagcaagctaaccctacctaaagtgtcagaagacttttctcgtttacagaaatgcctttagaaatccccaaccaaccactggtaggtccccaagcttcagtcttcaaaggtggcacttttgcaggctaaaaaatccaaaaaccagaatgtctcttctcctccaaaggatcacaactcctccccagcaagggaacaaaactggaccaagaatgagtttgacgaattgacagaagtaggcttcagaaggtgggtaatgacaaactcctctgagctaaaggagcatgttctaatccaatgcaaggaagctaagaaacttgaaaaaaggttagaggaattgctaactagaataaccagtttagagaaaaacataaatgacctgatggagctgaaaaacacagcatgagaacttcgtaaagcatacacaagtatcatagtcaaatcaatcaagcagaagaaagggtatcagagattgaagatcaacttaatgaaataaagtgtgaagacaagattagagaaaaaagaatgaaaagggaggaacaaagcctccaaggaatatggaactatgtgaaaagaccaaacctacaactgattggtgtacctgaaagtgacaggagaatggaaccaagttgaaaaacactcttcaggatattatccaggagaacttcctcaacctagcaaggcaggtcaacattcaaattcaggaaatacagagaacgccacaaatatattcctcgagaagagcaaacccaagacacataatcgtcagattcaccaaagttgaaatgaaagaaaaatgttaagggcagtcagagagaaaggtcgggttatccacaaagggaagcccatcagaccaacagcagatctttctgcagaaaccctacaagccagaagagaatgggggccaacatttaacattcttaaagaattttctacccagaatttcatatccagccaaactatgtttcataagcacaggagaaataaaatcctttatggacaagcaaatgctgagaaatgttgtcaccaccaggcctaccttacaagagctcctgaaggaagcactaaatatggaaaggaaaaactgttaccaggagctactgcaaaaacataccaaattgtaaagaccattgacactatgaagaatccgcatcaactaacgggcaaaataaccagcttgcatcataaagacaggatcaaattcacacacaacaatattaaacttaactgtaaacaggctaaatgccacaattaaaagacacagactggcaaattggaaaaacagttaagactcagaggtgtgagacccatctcacatgcaaagagacacataggctcaaaataaacgtatggaggaatatttaccaagcaaatggaaagcaaaaaaaagcaggggttgcaatcctagtctctgataaaacagactttaaaccaacaaagattaaaaaagacaaagaagggcattacataatggtaaagggatcgatgcaacaagaaaagctaactatgacactgaccaagacaatcctaagccaaaagaacaaagctggaggcatcacgctacctgacttcaaactatactacaaggctacagtaaccaaaacagcatggtactggtaccaaaacagagatatagaccaatggaacagaacagagccctcagaaataataccacacatctacaaccatcagatctttgacaaccctgacaaaaacaagcaatggggaaaggattctctatttaataaatggtgttggaaaaactggctagccatatgcagcaaactgaaactggaccccttccttacaccttatacaaaaattaactcaagatggattacagacttaaatgttagacctaaaaccatagaaaccctagaagaaaacctaggcaataccattcaggacataaacatgggcaaagacttcatgactaaaacactaaaagcaatggcaacaaaagccaaaattgacaattgggatccaattaaactaaagagcttctgcacagcaaaagaaactacgatcagagtgaacaggcaacctacagaatgggagaaagtttttgcaatctatccatctgacaatgggctaatatccagaatctacaaagaacttaaacaaatttacaagaagaaaacaaccccatcaaaaagtgggcgaaggatatgaacagtcacttctcaaaagaagacatttatgtggacaacaaacatatgaaaaaaaacctcatcatcactcgtcattagaaaaatgcaaaccaaaaccacaatgagataccatctcacaccagttagaatggctatcattaaaaagtcaggaaacaacaaatgctggagaggatgtggagaaataggaatgcttttacactgttcgtgggagtgtaaattagttcaaccattgtggaagacagtgtggcgattcctcaaggatctagaaccagaaataccatctgacccagcaatcccattactgggtatatacccaaaggattataaatcattctactataaagacatatgcacatgtatgttcaattgcagctgttcacaatagcaagacttggaaccaacccaaacgcccattaatgatagactggataaagaaaatgtggcacatatacaccatggaatacgatgcagccataaaaaaggatgagtttatgtcctttgcagggacatggatgaagctaaaaaccatcattctcagcaaactaacacaggaacagaaaaccaaacactgcaaattttcactcataagtgggaattgaacaatgagaacacatggacacagggaggggaacatcacacactggggcctttcagtggctggggcgctagggtaaggatagcattaggagaaatacctaatgtagatgacaggttgatgggtgcagcaaaccaccatggcacatgtatacctatgtaacaaacctgcacattctgcacatgtatcccagagcttaaagtataataaaaaaaaaggagaagaacaaaaaaaggtggcattttttcaaaaattgtattaagtgataagatgttaacataaaaattattaagatgaccaaaatacattagaagaagcagaaatcaaaggtaggcatgcagtagggtctctttaacctacttcttcttgttctatcccccacattatgcttgctctgttaatggcaacatttactcccttagtgtagtaataaatgttcagcaactgggtggtgggggtgttctaattgtagtgtttgccaattttcatggtgtaaatacatactctcaccatggctggcttcaagataccaacatgatatcactgaaaagggagttgggaagagaagcttataatcagctcttacaaatacgtacaacatggatactcttgagcccaggaaaagaaaaggtatgtgaataacatagtatcaaaagcatctagtctcttcttgagccatcagcccattcttgtcaggttcactattgggagcatggagaaatatatgaactgaaagcaaaagttatgaaggcaggggatagaaaatagtatcattaccactgaagagaaagaattgtattttttcctgtacgataggcaacatggcacacagacataacaagtctgggttgaggacggctattagagcaaaacgtgttttagaatcagaattttatattttaaaaccaattggcatgattcttgcatatgtatcatgagtgtatgattgcctatgcatgagttcagtattaagaaatagccaaaactctctgtggtgtaggacttccatcacaccaaccaggcagagaggctttctttgaatgcccgaactctgctcattctccatcatcctccattaacggagggcagttaatgcacatatctgcctgtgtggtggtaaatgcttaacaacggctggtggtgggatgggggtgttctaattgtagtgtttgtcagttttcatggtgtaaatattaatacatattctcatggtggctggtttcaggctaccaacatgatatcactgattagggagttgggaagagaagcttataatcagctcttaaaaataagtacaagctagctccaaaaatgtctatactatgtttccaagagatgaaaacctcatggacaaatactctttcgcgatatatatggttgctgtaaagtaatttttatatggttcattgtgagagtttaagtattacttcttttaagtactagaaatggaaatataatctctaatcccttttctaactgaatgaaatgttaacttcgatcatccatctgtgcagttactcttctagtaaatgtgattttttaaactttctctcctcttttcagggctacatctgctagtgttttccatttgccagctcccaacatgtccccaattacttcttttttattttatagcctccatgctgatgtttcatcagttacaactgctgggttccactgagcattaacagtctgcagtgcctctaggaggttacataattcactaagtataccaaatcattttttctccaaagaatattatttaatgtaaatacagtgtgaggttaatgtagtacaaaagaaaggtttttcccttagaatcatcaaaaaactgaaaaaaatgattcacggaagaatggtttacacgcaggaacaagaaatcacttgtatttaaggattatttcaactggcacttttttactaaacacaaagcaaaaaattaatacatttgagtacatgaacaagtttgtgttttacctattgaatcaaaatatttttaccacaagagaaggaagctaaaactaccttatgttaggcatatgcatacttgaaaacttatgatagaatagatatttgaaatcattttagtcaatagcaaagcaaaaggaaggatcaagaaaaagttctttgttttgtttttaactcaatttttcttataaatacctaattgttctccataaaaagttcataaataacctgatggatgatctgaaaatttccaggcaggtagcaggaactctctagaagtaaatgtcccagaaactttgcaaatcaaatcactcaattcttaatagatggcttaaaactgggtattacattgcaaagttttatgaaaatcatctggcaaacaactgtcttttcttcaagatgtaaacaatgaaacaattaggtttaaactgtctaaaactatgtgctcaagtgtccccttttacatcagagtctaagtgggacaatgatggagcagttagaattttctcaggtagtcagatggggaaacaggaaaaggatgggaggaggagtaatcattcaaggaaatttttttaaatgacagtatcaatattgaatatttctggagtatcaatcattatagtatgcccttgacatatagaatcttctccagtccatatacactgtgaagtaggtattacctatccaattttatagataggtaacaggatggtgagttgctgctcagggtattaagtaagtgaccaagatccagtgcttagctaagtcttgtcttcaacagtgtggagctggggctgggttgggacctctgtggtccaaagccccagccacttgacttcatactgcagcttctggttggtatctatggcatctatgagtctgacagctatattttcactcattttcagtcaaatatttatcaggcatctacttgagccagacaccatcctaggcagcagggcccaataggaaacaagacagaaaacaaaagtaaaaaaaaaacttgtcttcatgcctttggggtcttctttgtagttgagagagaaagacaattgtattagtccattttcatactgctataaataaatgcctgacactgggtaatttataaagaaaagaggtttaattgactcacagttccacatggttggggaggcctcaggaaaattacagtcatggcggaaggggaagaggcacatcttacatggtggcaggctagagagagcaggtaagggcagggaaaactgccttataaaaccatcagatcttgtgagaactcactccctatcaggaaaatggcatgggggaaccactcccatgatccaatcccctcccaactggtatctccctcaacacatggggattataaggattacaattcaagatcagatttaggtgggaacacagagccgaaccatatcaacaataaaacaaaataaactagtaaagtatttagcatgttagctggtgataggtgctgtagagaaaacaaagcccggaaggagcgtggggagagtaccagggtgggtggtggaggaggttccaacttgaatggtgtgggcctcatggaaatcttgtaaaaaccccaagaagatgagagagcaagccctactgtacaagttcctggaagtaaagcacatagggctgagggaaatgaagggcagagcaaccctaaaaggctagaagaaaagtagagagcctggagtggaatgaccaagaaaaaagcaggaggaagggaggtcagagaaccacaagcgcggtggcagatgatgcagggccttgtaagccaccatcatagttgccatctcttctccaaggcaagtgagcaggttgtgaaccaaggagggatctctccccaacttacgctgtaacagaatcatttgacttcggtactgagaatcaaccaaaagatgtgaagaaagaccccttatgagcctgccacaataatccaagtgacaggtgacagtagcttgggcccaagccatagtggtggaggtgatgaggcatggttggatgctggatgtaagactagacactgccatggctatgcagtttgttctgccactcagttgtttggcatgacacaaactcacaggaggaattttatataaaagatcgatacaggtgagataagatctccaattcttaaacagcagagaaaatcaaatgttaattggcaaataaaatgccaagaagatgtgcttgaaataattaaaataggcaaaggattgatcacctaaaaatagaagcagaaaacaaaccccccctgacagttttcatctctcacagttaaatattaagctttcctcttaagagtaacttggccaggtgtgatggctcacacctgtaatcccagcactttgggaggccgaggtgggtagatcacctgaggtcaggagttcgagaccagcctgaccaatatggtgaaaccccatctctactaaagatacaaaaaatatttttttttgtattacagggtgtggcctgtaatcccagatactcaggaggctgagacaggagaatcacttgaaaccaggaggcggagactgcagtgagtcgagatcatgccactgcactccagtctgggcaacagagcaagactctgtctgaaaaaaaaagaagaagaagaactttgtatttcctactttgctctacacatctacacatagaaggtattttaaatatttatggtttgttgattttaaaagaggctttgttaaaacgaaagtattaaacgggtaaaaaatagaaccaagtctgtgtgacaatacactagatttcaaattctcttttgcaagtatttattgaacactttctacagacaaggtacaatgccagatattagggatctgaagagaaaaatcagtaaacaaagttatttagtgcaaggacaacataaacaataatgaaaaaagaaagagataaactccagctgaaaacataaagaccacataggacctgtttgttaaatataagattcacagaatacagtgcaaggccagggaataaatgaaaaacctacaactttgatgacttattgtaggaccaggcatattacttaacatccccgatcctctatttcttcaattacaaatgaaatataaaagtatctcttaaaacatgtcagcagggtcaaattatataacttagaagataatagggattcaatatagcttagcattcttccctaattttttttaatctaacctgcaattacaatataggcgacaacattttcagagctgaaatgcgcttccgtcagctacacagtcttcatgatgatgtcccatccacaggggttatatgtgggcccgtcctagtttggtgttctctttgtgtgccaaagaaatgattatcccccaaaagcagcagccatcatttgagacctctctagttcgttgatttcaaactctgttactactgggatttaaactaaagctttaagattgaaaagaataataaatacagcaggctctcaaaagggaaacacttatcttgtgaaaaaacaaggttgtttttttttttcttaattctcaatgttcattctggaagattcaaggttatctactacctgtttttcttcctctccaatgctcaactcgaaagttgttcaaaaggttcactggcatacataagcctggaccctatacatgcttcctacgtgaaatatgttcttacttaggaaaaatgccaagctccagtaactgtgacctacataaattctaaggtgcaacgtaaggagggcaagcaaggcattactgaattgtatatgtcacgccatacaagctgatgtgcagctccctcaaagtctcaaaggcctcaataattgtaaataaacaatgtccttgagtccaaaaagactatgacatcccacaatcaaagtattaacttggaaagcattgcctactttgtattttctagaaatgtttcatgtgttcatcaacagcatgccagtcccaatgtaagacacaaacacagagacattcagtccatatgacataaggttgaaatcatcctaattgtcgacatgagaaaatgagaaagcaatttgtggcatctaaatacatgcataatttttatcccgtctggtttttgctctggttctgtgcaacctgaaataaggagagtgtgcaactgcttggtgacagattgcacagggatggaggactgtaaatggatgaatagttggaacatggttgaactcaggaatgaatgaaccagactctcctgatgaaatggctccactctggagatggagcccaggagagatgctgaattcactttttcacaccccagggatcaatttggttaataacctctctgctgccttaaaatcacttgggaacacctgaacaaaatacaaattcaaagcaagatcttcgaagcttagagaaactgaattgaatcaggaggtgaaaatcttgaacattgactatttcagctactatacacctatgtccatccaatttcatcaagatgctgaaaaagtacttagggtaataagtatgaaaaatgttacacttcttggaaaaccagtgcttaaatgttcagtaaatgataccttgtttctgaatttccctagcagcactgaattcttaatcattcacttatccatttaatcattcaaaagaaatttatatcttcactttttctcctgattgcatggtaatacctgcttactgtaaaatattcaaatgagatagtatcacatcaaggagaaagtataagtctctagaaattccagaaaatgtgtatttgttaaccactacattctaggctgtgtgctagaggtgccacagagttggcaaagtaaatctgaaaacattcctgtcctcaaaaagaccagagtctagtaagagagatgataacaataaaagtactaaaatatagtacaagaagtaatgcaagtcataaaaaaggtctgaataaatgctataggaggtccaagaaaaagaaacgtctgctacctaagaatgtccagggaaaacttcctttgcaaaaagaacctgtttctgccatttccttgaccatacaactccacgtgttgtgttacttatgagtcctctgctcagtgccgaaaagatttccctatactaagatctcagtgcttcgtttaacttgtacaaaattcccaaatccacattcttacaatttccccaaagattcagcaattctgaattccggtacacctcctaacagggtaaacataaagaaatcatttgatcattagttacttaccattatcattgttcacagaaattggggaaatggaaaactataagactggaaaaagataaatgttcccccaggccctctcaaaaaaataaaaattttggacaaaataaagaagctctaggttaggaagaaggataagaggcacacgaacacaggagcatgccacacacatttaacactcaatacacaagagctaaagagaaggctgtgtagggtcaaagtgagtttgaaatacataaaagctgaggctatataaaaatctgcatttacgataactcttctaggcagggaggttgttgagtacagacgaaaagaaccaggagaccagtggtgacagaggattctgtctttgagaagctgggagaactggaataagacacttaaccctttgggtttcatgattctcattattaaaataaaataatgatcctaggcctgtatgaaattcaaatgagataatatatttgaaagcattttacaaaacagttcataatgtattttataaaacacatagggttaaagtagttggccaaagttctaatgaaagattagttgactcaggacataaatctgaattttccaaatgaccaatcccaaattgttacctctactatcccttagaagtaaaaaaggatttaaacaactcaacaggtaaaaataatacttcctccacaataaataccatatcatattcccctttgttcctccagcatctacacagtgctttgcacagagtgagtactcagtactctagaagcaaaactcatctttctcctactctaccttcctatctcttagcaactactaattttctgctgcatttttagtggacatcagcatcagtaagttgccatcccaaggaacaaagtcaaattggcaaaaaggtggatgggctagcatccatctttggttgttatcaaaatattctccttcctcagcacactcaagtgaaggccataagtggactgtctgggccgaaagtctccccatacttccaccactcttgtatcattaaacattcttcgcagccttggtcaggagaggactgcgtggatgggcactggacatgcaaagtggcccaggtacatagcagtcttgtcaagcttggagagtagtggcccactcttggccccaggccactgccatttgcctgtcatttgtaagagcacagaccagaacatgagcccagtctgctgtgcacctcacagcaacatcctgacaattctgaaactcaaaaaaggtttcgttgtttattgggtataagccaggcaggactgaaaaggaattctttaaaggttagtggtgcaatactggataagagctttacacatcccagtcttccttccttggtgtcagaacgggattaacaggaagactggccaacagatgcccagggtaccaatctaagagggtactaaaatagccccagaaaactaacacaatgaagaaaacagcatttatcagaactttcttcaagaagggaactgggtttcattgtaagaaatacttcgataaaacaattgaggtagaatagggatgatatgctttgaaaaaactaaaaacaaggccaatataatgctttcatgtagggtggttccaacaatcaaagggctttcattttgctaagctgagtatggaggccaggacactgtaatctgttgtcatcttcctccacaagcagcactactcaaatctgttacttcacttgattgctgaaggaatactgaattagtctgcatgggccacccacatgtcttagttgagccctacatgagatcaccagttctcagaaaaggtctggctgttctgtttcagttccccagtttccatttcttgtctcccttaccttattcatccatagacaattcaattacaaatatttactgaacacctgctgtatttcaagccctgggaaggaagagatgagcacaacataatcttggtgccagataaacacatgtcctagacagacaactaagttaatataaggcaaatggatgggagctctatgagagaaacatacaaatgcaaacatggggatgccgataaggagtgagggaatgccttatggaaaatgtgacatttacatagggcctcttaggattaggaggagctgacaagtgcaaaagaaggatagagaaacccaagggtgttgaatgaagggcacagtgacttgagcaaactgtaaagagtccacagtgaccacagcacaggcaacatggttaagagtgcagaagatgaggctactgataaatgtcagagccaaaatttgaaaagtctttgaagccattccagaacgttaagatcttactctggaagcacaagggagctatcgatggttttaagccagaagtaaaagaaaaaaaaatgtggtagatttgtgttcagtgaaagaactctggcagaaattgaaaactaatggatagaaatggggtgtagggagtagaagcagaaattgcagtggcccaggatgagaacagaatatagaaaacaggcatttcacaggcaaaaatcaatggtagttggcgactatagtgcatagtgatgaagaggaaagagttcctgtctcctaattcattcatattcatcctttacatctcagatcaaatgccactttctaaaggaagacgtctcaaaccccaagaataaattaggtccttctggacatgctcacaaagcacattggacttttcctccacagcattgacctcagtttataatgctatatttctgtaataaataaaattaatctctgtatctgctaccagattgtgaacctcttgagggtacaaccatgtctgttttgtggttcctgtattcctagtatctagcttttagtaggaactcaaaaactatattttggaagcaataagggaaggcacttaaggatcacataaagacttctatactgcaatgccaggtagctggtgatcccattaactaagacagaacatagaaaaagaggaaaaggggaaaatagggagaagaaaatgaattccagaataaacaaggtaaattggaaaaatcttcaagaattccagatggagatttcaaatagcttgaaactcagcagtcaatccagagattatagatttaggaatcatctatgtagtggaagagaggagagtcactgctttactcgggttaagtatatgactccagaagaaaagaggctcaaagatggagccctgaagaaagccagaggtagaatccaagcaaactaaataatacagcaaaaatactgggaaagaaagtctgagagccaggagaacaaccatgagagggttgtattttaagaggtcaaggagccaggcacagtggctcatgcctgtaataatgccagcactttgggaggccgagataggtggattaactgaggtcaggagttcaagaccagcctagctaacacggtgaaaccccatctctactaaaagtacaaaaatttagccaggcgtggtggcaggcacctgtaatcccagctactcaggaggctgaggcaggagaattgctttgaactcgggaggcggaggttgcagtgagctgagatcgcgccactgcactccagcctgggcgacagagtgagactctgtctcacacacacacatacacacacacacacacacacacacacacacaaagaggtcaagggaggtagagctcaagaaagagaaagtgcttagtggggcccaatattaccaagggtagggggttggctcataagcctcagaaagtggtgggcactgggattcaggcagtgtctatttctaaagcaagagatcccaaactcccaaagaaaagctgaaaacagtgatgaaaacagcaggtgtgcacagaaggaaactaaaaaacatgcaagaaaataattattcattcaataagtatttgttgagcttctactatggtccaagcattctatattggaagtatagcagtaaacaggatataatggtctgtgggcccacaggatttaagagcagataggatcaagatcaaagaaaaagagtctgacttcaaaaagctatgagacatctcttcaaaggaaggagaaatgatctggggctaaagattatatgggcagagtcctagaagtatcaagaagacagaaaattttagggttgtcatgagttgggttgccctgaaggcaaaacctgagacaaggacttaggtgcaggagtttatgtgagagatgactccaggaagcagagatgaggaaatagggtgtaaaaagggaagagcaaaagccaactaagggtacattatcaagtttaccacttgccaaaccagcaagaggctggtttggccagaacctccagagaagtacacagcttgcctccagaactgttcacctgaatcgcaaaggccggagcacttattcacatgttcaaatgcccagtggctgagagtagcctctgagggcatttattcccacagacgtccaggctcctcttcagcccaggccatgcagactcccagcataagagatgcccttggggaagaaagcagaaaagcagaaaagtaggggctagaggtgggaagctgacttggacaaaactggtcaccacagttgttgctgaaatcagagataatttcacagagggactgtgaaaatggccacaggggcatctgccacaaaggtagtgttggtgagaactaggtggaaatggctaatcattcagcccaggctagttaaggagaaaaaaaaagaatgctaagagaaagtggcttgggaagttttctaaggtctaagctttctttcaatgatttttggcctctgcataaaaatatgaacttagggacttactaatagctcaaagttaagatcatagagaaggcgttgtactcctctaggtcaagggcatattaaccactgatatttattgagcacttactatgtgccaggcactttatagtcatcatcaaataaatcatccctgcaactgtatatactcattagtattgttgttcccattttataaaggaaggaactgaggcttagagagtttttaaagcttttaagatctatgaggtaacaacctatttcattttaagtgtatgtcaataacccacacttgcatccttgtgttcgaacacacacacacacacatacacacacacacacatacacacagtaaaatcagatatgaggaatttctggttttactagagaatttagtttatttatcttccctgtctatttcttcattacatggataatgaagcacttctagactctttaatgaatacatttatttaaattttaaaaaatttataccaattgatcaatgtgttttcatcaaatacgtggactagaaatacagaaaataaagatgtttagatatagaaaactgagcaaaaaccagctacaaaataccaccaaaagcacagagctagttgaagtcaaaaaaagcatcataaagggaaaaactaaaagcatctaaatacagaacaaaaggcaaatctgattgaaaacttgtctgcatctttaatttggaggctcatgatcatgctggaggtaggaggcaaaatttaatttaaggagaattttggccaaccatcgctattttctttaacacaagaacaaggagggagagggaatgaggtagacaacatccacggaggaccaggtgaaggaaaagcagagagtgatcatatcccatatccccagacacttggattagcctcagggaggctggttaggcaatgccaccaccaccaccgtcaccacgcccccacccccctcacccgacccacccgccactcccagaataaagctggtttgtaattagtttaggctgtagaggcttgtatcattaaaataatgaccactgggcatttgccacaaccaagataatgtttcataatcaaattaacttggctcaaaaacttgatttggaacctgtttatggttagtcatcaaacagctttcggggtgcttgaagcataagatatgcaaaaaactaggtaagtagtgcatgaacacagaatcagaggaaaatgtggctatgttttagtcacagagtacttacaatgggggttggaggtaggaggacagtgactatacaagaaaaggatttgaaattgaccctcaaagaactgaatatctttttaaataaaatgacaatattaaaaccacatgcttaaaatacgtacggctaagtgcttcagcagagactgggataccagatcctgagttcctcaaaggcaggagtgtccaagtcattcacttttgcttcaccggagcctaacacattgcctggagcagtgttggtactcaggaaaaccttctgtcgaatgaaggactatcatgctgttataataattaggagaggacaacatagaaacatggaaaacctttttaatctactggaaagtgaaaatgatatgtcaatggattgcaaccatgtgcaaaaacaggtgtgtttgaggacaactagaagataaggtggcaaaaatgaaaacactggtgtcaggtgttaggattctgcatgtattgttgttgtttctaaaactgcatttaatgttgtcagaatataatctttgtaatttcagaatctagagatgcttccatgttggagggagggaaggaactggatactcaatgaactgatagcttacaggcaaaggttcaaactccattgcttagcactgcagactctttgtggcacagtccccaagaactccagttttatatcatatccctgctccttccttcttccccatcacactgaatagtttgccttttctaaaacgtatcataggtttcactctttttttttttttttttttttttggtacacactcttctcactatttgtaatgcccttgtttccgtcccttcttcatatggctaaatcctacccattcttcaaaacacaactcaaatatttcccctctgagaagctgacctgattccccacaccctatcccagtctcaatttttggccacgtctctaagtttctatagcaacttatgcgcttacctctttcagagccctgtctcactatgctgcaatcactggtgtacttgcctttctcctctactagcctggatgctacctacagataatgtaaagatacctggggctacaaaggccagtggatgacccactgtcttttttaccaaactgtgacagtgtggtcacttagtcaagactcttttggttgcaagtaacagacatccattgaaactgctttgagcacaaaagggaaatttatttataaggacatagagatacttctcagagcccaaggttagaaagtgcagacactgaggtctggatcctggagctagaaagcctacagaatcaaggcagctactctcttagtcaatcagtcttactctctccccatacccacctctctccctgcagcctcacacagtcttttaatctgcatatctccagaggcctgttgtattcctctctctttctttctccctctctcttgctccgaaagacagttatacagtggctacaagtatgagctcatactacctgtgttcatgcctggctctgccattaaccaactatatgaccttggataaattacttaaccgctctgtgactcagtttcctcttctacaaaatgggaataagaagaggtcccacctcataggagtattacaaggattattgaattaatctaagacatggcttcccactgctcccaagtttacacatctacctagtctatctacaaatatgtcttagtccaagaccacacttctgagaaagacaacctggctggtccagcttgagtcagctgtggatctttgatctactgagccacagcctgggagccaagttaaaaacctgatcaccagggcccatccttgaagataaagtgacagttcttagagaaaggggccatgggctgagcagacaccagaaacaaaaacctgctacagccactaactaaccatgcagccatgcttgtgggcctgcctaggattacagctgggccttttcacctcatggccctgagcaaggctcgtatttaaaacacacagctgcctgtcagactgcaatgacacctaagggagctccacacactggcacttaataaaggcttaatggtgatgatggtggcgctgacaaaaatgacggtggcacaacaggccatgctattgcttcccagcagttctctgctgggccccgtggcttgaagttgaaatcagcacatccttctaactcggctaatgtggcttggctctggggccaaccctcatcagatcccatccaactgctagttaggtagatttataccccactaaatccattgtcacacaagggcttcctcctcactgccagagtgtaaagaacatagacacagcatccaataaccaaaggaggaaaggcctccaaagaaaattaaccatttgacttcaaaatgttatgctgctgctctagaatttccaaccaaatgaaatcagctgaaggtcctgcatctttaaataataaaaaaataaagaagaaccacagctgtgggcccttactagcccataaataaagccccgtatgcaactctatatcaaactttttttttttttttttgagacagagtctcactctgtcaccaaggctggagtgcagtggtgcgatctcggctcactgcaacctccgcctcctgggttcacgccattctcctgcctcagcctcctgagtagctgggactataggcatgtgccaccatgcctggctaattttttgtatttttagtagagacgggatttcactgtgttagccaggatggtctccatctcctgacctcgtgatctgcccgcctcggcctcctaaagatcaaacttattttttattgcagtataatctctttaacaaaaaacaagaattgtagaccagtacatctttgctatgaactgaatgtctgtgtcccctcaaaattcatatgcagaaatcctaacccccaatgtgatggaattaggaagtgggaccttgtttttagagatgggacatcaattccaggaccagtatcaagatctcacatcattctctttcacaaaaatagtctgcctttgaatttttagctctcggtgataagtaaactacacttattgtagttttttgcttgcctcaaatcctttgtagaagtaggctggaaaataaataaataaatagaatttcctctatgaatttgaatagcagagtatgcatgtaatagacgcttcaataaattttgctgtagcatgaagaccaatctcattttcaaatggtgaatcttggctcatgtatatgtggtactataatcttacaagtagggtttgcggtacacatcactttaaggaatgctggtactttaagtgaatttgaatagcaagagcggtctaaaatcagtcaccatcactgagcacagtcatttgaaagcctgaaattcacttttagaaaattcatcagaaaaaaagattcaaaaactggcaacgttcactcacagatcaaagacaacctaagtatttaactcatcatcatctatgaggataacgacttttaacagctgtccatgcaagagaaagcaaaaaaaaaaaaaaaataagaaacaatgagaggcattaaagcataaaggtcaagagcactttgggggcagccagccctaggtcaagaagtcctgactgtgtcatttaccagctctgtagctttgggcaagttgcctaaacactctgaacttattcagtcttccataaaacatttaaataatagtgatacctatcttattggatttctatacttaataaacaatgaatatgatgatgacgatgatgtctgcttttactatgaggaaaatgcattcagtaacaaatataaggaaaaaaatatagaataagtaaggagactctttagctatccttatccactaagaatacctaagagtttgtagtaactggcaagggtgtatatataaccagcactgaacatatcatcctttttgctattagagagtatgcaaaagaggaaatataaagaacggctttgctttgatcataatcaaagggcgtgggtaatctccttgagggcaggaactatctgggtcctattaacctagcacagacagtatcaagtagcaagcatacagtcaaagcaccaaatgaatgcaagaatgcctggatacaccctgaatatgactacaatcaaagcccgaagctcttggtaggtttcactggcctctttccttatatctagaagaacgtcctaccttcctggtcatagccaccactgaaataatgaaaacaaaataacaaaataatattttaaacatacatagcataccagttcattaaaaatagactagggagtattttacattgagacactagggagcatcattactttgaaatgtcactttctgctttaattagtatgctctaatgataagtatatgccattcttatctaatgaaagtcttgaatacatacggaatctggttcacagtcctcgctgggaggtacacggatgtacaaagaagaaacagaatgcatgtgttgatgtcaactagtttgcttacctttattaacataattgccaaagtttcaagttttacaatttgaggatacatatgttcaacacacccagaacacttggcacagtcatctgatcacctttcacatttctcaagacagcctaagctgttttagggagatgtgaagtttccggtgatttctttcaagccgactctcgggggtatcactcagaacaggaccacctgcttggtggcatctttttaataaagacagcaataggtctgcttgctcacagggaaatttataaggctgtctttgcttccttccacctattgtggtgctttatccaagtagaatgtactcagtcttcggagcttcaaagacactgataatggacttcttttcaaagagaagtcttagtcatccgctcctttcattcaacagtcagaataagaaaggcccagagggatacagacaaatacctctgagctgcctgttgtggcaatatcagataaagaaattctgtagcccagagagatatttgatccgttcatttgaaagtcaatactaaacatccttcccagccactccacccaagcaatgagaatgtgtctcagaaacaggacacagaaactatctcttacgatgtagcttccacttcttttttctagcctgagtgggttgggttgaggaaggagagaaagaaagaaatcaagaaccaatgttctctgctttgtgtttccctgattcagtgaaaaacggaggtcatttatagcttcttcaattggctgacccagaggaggctccagctttctcaggattgtaatggcaatgacatttctcaaaatcagttaccaagttcgtaccagttcccagcaatagaatacttggttactcagggcttctttctttgggaaatctgcatcaccgggatgactgcagttcacccaggccctacaatgggttctcatttactactcaagtttcatgcagatcatctcattcacacaagcctacaggaccaatctgcctcccagagccatggctctgcaccttcacaattgcaaagcaatttctcagggggagtcaaagcttcacttgctttttacagaaatggctcatggagatattatcttaaaatgctttctcttaaaaaaaattttttttttatctgagaattgcatgctgtgctgaaataggatggtggtgggttctgattatatcttttttccaattttggtttcactcttaagtatagaaaatatcaggttgctctctcctctgattcccttttctcccagggactaaaactttagtctgctgagtcaaaagtaagctttggtattaaattccatcttttatcttttttctcccaatatctaagaacaatgtgattatgcatcattttgtactacagaagtgctgctgagaactgcatgcaaaataaatcaagtcaatgatgtatttgaatgtgactctaatcactgaggtgggaaaaagataccagggttctactttagactgctaacctgctgtgatcaccttacctcctcttttaaatgagtgggctggaagtgctccagctcatgtctaaaatttagtgtgcttcgctacctcatggcataacaataggatggaaaaccatgcaaccattaaaagtgatcattacaaaaatgacatagaaaaagaaaaaataattgttataatatttaataaaaaattattccacaaattatctgtacattaacatttttcattaggacctcttaagccatgccattatcaaaaggggcaattcaaacatatcaagagtatctgttaatatttaaaattaggctgttagcctgtaatgaacatattttaggggaaaagctagaagtctgacacatagaaagaaagaaagggaaaatattaacctacaaaatcctttaaaaaggtagacttaaagctttttttcactatcttagtgaagatcgttaatatgtaccttacagtgtattttaaaattgtgtttctttaccagggaatttttttttatctttagtaaatttcagatttgtttcttacctgcatggaatgttacccttcccttaccacaatatgacaaaattaataatagccttacaaattgtgaagatacaagtttgagggaaaagataccaactgctttttaaattacaataatacatgatatcaccatttcattttatttaaaagaaatgttttacaacagaaatcatccaaccaattaacagggaaaaataagatggtgacataatccttaggaaggattactgggaaagaaaaaaacagtcatgagtacaacttggtataagtttctaatgtttatgtatagtgtatgtttatatgtatgtataatacattataatatacatagcatataatatttagagtgcatgcatattatgtgttttgtgttacgtgattgtttttgagagatagttgcttacactattggaaaaccactggtcatttggcatttctaaacagttatggtgctgcagaggaaagcttttgaccagcctttgactagccttggtcttgtcgttatttagcattcagatgtgtcaagaaaattaatacctaaaaaaaattttctggctgggcacagtggctcacgcctgtaatcccaacgctctgggaggccgaggcgggtggatcacctgaggtcaggagttcaagaccagcctcaccaataaggtgaaaccccatctctactaaaaatacaaaaattagccgggcatggtggcaggcgcctgtagtcccaactactcgggagactgagacaggagaattgcttgaacccaggaggcagaggttgcagtgtgctgagattgtgccactacactccagattgggtgacagagcaagactctgtctaaaacaaacaaacaaacaaacaaaactgcagatctgtttttggagttttaaagtgaaaaattgcattcttttgtctctagtagtgtaatattgacagtccaggcaattattgtcatgctaacataataaatgaattacctttactattctattgccaatgtgcttttttatagctttatttagatacatttacaaaccataaaattcacccatttaaactgtacgattcattcatttttagtatattcagagttgtgcaaccaagaacacaatcaattttataacatttcctcatcccaaaaagaaagcccatgtgcattagcagtcactccaatttccccgctacccctgcagccctattaatccactaatctactatgcatatggatttgtctctgttggaaatgtcacataaatggaatcatacagtatgtgtccttttgcgactagcttctttcacttaacataatgttttcaaggttcattcacattgtagcatgtttcagcacttcattactaattatggccaagtaacattccattataggaatatgccatttttgtttatccattcattgtagatagatatttgaactgtttccactttttggcaattatgaataatgctactatgaacattcatgtacaagtttttgtgtggatatgtttttaattctcttgggtacatacctaggaaggtatagaattgctgggttatatggtaactctatatttaacattttgaagaactgtcaaactttttccccaagtggttgcaccatcctacaatcccaccaaaacatatgagggttttaatttctccttatcctcaccaacgcttgttattgtcttttctattttagccattctagtgtgcatgaagtggtatctcactgtggttttggtttgatctaatttgacttccctagtaatgagtgatactaagcatctcttcgtgtgctattaaccatttgtatatcttctttgggaaaatgcctattcagatactttgcacatttttaaattgtgttatttgttgttttacagttgagttgcagaagttcttaatatagtctagatactagtccatcaacagatgcaaaattttctcccatctttgggtatatctttttacttttgtgatggtgtcatttgacacacaaaagttttaagttttaacaaagtctaaattatctattttttaaattttgtcacctgtgcttttggtattgtatctaagaaacctaactcaagatgacaaagattaattcatatggttttgccaagggattttatactgttaccttttaaatttaggtctatgatccatattgagctaattgttgtgtatggtgtgaggtacaagtcctaattcattctttgcatgtagacatccccagttgtcctaacaacatttattgaaaagactaatatttctcctattgaattgtcttggttctttagttaaaaatcaattgaccataaatgcgagggtttatgtctattctattgatctaccttttttgttagtaccacacagccttaattgctatagctttgtagtaagttttgaaactagtaagtgtgagtcttcaaacttctttcttctttttcaagattgttttggctattctggatatttgcagttccacatgcaatttaggatcagcttgtcactttctggggaaaaaaataaaaaaacagctgggatttttaaagggattccattaaatacatagatcattttggccagtattgcaatcttaaaaatgttaagttttctgatccaataacatggcatatctttccatttatttattctttaatatctttcaactactttctagttttcacatcttatacttctgttaagtttattcttagatattttattttttggctgctattataaataagattattttcttaatctcttttccagactgttcattgctagtatatagaaataagatttatttttgtatattgatcttgtatcttgccacattgctgaactcgtttagtagttccaatagttttttagtgaatttgccagtgcacttttaacttaaacttttaaattattttgtccccatcatacttataaacatcagtgtatgctactactgtaccacaattatccacaatattgagcaattaaatcctgtctgccctaagctctcattcagtcccttcaattaacccttcaggctgatgatcactctccacaggaaaggagaaagcacgacataaaacaaattacttctttcttaatcctttctatttctagtggttagtaaaaccatacagagtagtaaaatgaaacatatgctgagctactgaaactcttctgcctagcattaccttgctaaaatgaaatcaagcaaaatggaaccaaaagtggattttgacatttcatattttgctgaatactgttagggctctggcaatcactgtctcttacatacaaattaacagcctaccatctgtcaagtgttgggataatcacagggtttagtgcacaatatggttattagaatatgacctgacaaaaaggaaaagaacacaacctaatttggactataaaatctatgatctcacttgcaaacgacagtttgacaagctattattctgcattttggcttctacagtaaaagcagttttatgcatacgtaattctgttatacaggcaacagcccatagaagattgctttaaactacagaatctgcttggtcatacaatattttttaactaattcttagacaaatatttgcaccatgaataagtaggaatgtaatgatctgagccttcacatttccaagtgaagcaccaatcattaggcaaaaaatgtctttgtgatattgctgccagcagttccatagaattcctcagggtatatgcaaagaaactactgtaggaacttattaaaactattcacatggacatacatcaaagtcaaaaagttgacagttttgaaaagtgtaatatatgaaacactttggtgtggaatttacttcatccccaacagtgacatctgctaatgagcatcattaatattgcccacttttatttatccaaatgcctcatgggtgatatctttatgtacattcctctgtagcaccttttgtttccacccagtggaaataaatcccatactgacagctgcctctaataaagatgcttccaacaaaactcttctggttacagagagaacacagagtaccaagttctttttgttgttgttttctacctctcaaaacagtgcagaaatgagtattgttcctgaaggttatttaagggtacacccagtgtgtctaaaatacatgcctaagacagaaatgtattaattaagtctcaaggcaaaacgttctgttgaggcgacaaaacaaaacagatttttaatattagcagttatattacctagggagcttaggcgagataataactatataatacattaggcaactcacactgcaaattatgttgctttgttttagactacacgtttttccattattttcatacttgtttcctttgacggtagaaaaaaatgatgtatttttctgtcatgttggctcactataaggtgagtcagagtgccaaggttcttctgcaaggaatcttgggatccaattttaatatgctgcaatatgaattttaagaacagtgtgtgatgaattgtcaggctgcatgatatccccaaatttcccagtattgagaccttcatggctattccccgaagataacaaaaaaaattcgatcaagatttatagaagacttataaatgtatgaaaatataaaaaaataatagttacatccatgggtttaaaatgattcccctacagtggcaaccctgtatgaaaatacaatatgagatcagggagcagaaaaataaatgaagtaaagatttagggagaatcatggcaacttattcatttacaggaaagccagttcctttttcacccttggaaaaaactacaaacaaattccaagttctttctagctacaattgacattatcatttggccagtatattcatgataaatgttctaatgtgaaggcgatccatcataaatgtaatttcaaaaatgaacttcttattttaacttcagaaagaattattctaggattcaaaagtccagttaaatacatatagaaagaaggatagaagggagaaaagtttaaaaaaaaaaacaaaaaactatgcccagacaaaagactggaagaaagttatttatgtgatgagactatcgatgatttattttcttttaatttttattaatgttcgaaacaaacacacatcatcttttaatgaaaaagaaattctatatgaattattttctctctatggtatatttagagggataacttatatatagtaaaatacacaaatcttaagtatatggctccatggcatttcatatgtataaacccaagaatcttccacctaaaacaaagtatgcagttatttccagaaaattacctcctgatcctttctagcaatagtctcctagctccctatttttctggcttctagtatcattgattccttttgtcagctattgaattttacacaaatggaagcatacagtatgcattcttttgtttgtggcttcttttggcaacataatgctttcaagatgcatccatattgtatatatttgttgtttgttcctttttgttggtgagtaccacctcattgtatgactatgtcacaatttgtttacaatgatgtctaaggatagacatttggattttctcaagtgcttggctattataaataaaacttccatgaacattcttgtatatgtctttttcatgagcatatgcaataatttctcttgaattaatacaagggaaaatatacgacatacagtttttaactttaaggcaaggtctaatatttccttttatggttattttattttaacagtatatttaaaaattcataacttattggtttcaatctaaggaaaatgtaatgaacaaaattcagagcataaatttgtaaaatctcatactcctagatgaagagttcaaaagaagagaaagaagttatatgccccagtggggactgcttcttctggatcttcatgccacaatggaaagattctcaaaggcataaagttttccatagaaacactctcaatctgttagttttaacaattaaaacttacgtttaactgaaagtatagtagagaaagaaaactaattgatgaaactaaaagtaaacctctcaaataattaagaggcaaatatttcagggctgaaaggtcatcaccagtcacagaaaacattcagagaagtgagaaaccattgaaattggaccagtggatggcagagtaatagatggtatttccatgacatctaccccatgccaggggaaaagaagagaagggtttactttgggtacaatgacaaggacaaccttctgatatgttgctaaggatcatgcctagggtgactataaataatttattatccaaaatgagacacttctgagactgaagcagggtaataaaattaaataaaagtaataaataaaaattaataagtttaataaataaaaattgttttatttatattattaaaaataatttaattttttaaatatccacctgttgactgaaaaattggttttattttactggttgacagttgaaatacagtcctattctaaaatgatttcccaaagtaaaattatttttatttttaaaaaatgcttaactgggccaggtgccatgactcacacctgtaatcccatcattttgggaggcacagatgggaggatggcttgagcccaggagtttgagaccagcctcagcaacatagtgagatccagtctctacaaaaaatacaaaaatattagccatatgtggtggtgcgcacctgtagcctcagctactcgggaggctgatgggggaggattgcttgagcccaggagttagaggctgcaatgggccatgattgtgccactgcactgcagcctgagaccctatctcaaaaaaatgtatatataaaaaaatgctaaactggacaagatgcagagaaaactggtaaaaactagggctatcctgagcaaactcagatgcatgggtacactagtcaagtgtcacctccaaccctctccagttaatttaccaaggtacctataaatggagcctaaggcactgcccctgtccttttcttcattcaacaagtaattgttgaaaatcttccatatgtttggcactgtcccaggcagagagatataatgataaatgagtccaactttccttggactcatggaaccttcaaactgtcagagaagacagccaaagaacaagttactaaaagtgtgctaaatgtgaaggaagatacagagcccactgagaggcttttacatggtagtgatcaatggggtttgtattgtcccctagagagatttttttttggaaatgtgaggagcggtggggagctctctatgttccttcttttttaagagatggagtctccctatattgcccaggctggtctggtctccacctcctcttgagctcaagtgatcctcccacctcagcctcccaaagtgctaggattacaggtgtgagccaccatgcccagccatttaactcatattttctgaggggcaacaaggccaccaaatgttcttatgtaggacaggcccacatgatgaaaaatgatcctgtatccctcataactttcaaatgttccaccagacattcacttaggtaaagaaaaaaaatattattgtctattttacataatagcttaaagtatcttttgcacattttaattttcactgaatttttcagaaatgcaactagcatttaaactgaaggaataatgtattttgttttgttcaacactttaccagttgttcactatttcagaaaatcccaccaccgacagcaatggggcttttggtacccagtctaccaatataacacaactgtattagtttgcattcttatctgtcaaatgcaaatacgtaagagagaaataggcctagcaccaaatattattaaattggccatgggacatgaaagtcaaggataccaccaaattgcattcatggaaagcattttttttatatttcattttactgccacagtacatacctttaaaaaaaatctgtagcacaatgatgagaaatctacactgtgaaaattactgattaaaattatttacttactttggatttgcttcttgtttctcagtcttacagtgaaactgtccctagaggtctcccacacaacttctttatggcttcttatattactgcttctttttccaatccattccctattccctgtggcctaccgaagtgctttttaagaactagagaccaaatgtatgcatcaacataagacatgatttcaagatgagaggtattcttcctgtgattcttcaacaccactcagtcccttttcataatatagggaatgactctgcagctacccttttaagtaagtcccactcatttccaggaatggcatacttgcctatgttctctacctcaaaactgcattatttatcttagcatgttagctctacttcaactaaggttatttccctctttttctcatcatgtatattactattaatatgtatccaaaggttagcttttattctagtatccctcaaacctctcatctttcatttcttgtactcatttcacagaatggcttgtgatattcttttcttttcttttttttttttttttgagatggagtctcactctgccacccaggctggagtgcagtgacgtgatcttggctcattgcaacctctccctcctgggttcaagtgattctcctgctttagccatagctgggattacaggcacatgcggccaagcttggctgatttttgtattttcagtagagacgggttttcaccatgttggccaggctggtctcgagctcctgagctcaactgtgaggagaaaataaaacccgcccacctaggcctcccaaagtactgggattataggcataaaccaccactctcggcctgatattcttttcttaaatccaatttcactcatatcaagtagatataagcatttgattaattcattatgtcttcaagtagagttgtgcccaagcctttacattggaatacttagcttattgtaagccacttcccttttctttcttctttatattgtagttaaccatcataccatttttttaagtatatgggtgggtaggtaatttctataaagttcaaaagagggcagttaatctgataggattaaacagttgactggaatctaatttggggcagagactctttaggctgaaacttaacgaatgggtaagagttagctaagtgaagggaaagtagatcagggagatagaaaaagaggccaaacccttgaaggcagaagaatcctcagagataacagagcagagagcttcagctagagaactggttgccaaaaagtggtaagtgaacccctggaagcacacagctgaacttttgctgataaaaaggctaactttttaattttaatagattcaagtgttttgaaatacatattagaagaacagtagtttccatttaaggtggcaaaacaatttccttgtacaattaacttaaatattagcaaaaataagctttttttaatagtaagtgttggtacaaataggacatgaatatggtaaatacatggcttctgaatgactgaagttggggtgctctgacctattagcatggaggttggagaaagaggtagagctagagatgagatgagaaagcaagggcttggtcaggcaaagtcctacaaaccactgtaattattcaggtctttgtcttaaaagcaatgaaaagccacgaaaggacttcaaacagaggaatgagaagatcatagctgtgttttataagatcagtatggcatctaatgagaaatggattggaggtaggaaagatggctgtgggtagacgagttagccaacttttccaaatgtttaattcaaagacaatggtggggctgggtgcggtggctcacacctgtaatcccagcactttgggaggctgagatgggaggatcacaagatcaggagatcgagaccatcctggctaacacggtgaaatcccatctctactaaaaatacaaaaaatcagccgggcgtggtgacacgcacctgtagtctcaactactcaggaggctgaggcaggtgaattgcttgaacctgggaggcggaggctgcagtgagccaagatcacgctactgtactccagcctgggtgccagagcaagactccatctcaaaaaaaaaaaaaaaaaaagacaatagtggtccaagttcaagtgatagcagcagagatgaagaaaggaagaggaaattgagagataacatctcctgaaatccaagttgccataaattgaaaaatagttggcttaatgatagcttggctgataacatgaagaaatagatgctaagtgagcatatcaattgtaagatattgcttcagaaacattaaaatatggaaaatccatgcttctttaaatagaggaaatacaatttttaaagggtagaaaagagtgtgtagacactaaacaaatgactgatgatagtgaacccccagttggaaaaagtcaaaattgccagatttctttggcctcaaactgctaaacatctaatgtcttgggctttattcactttttgtctttgagtgacatgacagatcattttggtgatatagatggagctcaaattgacaaggttactggagaaagtaaaatcaaaaatcctttctcaggtaaagatatacctgagtaaggaatgctgaccttctaatatcagaggcctaaaacttgtaagtggaagtttgcttacagaagacaatgttcacagcattctgaaagtcatggccaggttgttgctgttattatgaaaatggtgatttatagccaatgtccatagcctaggcctcgaggtatgtttacaatttacagtaagaggggcccagccttaaattattgttagcaagtcttgatattattttgtaaaaaatgaaatatgtaaacacatacatatcaccttttaattttatttcttaggggacaagggaaaaaacacagtttgcaactatgtatatctcctcacatcaaagtttaactcctcaagatgaatacattctgtgcctctgctcccaacttgaagaaatttcaactgctctattctttccacaactgcccattgtcttaaaaaaccccaaatcgctggcattttaaaaattaaatacagtatattttctagaaagaaaaaataattaccaggctcgcacgtggcagattcctctagccatgcaagcctggatattcatgaaagccatttctcacttggctcagggaaacctcccagaatgataggaccatttacactaaatgaaccgaacatattactggagtaacaattgacattaagtatattacagctgccaggggcagtatcaggaagaatccctggatgacagaaaacatgataatgtagaaggaagaacctgcagaatcagaaaggggggaaaaacccctcataaaacaattttaaaaatatataaagaggaaatcatatttaaaggaaaaacagagaaattttgttattttttttccttctgcctgcagtagccttctggtattagacctgcaatgcatttgctaccccctaaaatattctcaacactaacaagatcagaggaaatgatttattccaccccctctcctgctacttctgaacggcagcgcgtgtccttggggacatgggatttctgcattgctttcggccatctgatattgcagctctgcagccttccctggaatgagccagaaaaatcaaaataattacattaatgctgggaatcaaagtttattgactctcccttgaggtggaaaaccaaaatgctggttacaaaagttgccagcttatttaatgataccactgcctcctccctgttcttgtcaaaacagcttttgaaagcattttcaaataaagccctcagatgcgctccaattcaatagcttatctattcccttttaaataaaagctagttcacatcatctcaccccctcaaagggaggacccgacaggccctcttcccctgccaaggcactgccaaaggcaatactcccaggcaatatccctgccatcatttccgctctcttcaggaaggttctgcctcattgaatattcttccaagccagtaagagaatctcatgcctccccaaggcagcaatctacatttattataacattcatggctgctaatgaaacttggagcagctggtttctttcactttccaacaattctttggatattcaaagtcccctcataagagaggggaacttatgagcacacccatttcatggatgagcccgcagacacagagattcaatgtggtgctgacctttgtaactttcacaggactttgctacagccctaaaaaaacagatgctaaataataattgattgaattaaactgaaggaggtagattaatttttttaattaaactgaatcaaatagaacagaaataaacaaactctagccctctccatgcctagtcaacacctactattctttcttgtttcttttttttcctttttattataaaagttttcaaataaaatgagagaccagtataatgaagctccaagtacctatccacccaggttgaacaatgatcaagattttcccacatttgcttcattcatcttctcctttttttcttcttcgttgaaatattttaaagcaagactaagacagcatgctacttcattcctacttttgtcagtgattatgctgtgcagaaaagagttaccatagaaggcctgaggttgctatttttagaatttaaaaaagtttgcaggtaggtaggtaatatctacagacttcactttatgatgataaaagagacataagagaaatagacctgcttgcaaagttgactcttggctggcatctgggaacatggatttgggaaggttgccatcattcccagaactgataagagtggctcactgtgcccgaactgtttgttcaaataatgaaatgctaaatgcctgctttccttctgggagtctaaaatgttggtatgtgctagccagagagtatctacgtgaccagcccccaataacagccttgggtgctgatgccctaacaagcttctctgttggacaacatttcacatgtgttgtcacaactcattgctgaaggaattaggcatgtcctatgtgactccactcaaagaggtctctcagaaccttgcatcaagtttcctctgaagttcaccccatacgctttttccctttgctgattttgctttttatcctgctgtaataaatcatggctgcaagtacaactatatgttgagtcctgtgagtattcctagcaaatcattgaacctggtaatggtcttggaacccctaactcatatacctaccattttttaagtctacttaaacctcactttttcacagaaacattggtgaccttggggagatgccaaactaagggaggccccggttatccattctcacagcaccctgaacttcctcttcataacatttatcgaaacggtccctaaataatgttgaaatcatttgtttgtggtctatctctccaccaagaacccaaagtccctgagacaggaattttgtctgtttggtttgccatgtatacctagcatggtacacatggtatacatttaaaattttaaatagattcaagaaaataccatacccctcctccaagtttaagaggtaaagtttatataatttcccttgcattacactcattcattcaccaaataccactcacttatggtataatctatactgtgtcccagttcagtttaatatccacttcattaacatctttctgtaattagcaacatcatgccaatgcttcaccttttaggtgagacaaagcatgactctgcaagggggctttcctcttgacactggtgactaattcatctatttgcatcacattataggaccctctttccaccttacaatcctctagagattctcctgcaaatacagactcttgagatgattcttacatgcctactaaagtttggaaaaccactgttttgggtcactcaaaaaatgaaaaggcagctataattaaagaaaacctcatggatatgattcttcacctgaatttttaaaaagataaataaaccacagactaaacataaattttgctaagcatattcaactactgaaaataccatacgacaacagagagaataaacatatattcctttaaagaaaagaagtgagttgtccatatgttgtaagggatacatctatatatatatacagattgtcttgcacatttaatgtgtgcgcagaaatgggtcaagtagattatttttttcatggtggatgaaagtaagatgtgatgagacacacttgaatggggattggcaagatttttaaagattataagctttgcgttttcatataatctaccatcctgcaaattcacttctgagtatatattaatacccaagagaaacttgagcacatatgtcaaactccatcagtgaaaggccaccaggaacaccctggtagtcaaagttaagtggttcaccttactgtagcaaaggagaaagtaccccagaggaaccttgggagcatcttagtaaaggggaattatcagtggcttcctctagggtttggggaattgaaacaaactgaagtttgcccagaagcagcagtcactctgagaaagacagtgatagtcagaagaaaggggtgtttagtcatttgtagggtcacagaatggctttgtttatgccttgttctgagtattgtttatgttctagttgccagtagagccatgttttactttctcacatatgtaccaggaaatgtgtataagaacattcatagcagcaccattcatagaagaaaatttaaaaatttaactaaatggctattgataggagtacatataaaacttaaaaaggacagggaatgatgaacatgaggttagtagttggttacctcttacgaagaggtagagatgggataaaagggggcacaaatttgtaagttattggtaatatttacttgttgggtttatgcctgttatattatgaaataaatattataaaataaaacagaatttaccatggatgacagtgagtcatgaaccaaacttataattaatctacctctgtgacctgaggtccacattattttaaaacaaacaaaaaataacaataatcattcatatttacgtttccttctcagccatacattttcttttctacttagcattttccactgtgacacagtaggtgccagttgtgtttatacagaagctacaataaacaagactttttattaaatgcaaatgtcaccacgcagtagaatcaactattgactttgtgcaacctctcatcaacagaaccatcaatacgtctagcaaggcacaggatttattgtctatgcacacctttcagagggcttcctgaaacacaactagcttccataattggtaaccaaataaaaccgcaggccaccagaagcagaatataactctctctaggaagctgtaaattaaagggagatttgtctaactaaatgtacagtgctgcactcacatgggcatttcatctcttgctctttaatggaggcagtccttgtacccctacttcacattacgaatatggtttcatctctgacagaaaggccagagcacctggcagagtcctcacatgctccctccttttaccttttccattgcattaattaattagaactgtctttatattcagtgacatttgattttgaggacatttttacaaaataacaacaccaggtccaagttcactacagcaataggatctacaagaacccaaagaatgaatgctttttagcaaatgagaacacaaagtcacatgatctttatttttaaaaagctcataaactatgtcaggcaggggaatcacattgccagacaccataaaacaacatataattaaactctagcagtccattagaagacctagtgacaagcccttctccactgctgcaacaaaggtgggatgatttacatgtagactgggaaaagtcccatgatattagaccaaaatccagcactgctgctaatttttttagactgaaatgtgattgcccaatattaaattgttaccattagtggggaaaaaatagcttattctaacaaatacttaatttctctctagctttggtgcagtcctgacttgtagtttattctaataaataatttaaaaataattttggtcacctcccatatgatccaaagtaatgctatttgagatcaataggactaacattttctatctggtatccatggagttttttatccaatgagagagaacattcaggaacttagcctgtctcatggctgaaaataggtagaatatgttaggtgtgcgtttgatacaatctgtaaataaaaggcaaattataaaagttcccctccctgcagagacgaagtcccacaatagggtgcacaagctgcatttcaacccccacccacacctcagatatgcatcttcattcagtgcacagaagactcaactgtaggggcggcctggatacacatgccatgtttcttccttgcccacttggtgtcttcacatccccttccccttaaaataatcccattagttgaaaagttcctggatacaaggagcagccatcaaagtccatggatggatttcaaggggatgaattcatttaacattattaaatgtttactttgctaattctcaatacttgtacacaatataagacatgatttcttctgtctataatatgaagtctgtgattagagtaatatttcaatttttggtttgtttgttttgacttggaattagcagtaggataccaacttaagtcaaatttactagttctcattttccctaattcagcatttgttttcatctatagaattccttttcttaagtcaggctctttggggtcatcagccccctgaaatcatgtgcaaaatgggatgcctatgtgcacatgcctctttctgtgaggatcggtacctgagaactttgatgccaagttaaaaagactgtgccttgagtttttgacactagggaatgaaggaaagtatgagataaagaatatacaacatctgccacaactactgcatattttctttctatatcacattcaacagtttattacaatcaccaggcttttcattcccataaagcaatgttcagacttcaaatgtgctaataatttagctggagaatttgagaaaactacacattcctctccaacacccccacccccacctccttagccccaagaatcagatttcatcactctggaagagaactcagatatctgcactttttacaagtgcctcatgtgattctgaggcaatggtgagagacccaagctttgaaaaacgtgccatgatctaccatcaagtaggaatcatgtacataagttcttccattagaggaaaaaataaatgtatttgtttctttgtaaagataggacgttggaaattttcacttagattactctgtaagcgacaaggaaattagaaagctcgttttttacaataatcactgttacttgacagttcctgcagcatgttaagatggctgttattgatgacacttattaccttttcccatgcaataaaacacaggaacatacagtggaagagataagtatattttaaaacaacagaaggaagaaaaataatggtagtcatgtcctctcattatttgtgtagactgactaccatggggaacagtgaaatgccttttttaaagttacactgtggctttaaattgggttaactcagtgaggatagccatgaaacaagtggctatagagatgtaaagaatgggctatttctctacatttctcttttgccttttattttccctatggtctttaatgcatttctctttggaatggatgaagttataaagttgccttacataaaagctttgcttgaaagattggtaatcacgcactttgctactgaattgtccagtctattcaatctaaaaaaggctcttctcttttgttcagctcagattatctcctttgcagagtgtaatagaaatatctgggtataaaattgagaaattgttcataaatattatggaaggctttttgagctgtttactattagaggcctgatttagcaaacagtaagcctgcttttgctgggttgggattttttattttttaactttttccttttaactgaatcatccacagttaaaaaaaaaaaaaaaagatacagatttcacagcactttcacccatgattagagcagaagaaaacaaattgctttttttttttttagatggaggtttgctttgtcgcccaggctggagtgcagtggcgcaatctcggctcactgcaacctccacctccagatccaagtgattctcttgcctcagcctcccaggtagctgggactacaggtgcatgccaccacgcccggctcattttttgtatttttagtagagacgggggtttcaccatgttagccaggatggtctcgatctcctgatttcgtgatccgcccaccttggcctcccaaagtgctgggattacaggcatgagccactgcacccagccacaaattgctatttttaagagacagttttaatatcttgtactacatttggagaagaaaaaaacatcagcactgctatcgcctataggcaactttcttatcttgccatttctttatttaaagtctttgcactgaaccagccaatgaaatgcattattctactggccagcgttctctagcagaaacaagagacagcatgcattactgagaagtcagacacatttgcactaaatcaaaaaataaaaataaaaagactctctagctagaggttaataacacaactcaatcaaaaccagtgacattttttatcaaacagtcgtgaaattgccatttggaactctaacttgctacaaatagaattaaaagtgccattctaattctgtctccttgtacaatacgaccctgatatggaaaacaaggtgtctacactgaacacatccagtttacaagagaaaaaacgggatgattttttgattctctcaaatattaggtaagtgtttaacacatgactcctgagtgggagtgccagttaaagagttgtagtacctgtcaacgctggtttaacatttcaacaaagcaaatcatcaattaaaactcatcagcaacagtcatcctgttaattgaccaaatgattatccttcttttagttaagactctacctgacacacttgaagaaatttttttctctgttgtaaaccctctggagtctgtggcacacctcaccttggcaaaccactttggttttcagattcactggaaagcccctctttgttctaagaggggctcctgaatgaaagccaagttctagtctgactttctgattgcttcttctcaggtttttttcttgcttcctaccaggagaaggaaaaaggtagtcataggccatctgttaaacttgtgtttaaagggaagtaccaaggtatggccagctggatattttactcaacatggtggatcatactcaaggtagtgtataaatggtttagcagtgaattccaccccatacttcttggggtaacatctatgctatcaagcccttaaaaccaaatccaactagctctaaaccataaacatatattatgattcaagcatttgcaggaaaaaaattgtgcttcagtataaaactttgcttcatctagaatataaaggatcccatttcccaattaccatattatcagattctgattctatgaggactaattttcaactctgtaaattatagataaatgataacaatgcaaaataattcttgcctataggcaagcaaattgtgttctgttctctggaggttcaattaatccccctaccccaccctcagaaaccagttttgccctccatttgtaacattcttttcagtattcctgatatataaatgtgtctgggctttttggattctctttagactagttataatatttggctggttctctcattataagttgacctaatctttaacatgttttcattttatatcagtatgagagtcatgatttcacctttatttgagaattattctttaatacatgtatagatcttggactaaggctatcaatttcgagacttcacttgtaggactgtgctgtactcctgtctctcacactctctgcacatgccatttcccagcctggaatgttcttccctcctccccactccagcttctggacctagttaattcctaatcttcactcagatttgggcacaattatagcctccataaacaagcattgcctaactacccctcctctctgccaagaagtttagatctccctgttatagttcttgcacttaacaccattgacatttatctgtctggattttctgactaatgtctcttttcctcactagaataatgctcgctgatggtagggaccatatccggttttacataccattgcacccagttaggtgtctggcacacagaaggctgaaacaatatttgttgtgatggggttcttgacacactaccccaaaatatggcatgtcggcatttgacaaaacagtggaagcaggaaagtctctctgaccttctcccacacttttcccctgaagcaggccataaaagaaatctctagccttcctctaaagtgggtcataggccttattcaagaggcacccttcctatgcctggaggaaaggaatgtcattatctctgaaggcacagagataaagagaaaaatctgaataaagaaggcttgctaagttccccccagtttattatctttagatcacaccccctatgtccaatcatacttctacacaactgtctgctcttcatcaaatttagcataaaaatatacaagtttccctgtttctttgagtcttcctttctccatgtcacataaaacttatactaaataaatttatgtccctttctcttattaatctttcttttgttataggggcctcagccattaacctggcaatggaaaagaaaaatattttcttctcccttgcagttgcgtacatcagcaacacagtagatccatggatcagtgaacaaattgggctatgaatattcctattataaatcagaaaaacagatctagaccaaagctgaccaaaggagaaggaaaaggagagactgcattttgatgtaagtgttactgatttgaaaaaccatggagatcgatcacctactacaaggtccaatggtattccagattctagaaaagacctagataaaaatataaagtctctgaaagtcctctcatcttctccaaagagtcctaaaatccaaaagaacctaggatttctgggtattttgaacctgaacaaaggcaaagcacaaaaagcatggtatagaagaaggcttctcaaagtgtggttcccagaccagcagtacctcttggaaactctcaggcctcatctcagacctactgatgaaatcagaaactctggaagagggaccagccatctaggtatcaacaatcgcttcaggtgaaactgatgcttgttagagactcattggcatagaacaaagatgggcctcaacaaagatggaatcaccagactccactgtaaatagctgtgaaacactgagcaagttatttaagttctctaagcctgagtttacttatgaggaaaaatggggataataacaacaaaaactatcccacagaaatgtggtaagaattttttttttttgtttcaacttttattttagattcagggggtatataggcaagtttgttacctgagtatattgtatgatgctgaggtttggagtacaaatgatcctgtcatccaggtactgagaatagtactcaacagttagcttttcaacccttgcttccctccctcactcactcctccagtagtccccagtatcaattgttgccatctttatgtctatgagtacccaacatttagctcccacttacaagtaagaacatttggttttctgttcctgcattaatgcacttaggataatggcctccagttgcatccatgttgccacaaaggacatgcttttgttctttttttatgactgtattgtattccatggtatatatgtaccacattttctatatccaatccaccattcataggcacctaggttgattccatgtctttgctattgtgaatagtgctgcatgaacatatacatgcatgtgtctttttgataaaatgatttgttttcttttgcatatatcctcagtaatgtgattgctaggttgaatagtagtcctgttttaagttctttgagaaatctccaaactgctttccacagtggctgacctaatttacattctcgacaacagtttataagcatcctttttccccacagcctcaccaacatgtgttgtttttagactttttaataatagccattctgacagtgtgagatggtatctcactgtggttttgatttgcatttctctgatgattagtgatgatgagcattttctcatatgtttgttggccacttgtatgtcttcttttgggaagtgtctgttcatatcttttgcccatcttttaatagagttacttgttttttgcctgttcaaaaaattttgagtaatgtctataaattgcctagaaaattgactgacaggctgggcacagtggctcatacctgtaatcccagcactttgggaggctgaggtggacagatcacccaaggtcagcagttcaagaccagcctggccaacatggtgaatctctgtctctactaaaaatacaaaaattagccaggtgtggtggcgcatgcctgtaataccagctactcgggagactgaggcaggagaatatcttgaacccaggagtcagaggttgcagtgagctgagatcgagccattgcactccagcctgggtgacaagagtgagactctgaaaaaaaaagagaaagaaagaagaagagagagaaaattggttgacaaagaatggatactaatgaaataatagctgctattgaatttatcattcatgtcagtagcagcagcagcagcaccatcatcaccattaccatcaccttgtctagattcttaaggcctggaacccagggttggaagaaactgttgtccttttgcctcatacatcagcaaagcgtgcatagggctcttaggaattgggcaggaggaatccaaatttgtgcaccattactgtcttctagctgatgccaccgttttttgtcagtcatttatactaaaatatactaacttagataggtacagaatttaagaggttacacaagcacttagcacacatgctatctgatcttcacaaacaacctgagagtagttatttaattcagagaagttagtggacttgcccaaagtcacattgccagtcctcacagtcatctgaagagccagacttgaatccaggtattttgattccaaacctagtgctttcttctctactcctcgtctatacttctgttttcattataccaccttgccaaggaaacaaacactcaccagacacactgtagagtaaaatagacctgacatcctttagagttcttcttggatcctggaatgtggttcttattgtctctacttacaaacctcacatttacagaagcaggctgtatttttttaacaccttccttattagcaataattggtcccttctgctgtatgtttgtttgatttttaatacacacagttcaagattaactcaaatctgttcaacaccaatctttctaaaaaccaactttccaaatatccacttgtaacacagaaaactgcagatcgtctttcctgcttccaaaatacagtcactttcataaatgttgtccattcattctagcactgagtgttcataaagcacctactcattgctaggcactatgtgaggcaatgggcacacaggtgtggtgtcttaagtaagacaggtgtggtgctttccatcctggaagtgtgagggagtctggcaataaaaaaatcaacaaataaaagaaaatagccacaggttagagtaagtgccattgcaaagcctcaacaggtaaaatgatgaagtagtcactcacattttcttcaggggctggagaagcccagggaatgactccagacagggtggtccaaggtccacttctcactcttcagataaaaacacaaacaagcatatcttgacacagaaaatctaatgtgaaaatccggtaagtggaaatatgagttgacagaatgggtgatttagaaacggattatctactttaacatgagaattcgatacaggatttttcttgagcactttcctaatacaaatacattttatatttatatccctattaaatatatactatatttaatataaatataaaagttggatgccatttataaaaattcaattaataacaaaatgaaacagctactgccaaaaacttgcatatacagacgttaaaagaaatacggggctgggtgctgtggctcatgcctgtaatcccaacacttagggaggctgaggcgggcagatcaattgaggtcaggagttcgagaccagcctggccaacatggcaaaactccatctctactaaaaatacaaaaattagtcgggcatgtgcctgtagtcccagatacttggaaggctgaggcaggagaatcacttgaacctgggaggcagaggttgcagtgagctgagactgcaccactgcactccagcctgggcagcagagtgaaactgtgtctcaaaaaaaaaaaaaaaaaagaaagaaaagaaaagagaaaagagaataaaagaaaaggaaaagaaaggacaggacaggaaaggaaaggaaaagaaaagaaaaaagaaaagaaggtaccaagaggtggaaaggaacagggagaaagaaaacagttattcaatgtttttggaggcccaagcacagggttttggcataatttatttagtccataaaacaactctgtatttagggatcatccacattttacaacaaaggaaacccaatttcagtgaggtgagattatttgtccaagatctctcagctggtaagtgacaaaaccacaacataaaaatctgatctatatccagtaactatatcccatccattctataaagcaagaattggcacaccacagcccacagggccagacttggacagcagcctcttgataccaccacaaattaagaatgatttttacattttaaaagcactgaaaaaattcaaaagaattatgtttcatgacacatgaaagttttataaaactcagatttccataccaataaataaaatgccattggtacacagccacatttacctactgtctagagctgctttcaaattgcaagatggtgttgagcagttgtgaaagaatcagtagggtcccaaggcctaaaatacttactgtctggccctttacaaaagaagtttgctaacccctgaggtagagaaaaggatccatagaaataaaagtaacaaacactctcagaaatgtgacttcaaaaatgagtgacaaaagtatgcaaaaaatggctataaaatgcacctgaaagaatttaacctaatggcagttgcctgaggcacaactttctcaatttcacctgaaggtttcatttttctggccctgtgtcccagtgaggaagacccaagtcaaccttgtgacagggatttatcacgtcttaacttgagcaatgctgtgttcccaccagcactctcagaatggaggccacacaatgtctccactcctgcattcactggctcaacttggtttctgaagaatgcgaatttagttcaaggcacggtttcaagctgtttttgttgatttcccactatattgtcttctctaaatattttctggttcaagtgcatacgctcaattatgaaaatgaattcttacaaacaacctgatctgggcggatagttaactcacaccatgaagctcaaatttgccagtacagggaaaggtatttctttttcttttcagtcttcaggctacaaggttgaaagccagaagctatgtgttataaaatgtccctagtttttcccatgttttgtagcacacatattgatctctatgtctttgccatttacttgtgtgtggtcatccccaattagtgggttattttgtacttttcaaagttaaattctaagtcaatacttagggcgtacacctaagtcaaagatggcctccaccttgaaggaaaaaaattattacatttcaacgaaaacctacacatcatctataaacacactctttccagctgtctgactctagccttgtacaatgtctttgagctattttgcaccacttcgtaagttgtagataactgatagatatatataaattctgtcttacaggctgtgattttaattgacttcctactgtggagaaaacagttttatctcaatttgcaactcatcttaactctcttttagtccatataaatttgtgccattttgacttttcctttgagccagttataacatctgcctggttctctcaaatcatataagtaaaataaaatctttagcatgtgttcatttttatacctatatgagtcataactttaccttttactgaaaattatattttaatgacccaaaagattagtaagaattcagatttatttcaaaatctatctttaaaaactttaaattttgagtgatttcacctttaatatgaatttagttggaagtaatattaagttagtttaaatcatatagaaaaatgaaatgtgatgagaagtgaacttctttgttcccttttattgcttttaaaatgatacaagacaaaaattgtgcagaggggcaagaaacaaatgttaaacaaaaattattctgacatgtgttaaaatggtaaggaagactttattaaggactattgcaatagcagtattgcaacaggggagagagatcaggttcaactccaaatacaacaaagatagatagtcagggatttatagccagtgttagagcagataaggggttcagtgggtagaaaactactaagaggagtaagggaattcttgctaaattaattcctaacaggattcttgctaaaggcaggccaatgacttagacatcaagggtggggtgagaaacttgattagacatcacggtgaccagctatcacttaaaaagattattgctaaagccaggctagaaagatcaaatacaggaatgaggtctggggccaaggtcgctagttgagaaaagggctcagaggagtataattaaagtttgggcaaggagaaaatcttcatcataggtaatagcaaatttataaaaggacaattcaattcaataaatcttgtcctcaaggaatttacaatccactgaaaagagataattaagtcaccacaacctggtcaaattaccttggttttactttgcaattaaattttattcccatatgaatctatatgtaaataatctctttaaagaaaacaaataaaatgagaagttaaagttatttctatctctgtaatctttattttaacctttattttaacttcaggggtacatatgcaggcttgttacagaggtaaacatgtgtcatgagggtttgttgtacagattatttcattacccacatgttaaacctagtacccattagttatttttcctgatcctctccctcctctctcccaccctccaataggccctagtgtgtgttgttcccctctatgtgtccatgtgttctcatcattttgctcccacttataaatgagaatatgcagcatttggttttctgttcatgtgttagtttgctaaggataatggcctccatctccatccgtgttcctgcaaaggacatgatcttgttctttttttggctgcatagtatttaatggtgtatatgtaccaccttttctttacccagtctatcattgataggcatttaggttgattccatatctttgctattgtgaatagtgttgcaatgaacatatgcatgcatgtgtgtttataacacaatgatttatactccttcaggtatatagccaagatttttccataatcccactggtattagatacccaaaaaaatcccattggtattatatacccaaaaaataccaatgggattatcagattactggaccaaatgatatttctgtctttaggtctttgaggaatcactacactatcttccataatggttgaactaatttacactcccaccaaaggtgtataaacattcttttttctccacaacctcactagcgtctgttacttttttagcttgttaatagtagccattctgactggtgtgagatggtatctcattgcggtgttgatttgcatttctctaatgatcagtgatgttgagcttttttgcacacgatttttggccgcatgtatgtcttcttttgaaaagtgtctatcaagtcctttgcccacttttttatggggttcattttttccttgtaaatttgttaagttccttatagatgctggatattagacttctgtcaaatgcatagttcgcaaaaatgttcttccattctataggttgtctgtttagtctgctgatagttccttttgttatgcagaagctctttcattatctctataatcttaatttatagactaaaatattaatttgaaaatataccaactaaagtgtatcacacacctaaatcaaggattttataaaatacactaaaacagaaactaaacatagactatttattcaactttcatataagcaaaagacaccactattggccaccaacctcactactcccagcctgtgaaacaggatgattatgggtatttgtgaaatctaaacatcaccactcactacattaaaatgaaatggcaacaaatttccacaagtctttttactcaaagtgtggtggcccaacccagcaatctgggcatcacctggcacttgttataaatgcagaccctcaggccccacctgctgaatctacattgtaccaagatccccagaaaattcttatgtacatgaaagtttgaaaaccatggatccagaagtgtgtgaaaacataactactgccagaatttttagcatattcccttattcatctcttttttatgaaactaaacgtagtggttttgctgatagagatggacgggggaaaagaaattttgttgtgaccaaagttgctgcattttttgcctaggggtggacctaaagtttcatgtcaatcattttgttttgtgagcaaaatcaaagtcatggggaaaaaggagagggtgcagaaagaagaaaattgtgaatacatagaattttatcactggaagacagaaaacaatctcaattatatatatagtatatgtactcaatacagtaatggttaaataaaccatgacacaactatgcaagagcatatataaagacattaaaaataacaaggtcatttttcatgtaccaagatgcagtgatctctaatgtaaacttagcttaaaatatgcaaggggaaaaatgcaagggcagcacagcatatataatgacttattattcatgtaaggaaaaggacataagtgtgcatatgcatagaacatctctggaatgacacacaagaaagacacacaatggttactgcccagaggggagctgaggcacgagggacagaaatggaaggagactgacatcccactgtgcatcttttaacatcttttgaattatgtgatagtattatccaattaaaacaatattttaatctaagcattgaagaattcctaaaaagtagataaaatacagttactaagataataaaggaatcccttcttcattttccctcatagatggttatgtgactatgtccaaacactttctgtgagttacagatctgagaagttgtgtctaaaattcactgacactggagcttaaatccacgtgcctagaatgctcctcactgcccccacacaacccctgagagcccccactgatgccagttctctctgcaacacaaactaagcctcttcctgtctcagctgtgaacacatttgcagaaggctattgtggttttccttagtcaggggtcagaatggccagcaggggcaggcaggtatcctaaacgagtaaagcaggcctagccaaaacaaagtgagcctttacccctccacctgcaatgaaacagggcagcaactattctgctccaaggaaatactaccatggaggagacagggccagatgttgccatgtcttcccagggatgtcagaagctgctaaatttattttaaataccttgatttaaaaatgttaatattttaattttttaaaaacagtttacagaccaaataaaatacatgtgcagctagatgtaacctagaagttcataatccatcctgtcatctttcgtgtgtggaaccatgaacatttctctttttgttattttctcattggagctgctgaaaagaaaaaaaaaatctctttttaaaaaactcaaacagctatattttggagattcgacaatttactaatctatcactccaaaatgtgctgtataatttatttgacagtcactgtgcttgcctaagaactaaaaataacctcattgtatgtgtgtgtgttgtttctaaagacctgtggtatttattattgttagaatgctttcgatgtctttggtggtatgaactgtgaggtatctctgaaggatagcatttcactgtatttcacagaatatacatatacagtccatcaaaactctgggggttatttgcaaaacatagttctcattttccaacaagctttcagcggaagaaagtttcatagaaaaaaatacaaatttcctaccactctactttgtgagaacctaaagagactgttaggttataaaaaagaaaattgagggataaatttaacacttaaaagtgactcttctagcaggaggtttgggcacccagccagattaaggagaagtagctttatacacacatcttaacagcagtctgaatatcaaatcttcactactctttgcttaaagcccagtacctactgagtcatcccagccagcatgtcccttctaacttgtcatcctgtttgttatcactctatgccctctgcagtactctggactttgaatgtgagattactttatttaagtgaactgcaattgaaaaaagaactcttttgattgaatcttgacctgcagtaattgggaacttatgtaaggaccccatgatactcatattaaggggagtgtgggaggatcccactactaaagcctggctgcagaagagggataatggaaactgcaggtgttagaaaggtaccaacatacatcttccccctatagtacatggactcagtttttacatatggctatgctttctattctgcttaagtaacataaaaactgattaggaaactcaagatcttgcactacatataaaatctgcatccattgcttatggtctaaagtaaatgcaacaactgacaattcttacagagtctcaaaaccaagaaccaccatgataaaacaattatactgcaatgctgaggaaagagacatttaattacagatataatttatgtgagtaagcataatcattttaaatttctaaataaataggcatgtcattaaatataaagcatcaggaaaggatttcaaaatctgtatggttcatctgcgttggcaaatttgatctattcagagtttactctgggcgggggggacctcatgattccatctttatggcccaactgttgattaacttccaaatgaaaatgcttgattcagcatgtattttctgtaagaaaggtatttttcacatgctatagccaggccaatctgtgtcttcaattgttgttaagacactagtatatctttaaatcttttccacttattaatttcagcagattatttgtacacatttctcaggctattctgatatttcaaatgccttgaaaatgttgtagctacataaattaaatgggcaattaagatgtcaccatgcaattctatacaatacatacttgcaatgggatacttgtgagggtaccattatccaaactgtcctattcatcagcctttctagaactttagagatgggagtcagtcagctgggttccagtcatggtgaatggcatgcaatgatctcgaggaaaccacaaagcacatcttcctatgtttgcatttcctcatctattaaatgaagagaagacctggatcctaacaggacgtctgcgaaaccctcacgaaaggttaagaaaagaataaagaacatgacaaaggtaaggtttacatgctcttattgtggcagaagggaaaaaaaagcagaaatgcatataaatacctcacagtttgtcacacaaagcacacatttaaaaaacaataacaaaaaacaacaaaaataagcaaccaaaaataattaacagtagttcaagtaatttaaacctgtattctctcctgaagaaataccagataggtaaaatatactcccgagccaccacaaactctcctaaaatccctttgtccatttctgccactttcaacatccatcttccacccagatgccagcttgaccacctcccccatcaaagtcaccagactgagctctaggaaagtcttcattaaatagtgaacacatgacatatactatcaactcagcttgaccttacaacataggtgctatggtttgaatgatggtgtcccttccaaacttaaatttaattaattaataattaattaaattgttgaaacttaagccccagtgcaacagtattgggagatgtggcccttgggtagcgattaagtcatgagggcgaggctctcatgactgggattagcacccttataaaagggcttgaggtcaaaaggagtactctcttgcccatgtgtccctcctgccatgtgaggacatggtgtacttccctccagaggatgcagcaacaaagcaccatcttggaattagagagcagccctcaacagacaccagtcctactggtgcattgatcttggacttctcagcctccagaactgtgacaaatttctgtggtttacaaatgaccaagtctgtgatattttgctacagcagcacaaacagcttaagacaatggataactaatctaagttccaaaactagtgggcttttgacatgccttggaagtagacagataaagcagtagccaagatcttttctcatctttgcataagcaaatcgtaattgacaaacatcagtatctcagagcattcaacaaagtggcaataagtaaatagataactgatgaacatacagaatcgaaaggctgacgtgggtttcaggtttctctgggttgtggggcatcccatggccaagtactgaaactcttccttgaataactatctccagagtttgagccattgaggctcttggtgacaaagacaactgatatgcttggatccatcaaataacatatcagcaattcatgccccactgatagtagaaaagtgctgcaatcattttattctgaagagagcataaagatttacaccacatgtcaaggctagatgttgttctgccaccaggaaacttgctgtgtgagacacacaaaaaattaaacacctcaagaaatacagctttctggaaaacatcaatacctcttctttttattgttacatttttctaatgaatctttcactgcaacaacttatgcagagaagttatgtatcctggaattattctactttttgataaccatttttaaagctttatactttataaagctttttttattctcccaattcacttaagaatttgcaatatccacctcgaggttaacctgaaactcaatttcacagctaattccaactaaacgtcttctccagctttccagatgccatctaaccagttatattctcactgattcagcagcatattcaaagagacagagaagaactgacatgatgctgatgaagcttaaacttcagggtccctgttgcatgggccctcagagtgccaagagtccttgggagtccgtgttctagctgagaggaaacatgaagaggcatttctctgtaagcatttgtggcaaagagatcttgaaagaaagggaaccggccgggcgtggtggctcacgcctgtaaccccagaactttgggaggccgaggcgggcagatcacgaggtaaggagatcgagaccatcctggctaacacggtgaaaccccgtctctactaaaaatacaaaataaattagccaggcatggcggcgggcgcctgtagtcccagctacttgggaggctgaggcaggagaatggtgtgaacctgggaggcggagcttgcagtgagccgagattgcacccctgcacttcagcctgggcgacagagtaagactccatctcaaaaaaaaaaaaaagaaaaagaaagagaaccaaatcatttcactgaatcattttgaaataaatactcacctttgcatctaattttgtattcataatcttttcctctttttcttaaagaggacctcccaaattgtatgagcttccaactccactaaacctgagtctgcctgatacaagggaaggcatgtaaaaatacttcttagtttatactctccactgcgcaagttttcaatctataaaaaaactcctgatctttaaaaataaaaaataaaggttggggagagggtagtaaaaagttactttaaatgtatatttttaagaatgctgatttcattatgtattttccaataccaaaatataaaataaaatagaacctgcagaacttttggctctctgacatttctccccagtgacttaaaactttcagatgaatgggacatctgggttctgagaagaatggtgtattattactgctctccacaatagcaggcctaaatggatttttcatgtttagactagtaaacataaaaagcaaacctatctcacatgactgatacgtttgcctttaacaaaacaaccccggccaaaaattattagaaaacagatcagcagccccactggactctgaagcaatgtaattaggtagtccaacactacattttgtcaaaaaattctgacaacctaataaccagattgtcatcagatagacattaaaaaatgataccaggtttgctccagcattaaaataccaccactttctgggttttttttccttctgtaaaaataaaaattaaaaatctatcagtgatgcatcccattggtctggatggtgtttaaatgagtctgtgccacttgaaggatggcaaaggaagttttgttttgatttaaagtttaagaaagaattcttcttaggaccacctgcttaacgttaatcacgaaatccctatgtgttaagaggggtaattataaaatggaatgataataacaatagtaaccggcagttattgagtgtttagattgtgccaggcactgggtttcattctgttgaatgaaaccattactggactcccaacaaccttgatgagaggtgctactctcaccctcattttcagaggtggaagggaggcttatcaaggctaaagaatccacttgcacacccaacagaggccacctcatgctcttaacctctgcaatgtgttgctgagaaggtggttagtttggatttgacagggtgaggtggtgggcattggggataagaggtgttattttcaagaaaaccattacgtatgtggccttccagaatatagtaatctagtatgtagtctggcctgtaagccaaattttatgtatagtgtgacactgaagaaaaaaacgttgtaattataggttaattcacacagttaatgcaattaaatagaaaaaggtagaaaccttaagatatagccttaggttcaaatatactctagcctccatttaattagtcaattataaaaaattgtccactaacctgtacaagaataaacctcagggagtacatttctaagatgacctttggaaccctagtatctgaaaatcttaccattttatctattaggatataaatgagttatctggtataaatcactgtcaaatttgcacaaacaaatggtgtggctgacagtcagtaataattcaatgacaccaattttttccccaacatgaaaacaccccagattactcagtcagccatgccatggctagatttgcaaggcactataaagtttccaaagtatttgtccaccacgtgattttgtttgacatccacaagcctacattatttctttttctttttcttttttttttttttttttttgagacagagtctcactctgttgcccaggatggaatgcagcagtgcgatcttggctcactgcagcctctgcctccttgttcaagcaattctcctgtctcagcctcccaagtagctgggactacacacatgtgccaccatgcctggctaatttttgtatttttagtagagacggggtttcaccatgttggccagaatggtcttgatcccctaacctcgttatctgcccacctcggcctcccgaagtgctgggattacaggcatgagccaccatgcccagccaagcctacattatttcttaaacacaaaaagatcattccgaatttcacaaacaatgttgagcaaaatatgccacacacaaagaagcccataccgtatgattctatttattatataaaattagtccaggcacagtgacccacatctgtaatcccaacactttggtggctaaggtgagaggattgctcgagggcaggggttcaagaccagcctgggcaacaataatgagactctgtctcttataaaaaactaaattaaccaggtgtggtggtgcatacctgtggccctagctacttgggaggctaagacgggaggatcacctgagcccaggaagtcaaggctgctgtgagctataattgtgccactgcactccagtctgggtgacagagcaagaccctatctcaaaaaaaaaaaaaaaaaaaaaaaaaaccacccaaaaacacacacaaattcaaaaacatggtaaaaccaatcgcagatgagtcaagatagtgacagcctcagtggaagcaagcatggtagtgagtggaagatggcatcagagtgtcatgttctacctcttattctagatgctggttccttaggcatgatgactttgggaaaattcatcaagatgtacaacttggatttacaagtatacaaatcctatagcatgttatgcttctacagaaaattgacataaaacaaccattctctccctttcagtttgctaactagaccaagaagaaaagatacactgagaaagagggtgggcactctgaaaacactgagaagtttgactttacaaactattgagctactgacagtcttgttaaaacctcttagcgtgcctttccctcacggcatcaatttatatagcaattcactacattaattcttgtaatgaaagtgtgaggagatctgtagtcaatcataattgtgccctgcaaattccagaaaatgtttgctgggatgtaagcctctgatggctggctcagcaagtgatttagagcaatgtggtgaactttcataataacagctcattaacaattgcgtttaaaatgtaaacaattgatatgtttttagaaacaccagtactgattaggtttatttcactttacaggaagtcagaagataatatgctaagcagattttcctttcttccctctcaacgataaattcaataatagttaggttagacctagttttgttttcagtttccatgaatgagaaatgtgaagaccatgggggttccaactcagtctctcttctccagttttgtgtttaggaagcacagacttgaaatgtattttgcatgtcttccaagactaaataccgaggttatgtttgtgcagctgtctgaataaaactgatgctacctcaaaaaataagttgattcagtcacaaaaaagtaccaagcaaagtattaattgatttaattgccctgcttttatttaaagctagacaagaactatgggggagggaccttatcaatgatgttaacagatatatatgtatatgcccagcacctagccaaattatagaaagagcatgggaactgcttaatgatttgctttaccagtcaatctttatgtggagtggggcatagttaatgatagtaatcattttaggcctgagttcctttaaattatcaatttaatatttttattaaatatatgcatttcaagtacatttatctccgttgctttttcgactaaaaaataaagacaaggaattcaaatgtttggattattttccctcactcataccaaatacaaggaaagtaaacataatgaagttaaagtaatattcttagcttgacaaatcacatattggggacatgagaagcctaaattatctgaagtcaattaattgttctttgtcaacggaaagaagaatttagctcccaaactggataaaatcccagccaagtaatgaccaataatggcaataatagtaacattatatttttcctgtctcttgattatcaacaatcaagaggctatagcaaataaatatacaaatatatactgtgaaaacatcaatatttgtatctacaagaaggatgaaaaattaactttgtgtagtaatatccctccactgtatttaggaaaagacaatacaacagacctctaagaatgggtgttccttctggtacttgaaggaagcacacaaacaaatatattatggaactggtggggaaaaaaacagtcatccagaatcacagggctgaagagagcccaggatgtcacctggcctgtcatgtccagaatactaacaagtttcatttaattccagcatcacaggctgctctgatattccctgggttccctctcctggctctgcctaaagacagacccaaagaccaaaaaaatctaccatgtagtccaagtcgtctaatgctagcaagcccctgaatcttgccacatagggcccacttataattgcagtaacatgtctctttcctagcctaattactattcttggagaaaaatctctctttgttttgacaatttttcctatcccttagaaaaaatggttcaggaatagattctagtattatttttcatacatgaaataaatattctatttattctattacatttctgttctataagtgtatggttagatgactgttactattctttctggctactggacataccaagtctggtttaaatactctaaccagaattagtccatgccaacataagcatttaatgagaaaggatcctggggctacatgctccatagtcatgtgaaatcggatactctgaaggggaaataactttctctgaagtgtaaccattaactgaaagagaaagcttggtgtggtatgagtcatgggtaacatgggtgaatcacagtcctgatgggcaggtggccatctctgaagaggatttcagaaatgctctccccaccttgatcaattaaattctcttattaggatagaaaacattgtattccacggttaaagtatgaaatgcctacataaccagataaaatgacacaactgttccaaaagttcagttatttacatactcctttcatgatttgtataatatctatgagccagtgttctatattaatacaacatttctctttaaatcaactcaattctgccagtctaaattacctttttgaagaagacaattttatatccccactgtaaatatccaatgtcactggtatacatattgtatatagccaatatcacttgccataaatagaaggaaactgaaaagatttcatgtgactaaccaaaaatgtattcattcatctcatctcatgtaccacatggaatactgtaacaaactggtttaaattcatactagagagtaaatgaatgatagaattctcaacacccctccatcctgtcctattaatgagattaaaggttgagggaccaccaaaagaggtaggcagggccctgagaacctgaaggagcatgtattcaggatagggggtatggggggtggggttggatgtcacaagctatgagaagtaagggtacaaaagagcagacagtagcccacttcatgattatttatatctggggctgtccctgaatgtgtcatagaggaagtcctctgtactgtttgatttgaaggcccttctacttctatgcaccatctcttttagacatccacatctgagctcacaaattatccatcacaaagaaatcacatgctgttaataggtctcttcattgtggctgacagtgcaaaacaaatgccagtccctgtgctgagatacagatttctggaatactaactgggattcccaatgtggggagacacagtagtagaggtcactccaaggactcctggaacatgctcctgaattctgttgcttcttgccatacttgccacagagtgccgttatgttctagctctctctgggtatccttctctccaatcagattctcaattctctcatcatctttctattgctcttaatacctagctctcagcaaaacaagtgcccaatttatagaaaaagcgagtaagtgactctgaatgaatcaaccacaagtgaatgaatgaatgaaaacagatcagctttgcagaaagaagcacctgcttacctaaggtatatccccaaattatcccaacctcatctaaagttatcagggaacacagcacaaattcattagcatcctgctgccttttcagagaaatgacaggttcttctccccttgcctgatcaaaagatttgctgcactctctctcttaaaatgcctccttgttacaaactgtgcaatcttggtcaacttacctaacctctctgaacatctgttcccttacttgttaaatattgaagaacaatatctgccccatgaattgtgataaagattaaatgagagatttcaagaaaagtgactgtagtatatcaaaagccaaaaagccagctacatttttggaccagatcacaatgccatgataaatatcaatggaataatggtccacaatgtcacaccacatgctttcattctgctgtcctcatgacttccctgtttgccagcatcagggtttttcacgtttacaaagaaaatggagcaggttagcaggtctcggtggcattaatgggcaaagcatcatgggcaactgttgttcataaatgctccttctcaaatgtatcctgggttggtgatgaccacaattcatttccattttgaagcgccctccattttttacttctttctcagtctgaatctcctatacttgtaatactgacggagcttcgctagtttctaaatcagaaagatgagcacgtgcagccacaggaagagaaatctgggacctgatgcctataatatttttcagacagagaatattcccccagtgtctctacccaggagatagtaaactactctgacatttcagctgttgcccctccaagcagattcacacacctcttcggctaacatcccctttgggcaggcatctactcatgtttacagttattcattatgactggctatacacagacagtgcctctggtgtcaaactgaatggccccttagacccccattccaagacagccagaggatacagacatatattaaataagacacaggcaggaaaactgcactgacttccttgagatggggaggctgaagccaaccaaagctgacctgctagagagtcctccagagctccagtgtgggatgactcacagcaaggagcacgggatcaaaatttttgaggtgcttcagggtcagaaagttttccagaacagcttctgcggatgtctgtgaacaaatatgccagcaaggaaaaagaccaactattttgcaggggaatcatcttgaaccagaagggccagcatgcattctaagtgccagggcaagttcccaaccctctgagctagctcacatctattgtgattccacacatctctccatggaataatctgtccaagaacacacaagcagagaagtgcccttctccatctacaagcatctaaatgtagagtcatgagagaaggtgagaggcagtgacttcaagaggtggcctctagacctcagaatccactctaatgaacacgctgtgtttaaacaagggatctcacattttctcaaaaggcagttagacacattcacatacttaggagtgaatctaagaactctagaaagaacggcacatttccctactgacacagttgtattgaaaaatcaatctgtggctctaagggaaatgagaaaacacaactggtgatttctagcacggcatccaatcttcacttttgtgatccctcaattctcagttcaagtataaatagactttttcccccccacgaagtaggaaaaggattaagtaggcaggacattttctaagttctgtgtagcatatgttcataagctttccttttgtagcatttatggattcattctggagtagggttaagccggagcaaagcaatttggcatgcttgcaatttgctttatcaggagaagcaagcacagactgcagaggccacctcgacctgagcagcaaagaagcttcccagaaccctgagggagacactgattattttccttacagggatgctcaagctgagccaacctccttgcaaaatagtcaatgagcttcattcagattatcctcaggaaagcagtggccaagcagacacaagtgatcatcatcatacgaacttaatttctgaccaaattccacaatcacactgctcttcctgaagtcagtcaggcagtatctatactgctacacaaacctcagggtcagcattccaatccatcccagcctaaggatcccattcagcagcagaggtgcttttcaaatctgtacatccacttcggtactttctatccacatgagagaacacactgcagcaggagatgaggatgcagtaggataattcttaatgttcacaatataatgttgaatggaaaaagcagtatgtgccattttcttaaaatacatgcccacataaagaactaactgggaaaaaaacacccagaaatgtcacttggagtcatctctgggctgtaggattatacacaatttctattttcttctcttagctgaactggtttccaaatattctaaaatgcaaatgcattacttttataatagtaataaagtaattctaaagtgatttaaatatatagactgtgattctcaaaatgcaggagttaaagaaaaaaataaagacatagactgaaccttacaaaaaagatttttatccacaaaacaaagaagcattttcattaaaacaatataattaacctgcaccattaggaaagaactacatcatatttcacattcaattttgttattatcaccatcactacttcttaagcatctgctgtacacaatgccctgtagcgggtataagtactcaaaaataaaccaggtggtaactaagttatttacatcactgggactcttccagtgttattaaagttgaagaacttgaaaagcagcatttattaataacaggggcattaatccagctgcctgccctgtactccacttacccagagagtctctcccagtcctgccaagcaagattaagtagaattaagacggcagctaaccaggtagaccttgtgccctgggccacaggtgactctggcaagggtgggcgcctgacctacatcaaaccattcagattctttcccccaggaaggaggaatacagttagtctctatcatccccttgaatgaggcacagggagttgcacgggtagccatagctggctggatatgcaaagaagccagtctgcagacagaagaggtgagaggctatgaggatcctgagacagtctcctgctctttaggatgggatgctgagagatatgtttgtccatttacccatcccactctggttagtttttgagggtcaaccacttcctggcctaaggcttcaggaagctcaccatctaaccttttgtcaaatgagtaagctatcctgtggccttgtagaagcctcacctttcatcgtttttgtcactgtttcttttgtattggttcttgaaaacaaattatctctaagacatagttgcaagattcagaactctgaactctcttcacccactccttacaagctgaatccctcctcctgtccttcttttcagatcttaacttaaacgtcattaactctgaccgctccaaatgaggaggcctgctatgttttgcctcttgatgtttcctaaataagatttacataacttttaattgtatatgctttgttggtttactagttctgatctgtctccttccctagggcataaaataatctgcccgacccatgttccttgtacctcacacagcacattcctagcatattacagaagatcaatagtattgaatgcatcagtcagtcatgtaggtgagtgcatattcattcactcaatatacaaataatgattgagcacttgaaatctgcaaggcttagtcctttcttgataaggaactaaggaactaatgattcaaaaaggagattaggtacatatgcaaagacaagaacatagacacagcagacactgctgagggcctgtcacacagaaatttccctctttgacaaagaaggccattacaccatggtaaagggatgaattcaacaagaagagctaactatcctaaatatatatgcacccaatacaggagcacccagattcataaagcaagcccttagagacctataaagagatttagactcccacacaataataatgggagactttaaaaacccactgtcaacatcacacagatcaacgagacagaaagttaacaaggatatccaggaattgaactcagctctgcagcaagcggacctaatagacatctacagaactctccatcccaaatcaacagaatatacattcttttcagaaccacaccacacctattccaaaattgaccacatagttggaagtaaagctctcctcagcaaatgtaaaagaacagaaattagaagaaactgtctctcagaccacagtgcaatcaaactagaactgaggattaagaaactcactcaaaaccgctcaattacatggaaactgaacaacctgctcctgagtgactactgagtacatcacgaaatgaaggtagaaataaagatgttctttgaaaccaatgagaacaaagacacaacataccagaatctctgggacacattcaaagcagtgtggagagggaaatttacagcactaaatgcccataagacaaagcagaaaagatctaaaattgacaccctaacatcacaaattaaagaactagagaagcaagagcaaacacattcaaaagctagcagaaggcaagcaataactaagaccagagcagaactgaaggaaatagagacacaaaaaacccttcgaaaaattaatgaatccaggagctggttttttgaaaagatcaacaaaattgatagaccgctagcaagactaataaagaagaaaagagagaagaatcaaatagatgcagtaaaaaatgataaaggggatatcaccaccgatcccacggaaatacaaactaccatcagagaatactataaacacctctatgcaaataaactagaaaatctagaagaatttgataaattcccggacacatacaacctcccaagactaaaccagaaagaagttgaatctctgaatagaccaaaaacaggctctgaaattgaggcaataagtaatagcttaccaaccaaaaaaagtccaggaccagagggattcacagctgaattctaccagaggtacaaggaggagctagtaccagtccttctgaaactattccaatcaatagaaaaagagggaatcctccctaactcattttatgaggccagcatcatcctgataccaaagctgggcagagacacaacaaaaaaagagaattttagaccaatatccttgatgaacattgatgcaaaaatcctcaataaaatactggcaaaccgaatccagcagcacatcaaaaagcttatccaccatgatcaagtgggcttcatccctgggatacaaggctggttcaatacactcaaatcaataaatgtaatccagcatataaacagaaccaaagacaaaaaccacatgattatctcaatagatgcagaaaaggcctttgacaaaattcaacaacccttcatgctaaaaactctcaaaaaatgaggtattgatgggacatatctcaaaataataagagctatctatgacaaacccacagtcaatatcatactgaatgggcaaaaactggaagcattccctttgaaaactggcacaagacagggatgccctctcttaccactcctattcaacacagtgttggaatttctggccagggcgatcaggcaggagaaggaaataaagggtattgaattaggaaaagaggaagtcaaactgtccctgtttgccgatgacatgaatgtatatctagaaaatcccaacgtctcagcccaaaatctccttaagctgataggtaacttcggctaagtctcaggatacaaaatcaacgtgcaaaaatcacaagcattcttatacaccaataacagacaaacagagagccaaatcatgagtgaactcccattcacaattgcttcaaagagaataaaatacctaggaatccaacttacaagagatgggaaggacctcttgaaggagaactacaaaccactgctcagtgaaataaaagaggatacaaacaaatggaagaacattccatgcccatgggtaggaagaatcaatatggtgaaaatggccatactgcccaaggtaatttgtagattcaatgccatccccatcaagctaccaatgactttcttcacagaattggaataaactactttaaagttcatatggaaccaaaaacgaccccgcatcaccaagtcaatcctaagccaaaagaacaaagctggaggcatcacgctacctgacttcaaactatactacaaggctacagtaaccaaaacagcatggtactggtaccaaaacagagacatagatcaatggaacagaacagagccctcagaaataatgccacatatctacaactatctgatctttgacaaacctgagaaaaacaagcaatggggaaaggattccctatttaataaatggtgctgggaaaactggctagccatatgtagaaagctgaaactggatcccttccttacaccttatacaaaagttaattcaagatggattaaagacttaaatgttagacctaaaaccataaaaaccctagaagaaaacctaggcaataccattcaggacataggcatgggcaaggacttcatgtctaaaacaccaaaagcaatggcaacaaaagacaaaattgacaaatgggatctaattaaactaaagcacttctgcacagcaaaagaaactaccatcagagtgaacaggcaacctacagaatgggagaaaatttttgcaatctactcatctgacaaagggctaatatgccaaatctacaatgaactcaaacaaatttacaagaaaaaaacaaccccatcaacaagtgggtgaaggatatgaacagacacttctcaaaagaagacatttatgcagccaaaagacacatgaaaaaatgctcatcatcactggccatcagagacatgcaaatcaaaaccacaatgagataccatctcacaccaggtagcatggcgatcattaaaaagtcaggaaacaacaggtgctagagaggatgtggagaaataggaacactgttacactgttggtgggactgtaaactagttcaaccattgtggaagtcagtgtggtgattcctcagggatctagaactagaattaccatttgacccagccatctcattactgggtatatactaaaaggattataaatcatgctgctataaagacacatgcatacgtatgtttattgtggcactattcacaatagcaaagacttggaaccgacccaaatgcccaacaatgattgactggattaagaaaatgtggcatatatacaccatggaatactatgcagccataaaaaatgatgagttcatgtcctttgtagggacatggatgaagctggaaaccatcattctcagcaaactatcacaaggacaaaacaccaaacaccgcatgttctcattcatagctgggaattgaacaatgagaacacatggacacaggaaggggaacatcacccactggggcttgttgtggggtggggggagggaagagggatagcattaggagatacacctaatgctaaatgacgagttaatgggggcagcacaccaacatggcacatgtatacatatgtaacaaacctgcacattgcgtacatgtaccctaaaacttaaagtataataaaaaaaaaataaaataaaaaaagaaattttcctgtttcacctcacaggtaaagccctgtgctggttaattttctgtgtcaactcaactgggccatggggtgcccaaactaaatattatttctggatgtgtctgtgagggtgtttctgggtgagattagcatttaaacagaaggccatcacccagtttgttgaacagaagaaaaggaggagaatggagaaatttgccctgtttctgcttcactgtgtgagctgggatacatgatctcatctttgccggccctcagactgggattatgccattggctcccttggttctcaggccttaggacttggactgaattacaccaccggctttcctgggtctccagcttgcagacagcacatcatggaacttctcagcttccagaatcacataagccaatacctcacaataagtaaataaaccaataaataaccttttggttctgtttctctgaagaatcctgactagtataagccccagttttattagggtggcctccctccataaagctatgtactcaagggaaggtgagattatcccagaaaagagataaaacccgattagtttaaaacagggaaagggttaacagctgctctgatatccctttagctccaagggcagctgggcagacccagagcagccagagaccccacacccatgccctacacacacacatcagccactccagctgtgagcagcctcttctgattgcttaacatgccggccaaattgtattttctatgtgcaccataacaagaacaaagttgggaagcaccaatctaagccaccagggatgagccccattccgcgtgccagtgtctgatttaggaaggagcatgggactgcaatcaactaaatgagacttaaggggaagtcagctcaggggttacaggaacagttccttgcttttaaaaagggacatataagaacagatattttattttgccagtggatgttgccatgtctgcctgtagctcccaaaaaggaaccagccatcttagaactatgaaggcagccagtctaagaactaagtcaacacactgaagatggcacaggaaaaagagcaagaaatagacactttggtaacaatgttgagccactgaattaacaaaacttgaaactgcacccctcccaggaggtcttattccctgagataattcatttctcttattctgatgggtttttatttggtggattttcaaatgtaacttggtagagcaattcacaaaataattgacagtgcttagcaatctgtcaatagctgagtgctcaaaatcctctccctgctacacagtgacaaccatcaaaggcaccctggtgggtccccagttgcttggcaaaagtggattgcagttagattccagacatttggagccaggattctataatgccttcccatcaatcatgacatccctggggcagcaggtagacttgcagagggcagggagcttttttcttttaattcccctattgtttgaaccatttcaagttgactttttgattatttgcagccaaaggcatcttcggtgataaatccatcttcacataattagcagcaaatttatgtggcctcctttgagcaaagactcaggagaaaatgatgcagagattcataattccacccacattccccaaaatctttagatgatgggtcttcagtgaattctctctacaaaaaaaaagacaactgagatgccagaaaaaggattaatcatgtgatcatctgacacttatcatgggagtcataaagtaccacacaaatggtgaggcatcaccttgtctcagtgttgaattaggggcagcataattttaaaatatcaatttgtactctttgttatccctcctgtgtatactgttccctttcgcatctcaaaaacttcaagactttgccttcttccctttgtctcccagacatattcaaacgcaaaagatgctaaaagacaaccaccaatcccctaaatccagtctccattaaagacttttctttttcaaaaaagcctaaattcattgaagggaatgtgttacatcccagcagaaaggtccaaaataaagacaatttgggttgttttgttttgcttaaaagtgttgttctttgatctgtttaggtgggcacttggagtacagtaaggattgggctttcctggtattggagagaagctggagcagttccttaaagtagtggacgctggcaccctgcttcctggcagaactctagagaggtgacaggacttttgatcgggatagtgatgggatactgggaaaatgactaccaaggccttgaagccacagcgaaaatcccagccttctttgcacagatacaacaggactacccaacaatgcatggacaagaagcctctcatggtgaccagagtggactaaagttcagggggcctttttaaaaatgttttatgctataacagacctgcagcatttttgcatcaatgaccttaagtgagcagacactccaaacaccacttagaacttcccaacatttagagaaaaaaaaagtaaccagttatgcatgtatgcatgcttgcaattcatgcagcattcaaaacaatttttcagaatgaaatctttaaatcagagtgcacactcagtttgtatttttagttgatttgacacatcatgagcaaccacaggattccacaataccaggccaagttcccactgtagggatggaaaggtgtgatacctttcctcacctctcacaagagtcacagccaacattcctataacaaaagacaggtcagcaagagaaaagcataacaaatgtatttaatcaaagttttatgtgacatagcagccttccgaaatgaagacccaaagactaaaggaaaatagtttttatgcttaggttcagtgaagaatgcacagctgtgtagaaatgtggtagaacaaaaggggtgtgttctactggaaatagaaaatagattggcggtggtgggggtggtggtggggatcagcaaggcctgactattcagattcttattggcctctctgtgtaacgttctttcttcccagtatggagcagggcctctatggaatgaggatcttcaaaggagaaggaagagagtgacttttctaggtttaatggcttgctgtggggaagagacattctagtttctatgacccaccttagggaagaggaattctggtttatacgacttgcttaaggggaggaagagaagtaggagacagtattatgggagactgccacaaagaccttggttctgagggctttccaatgtatttccttcagttcaaagtactcaggatgctaaggtaccatactttgggggattgggttctaagacccgacaccactagttatttaatattttccttcctgcaaatcctgctaccttaaaaaaaaggaaaactaactgtacaacaggtagttctgtagctaatgagcattattaaatattttcaaaacattccaataaaaggcaataccaaacggcttttatcctaatactttctaaataacgccacattcatttatgaggaattgcatttccctcaatgttctgggcattaatgaagattgaatataaataaaagaattgccttatatgtatagcactttaaagagttgagattcccaaataatacaaaagcattttcaagtcacacatggtatgtaaagtgaaaatgttcttgaaggaaatatcctctaataatacttacctacttcagagggtgatgggaagctctattaacaccaaaagaacacttttagatcttcaaataaaagcactatacaaatgcaaagtattattattatagttctgaaataatttcacacctagggatgagaaaaccccaggccaaattttattgcttctctcatacgtgataaacaagaaatgccataagcaaggggcgaggggggtggttagtggggggtgtgatagtgggggaagtggaaatcaaacagaacaaagacttcaaagtttctctttcactaggactttgtatttgcccagatgtcatttagggaactctcagggaagaaagaaaaaaaaaagtcccttaaaggtcagagttaagtacagggacaaagttctcattgcttttgtaccagataaagcaacaaccggctgagctgaaaaaaaataagcttgtctacttctatgggacataatttctcccaaagcacttctcaaaaaaaaagaaaaaaaaatggccagatgaattattactgaatcacccactagtgtgatgatctcacctatgaagtcaaaaggtagctgctttaacagacaccaggatttctagtcaattactgagagcactgagcaagacatgttattgctgatggtagtggtggtgatgatgatgaagatgataatgatgttgatgatcatgattgtgatgatggtaattacggtaatgataggatatggaacagaagttctcaaacctgctgatcaatggaatcacccctagagctttttacaatacagatttttggttctccacctcagccccactgattttgaatctctgaagatagaactcagaaattttttttaagtagccatcaggataactgaagtgacagtatttgtaagtaatataatgattaagaatgcaggctctgtgaacagactggctggtgtcttctcccagttctaacacttactagctatgtgaccttggaaaaaatacttagccttaagtctcaatttctacaactataaaatggaaatactaatatgacccacctatgaaattgacatgctattactacctaccttataaggtagatgcctaaagtaggcaaatttttttaaaagcacatattaattccaagaaagacaaaaaattttatattaaagaaaacataacaaataccattcggcttagcaacagaaaaaaattacgtaatcatgataatgtaaatattacctgttgatttaaataaaaattgtaatataactatgtcaggaggctgtggggaccagaagtggtaagagtggaaaggatcagagagctattgctaaaattgataaattaggaaaaaataatataagtacattatttagaaagagagaggtgaacaccagaaatatcagaatagaaagttgctaattctgggaagcaatccagagagaggtagaaagaaggcatagatgttgcagtttttaaatatttgctatttaatgctgttttatttaaacaatgtagatacactgctttgataaaaataaaaataaaatgtaaaaggtaatttgtaatgcatataagtacaatatggtatttctttatacactgaggctactataaagcttttcaatttaccaaaacttgcttttaaaaaaaaaagatataatatctccaactatgcaatcaaaatgtccatttcttaaaagtgtacaataaagacttactttttacctggcacactctaaatcctaaaaagatatttgctgaattgggctgaggatggtggaaaaatatataaagaacaaagttcctttgtacaatcaaggtcacagcaggaaggagatgacatcttcacctggggtgaaggcagggttaagggaagaccactaagggatggtctagtgtgctggacttagcaaaaattccattaacactccagactcaaaggggaaaagggaagaggcagttaccagacagtagaaaaagctgtagccgctgaagagaggcccccaaccggaactgtggccttccttagagggatacagccattgccaacccacaatgctgcagggaagaaagtagggaagaatatttcaacctcgtgttcccaggtcttcatccagttccttcccctggctaatacaacagaaagccagcaaacaagggagcccagagaatgcctgcgatagaggttaggcccatggtgcagagccatttagaagagagaggagctggaagcacaaatgtgaatacccagcacaagcactatacaaggtggttgttgctgttgtcgttgttgttgttgtttaatctgtctctttttcctactcagcctcctaaaacaagcccctcaaattttcatctgtttaagaaatattcatggcatgatagtaataaactgatgttatgcatttgttaaaatttactaagcactttcatatatattgtcttcatgtgatcctcaaaacagccctgtgcaataaatagggcaaaagttatcctcattttacaggtgaggaacctcagatcttaaagaaagttaggaatcttgcacagagtcacaaagctagcaaatggcagagccaaaactagaaggaatgtttcctaataccccagctaaggctcttccttccatataatactgtcatgctatttattcacagtaggagtgcaaaattgatatacctgttaaaaaaaaattaacaagttttgttctaggcactgcacagagcacagaagtagtcaacaaataagacacaaggggaaatagagaaaacttgcccattccattctcattctacattccacaagcaatgccagaactggaagtaattgagttttcaatcacattttacacatcattgaaaagaaggtgctcagtagggtaagaacagtgttcaaatgagaaataaaaattcagggaaaagtagacaaatgtctaaagaatatacctgttgtgtttggggttgctgggggtaaaccgaagaaaatctcagtcccttaacaatccccatgacacaaagagaccagggccccagaaattgggagggatgacttctccgcttctcttctcatttccagctctacgcccacatacatacaccttctttgagagctaagagaagcagccaagagtgacttttctgtaccaaacacaggagtactgggaagttcagcaaaataacccatttttgagagtctaataaagaactctgtactttttgtaatctactgcaaaacactgagctacttacacatgatgaaagaaagtaatgagtggcattttaattgtaaacctccaaacataccatatttattccagatctagctcactaatgaatagactatactatcaatgagggttctgtagttgcaagcagaagaaacaaattggctaatttaagaattattggaaggatactggagtctcagccaatccatggcagaatggaaaataaggtttggaggccatgactactagccaagacagacatggaggcaacagtggtctcatagtacatgttggcagatcagaatgcccacctaggacaagggagaatcctttagctaaagaatcaaattccaaagaaggagcatttacttagccaagcttgtggtcatacacccatccataggcagggtgcaggcccctgagtagggcccctggttacagttccactagcctaattacctcaaaaagaaataaagatgctgttaggaaggaaaaacatacacgacagaaaaaaaaaattggtgggggggttccctctatactaccaaggctttctttaaaaattcttgaagaagctaactagcagtagactcttaatttctcaagactattaactagtaattgatgacaaccaaggaaggtagttttcctaatacctacaaaacttcagcctaataacttttcacttccagaggcctcacttcctgtattacctgaaagttaccttttcatttgattcctaaggaccaagcagaattttcccttctttggtagcaacatgcttattttagaaatattatcctgaagcttctaaaaagaatagacttataaaaatgtataatgaataaattcataaagatgctgttgctgctgctgccgccgccgatgatgatgatgatgatgatgatgatgatgatgatgatgatattaataagagcagtggcagctcacatctactgagcacttatcatgggccaggacttctaagtccttgacacagaatacttcatttaattctccacacctacatgaagccaaaaacagtattatccccacttcacagatcaggaaactgagactctaagagggtgaataagttgtccgcagtccaacagctagtaaaagccaaatcatgactaaacccatgtctgattccagagtaccaattcaacaaaagattttcattgagaataaagaaaatggactgtgcctgtgtggaaacattccccaagaggaaaggaagcaccatatctgtgccaaaagattacaaagttgttaagatggctacatcaccaccaaatccaattattcatgagcatttatttctaaaagctatcaagtatttctttattccaagatgtggctcaatggtccagagacatgtagttgtatggccaaaaataagaattatctactgcttaagatagtaatttcttcactgatgttcaacaattatggcaaaattccaagccaaccagttttcatgcaccagagtttagttgccccaaagcaaatcctaagaaaagaggatttttttataactcatatttttattatctaaaaggggttttctccaatatccctgtaaaattcttctttgccctccaaataaacatgaaaaattcagccccagaaatagatttgtcaagaagttaggaagaacttaaagtacatggtaaatcaaaatggcttttcaactttaactaaagtggtcatagtaataattgctgcaataaaaatgacagaaaaaaaccctaaaagtatcaaaaatgtaatttatgatgaaaacaaatgtaaaattatagcatatttcaccctggccaccaaagactcttgatgaaaccgcagccctataattgcccagaatgaattctttaaattaaaatacttcatgcagaacagaaattaaacaatgaatcaaagaacaaagctgtacagaggtatgctcataaatatacctagcaaagaggaaacaattacatttttccatgtaaaaaccaacttgattgtaatgtttcacaagagaccgagtaggtacttttcccattgcttcaagcttggaagttcatttcctgtaattcatttagggctcagagtgactgggtggaatgaaattagatacaccaaattcagtggctcttttctttctacaaaactggctcttccatgcaactgcacaactgactttcacaataaatttcattcaacccaattgaaatgccactctgcattttattttaaatgctttatttggccagctagttttatttaactattggccagaagtggtacaagtgcattctttttccatctagcattaatcttagtaaacttagctccattggaatgtcttagctgctgagaagaaagcaaaagtcagcaagcatacaattgcatttgtctactctcaacacatcattttatttcctcctgctctctgctaactattgctcagcacttttgcctaagagggaggacaagcaggtggttaaggaagttgtcctgtcagctatatctttagtccaagtgtttaaatctctgaataaaagaaaaatcaatgttgtaaaggcaatgtttgtcaaggccatgtaataaatacacttacctttacagactgttctcagtggatttctcttctttcctgagcttcaaagctacaaagacataaaaatgaaagacagagttgtctgtgagtacaacaacaaacattttctccccatgtctctaaatagaatttccatatgccatggtatatggtgctagccaaataaaccattgataaaacttgtgcctcatacctcccgcacaagaggccaaaaaaagacagtcagaaactgaaaatggtgcacacatctacccagaattgaagcacacaaaccttggccaaatctacagtcaaatcttttggagtgtgtactcctcaacagaatgggaacggcttatagcgagatgaaaatcaaattaaacatgagtgtgacatactcagtctgactaagcattttattttcttatttctttttgtcatctttcttgcatgctctatttccatttctctgaaaaagtttcacttagggatgcctattccatttatatgacatgcatggtccttctaatataaacctcaccacttgctccgtaagtatatgtgtgcatgattacagggacaatcacccttcctgtatgtagactgcagccttctctcggaagaaactcacaaaacagaggaagccacaacttgacatttcaaatcaaatcttgttaacttcagctctctgtgatcaaaacataaatactatgcactgaccacacacaaatcaatgtgacaaaagatctgcaaaagcaacagtaataacttacagtatcgtgaagctggttctttaatcatccaatcttactcataaggtgcctctacagtcaccagtaatgggaatatgattctttctctcatttttggctaggtcctaacatctccgaaaggtgcagtagttggggatagacagctacaccacagcttttccatggttctttttttttccttcaatatctgaagggattgttttagcttttactgggctgtttccctccacatccctctattccatcaaagaatgcattaccactgatgcatgaccaccaaagaacaggtcagacttacgggctaagatgtaaatttcagactattaatgcaggaggtaggtcccttctatgggacagcatcagaaatttctccttccccctgagctacaccgtttaccaatgagtttagaacaagcagagtttggagaatattagataaaatagtgtaatattgcatttgtgaaatctaagagatgaataatctgataacatggagattgagctgaatccctttccacttcaaacacagaaatgctaaacaaaatacaataatgacttaaaatacatatatgtgtgtgtatgtgtgtatatatatgtgtgtgtatgtatatacatatgtgcatatatatacacacacatgtacaaatatacatacacatgtgtatatatatacctacatatatatacacgcacatagatacacacacacacacacacacacacgcacatacacacacatatatagccaagcccaaaagaaagagaaaaagccgtctgggaagtgagaagcgcctctgctcagccgccaaccatctgggaagtgaggagcccctctgcccggctggccaactgactgggagtgaggagcgcctctgcccggccgcccaactatctgggaagtgaggggcccctctgcctggccgctgccctgtccgggaagtgaggagcgcctctgctcggcagccgccctgtctgggaagtgaggagtgcctctgcccggctgcccaaccatctgggaagtgaggagcgcctctgcccggacgctgtgcaaccttccaagtgtgaagtgacagccttgtgtgtgatcttttctgttcttccccaagtttgcatttttgacattaaagtttactttttcgttaaaaaaaaaaaaagagagagagaaagccaatataaaaatatatggatgtagagtttctagaatgaaagacatgagtcctctggaaaaagtataacaatatctcaaaaagataaataaaagcaaatgcatactttcatatatcagaatgaaaccacagaacgcagagataaaaataaaatcttaaagtcaaccagagagggaaaaaaaagagacttctagcaaaagaacatgtcattagcaaaaatgaaagtaaagcaacagtgcggacactgtgtctcacgcctgtaatcccagcactttgggacaccaaggcaggcagataacctgaagtcaggagtttgagaccagcctggccaacgtggtgaaaccttgtctctactaaaaatacaggccgggcgcggtggctcactcctgtaatcccagcactttgggaggccgaggcaggcagatcacgaggtcaggagatcgagaccatcctggctaatatggtgaaaccccatctctactaaaaatacaaaaaattagatgggtgtggtaccaggcgcctgtagtcccagctacttgggaggctgaggcaggagaatggtgtgaacctgggaggcggggcttgcagtgagcagagatcgcaccactgcactccagcctgggcaacagagcgagactccgtctcaaaaaaaaaaaaaaaaaaaattagctgggcgtggtggtgggcacctgtaatcccagctactcaggaggctgaggcaggagaatagcttgaacccaggaggcagaggttgcagtgagctgaaattgcaccattgcactccagcctgggcaacaagagagaaactttttctcaaaaaaaaaaaaagaaaaattatatgcccatgctaaacctaacattcaagaatgatagagaacaatagataaatcagaacatttttcaaaaaaaaaattgtttagtgctcacagtagtttacttttgccaaaagaaatactaaaataagatatgcttgaataagcgggaatttatcccagaaggaagcagtgagaaacaagaagcaatagtaaacagagaaattagtaagcatgatggtaaatctggtaactttaataataagtaatgggtattgattaataattattaagctctacttgtaaaaaaacaaaacaaaacaatttttagcatttgccaataaagtgaaactgagtggtttatcacaatcatatggaataaagaagggggtaataaattgtttacaaggaggagagaaatactacttaaggcattaaagatatgcactaaaactactgattaacttgttaaggataaccagcatttctttctctgtctatataagcaaagaggcccttacacatgtactcacagagatttgtacaatgtttacattctacaaatgtattgccaggatggcaaaaaatacagaaaacaacccaaacatctatcagcaatacgataaacactttttttacatattcttagaatggagtattatataactttggaaaatcagtgaaagttacccacatcaacatagatacctctcaaaatataatgtaaaacaaaagaagcaagtcacagaaagctatacatattattctatttgtataacattcaaaaaggcaaaaataaatactgtgttgtttttgaatataaagtataagtggtacaaaacaaaataaagaaagggaagaaatttacacagaattcaggctatctttatcttgagagtgggagaggagatggaatacgtgagaggaatgggggggcttctggaatatggtaatgatctgtttcttggcctagaaagaggtatctggacaatcagtttattattttctttaaactgtatatgtacacttgcacaaattattttgcatgtaggctctatttccgaattttaaaacatacaagagtaaccaccaaaagaacagaaatttccaaatcaatagaggaaacaacatagagtaaacgcaatcgattctctatacaacattgaaatggaagggagaaagaagcaaaggaaaacacgctgaatagaatataaaaaagaaaatattttaactaagtccagctgtgtcaggaatcagggtaagtacatctgttaaaattttatcaaaacgaatgttttaaaatcttgctatgtgttgtttataagaaacaaatttaaacataagttttgaaaagaaaagtgtggataagtacacaccacggaaataggaaccaaaaaaaagctgacggaataagttattgttaggcatgacgaaagttagcaataatagaagagaaagtatttatattctttttttaaaattttattattattatactttaagttttagggtacatgtgcacaacgtgcaagtttgttacatatgtatacatgtgccatgttggtgtgctgcacccattaactcatcatctagcattaggtatatctcctaatgccatcccacccaccccccgccccacaacaatccccagtgtgtgatgttctccttcctgtgtccatgtgttctcattgttcaattcccacctatgagtgagaacatgcgctgtttggtgttttgtccttgtgatagtttgcagagaatgatggtttccagcttcatccatgtccctacaaaggacatgaactcatcattttttatggctgcatagtattccatggtgtatatgtgccacattttcttaatccagtctatcattgttggacatttgggtcggttccaagtctttgctattgtgaatagtgccacaataaacatacgtgtgcatgtgtctttatagcagcatgatttataatccttttagtatatacccagtaatgagatggctgagtcaaatggtatatctagttctagatccctgaggaatcgccacactgacttccacaatggttgaactagtttacagtcccaccaacagggtaaaagtgttcctatttctccacatcctctccagcacctgttgtttcctgacattttaatgattgccattctaactggtgtgagatggtatctcattgtggttttgatttgcatgtctctgatggccagtgatggtgagcattttttcatgtgtcttttggctgcgtaaatgtcttcttttgagaagtgtctgttcttatccttttcccactttttgatggggttgtttttgtcttgtaaatttatttgagttcattgtagattcgggatattagccctttgtcagatgagtagattgcaaaaattttctcccattctgtaggttgcctgttcactctgatggtagtttcttttgctgtgcagaagtgctttagtttaattagatcccatttgtcaattttgtcttttaatgccattgcttttggtgttttagacatgaagtccttgcccatgcctatgtcctgaatggtattgcctaggttttcttctagggtttttatggttttaggtctaacatttaagtctttaatccatcttgaattaacttttgtataaggtgtaaggaagggatccagtttcagctttctacatatggctgccagttttcccagcaccatttattaaatagggaatcctttccccattgcttgtttttctcaggtttgtcaaagatcagatagttgtagatatgtggcattatttctgagggctctgttctgttccattgatctatatctctgttttggtaccagtaccatgctgttttggttactgtagccttgtagtatagtttgaagtcaggtagtgtgatgcctccagctctgttcttttggcttaggattgacttggtgatgcaggctcttttttggttccatatgaactttaaagtagttttttccaattctgtgaagaaagtcattggtagcttcatggggatggcattgaatctataaattaccttgggcattatggccattttgacaatattgattcttcctacccatgggcatggaatgttcttccatttgtttgtatcctcttttatttcattgagcagtggtttgtagttctccttgaagaggtccttcccctcccttgtaagatggattcctaggtattttattctctttgaagcagttgtgaatgggagttcactcatgatttcactctctgtttgtctgttattggtgtaaaggaatgcttgtgatttttgcacattgattttgtatcctgagactttcctgaagttgcttatcagcttaaggagattttgggctgagacgatggggttttctagatatacaatcatgtcatctgcaaacagggacaatttgacttcctcttttcctaattcaataccctttattttcttctcctgcctgattgccctggacagaacttccaacactatattgaataggagtggtgagagagggcatccctgtcttgtgccagttttcaaagggaatgcctctagtttttgtccattcagtatgatattggctgtgggtttgtcatagatagctcttattattttgagatatgacccatcaatacctaatttattgagagtttttagcatgaagagttgttgaattttgtcaaaggccttttctgcatctattgagataatcatgtggtttttgtctttggttctgtttatatgctggattacgttaattgatttgcatatgttcaaccagccttgcatcccagggatgaaacccacttgatcatggtggataagctttttgatgtgctgctggattcggtttgccagtattttattgagggtttctgcattgatgttcatcagggatattgatctaaaattctctttttttgttgtgtctctgcccagctttggtatcaggatgatgctggcctcataaaatgagttagggaggatttcctctttttctattgactggaatagtttcagaagaactggtaccagctcctccttgtacctctggtagaattcagctgtgaatccatctggtcctggactttttttggttggtaagctattacttattgcctcaatttcagagcctgttattggtctattcagagattcaacttctttctggtttagtcttgggagggtgtatgtgtctgggaatttatcaaattcttctagattttctagtttatttgcatagaggtgttcctagtattctctgatggtagtttgtatttctgtgggatcggtgttgatatcccctttatcatttttattgtgtctatttgattcttctctcttttcttcttcattagtcttgctagaggtctatcaattttgttgatcttttcaaaaaaccagctcctggattcattaattttttgaagggttttttgtgtctctatttccttcagttctgctctgattttcattatttcttgccttctgctagtgttgagtgttgctcttgcttctctagttcttttaattgtgatgttagggtggcacttttagatctttcctgctttcttttgtgggcatttagtgctataaatttccctctatacactgctttgaatgggtccaagagattctggtatgttgtgtctttgttctcgttggtttcaaagaacatctttatttctgccttcatttcgttatgtaccccatagtcactcaggagcaggttgttcagtttccatgtaattgagtggttttgagtgagtttcttaatcctgagttctagtttgattgcactgtggtctgagagacagtttcttctaatttctgttcttttacatttgctgaggagtgctttacttccaactatgtggtcaatttcagaataggtgtggtgtggtgctgaaaaaaatgtatattctgttgatatggggtggagagttctctagatgtctattaggtccgcttggtgcagagctgagttcaattcctggatatccttgttaactttctgtcttgttgatctgctaatgttgacagtggggtattaaagtctcccattattattgtgtgggagtctaagtctctttgtaggtcactcaggacttgctttatgaatctgggtgctcctgtattgggtgcatatatatttaggatagttagctcttctcattgaattgatccctttaccattatgcaatggccttctttgtctcttttgatctttgttggtttaaagactgttttatcagtgactaggattgcaaaccctgcctttttttttgttttccatttgcttggtagatcttcctccatccctttattttgagcctatgtgtgtctctgtacatgacatgggtttcctgaatacagcacactgatgggtcttgactctttatccaatttgccaatctgtgtcttttaattggagcatttagtccatttacatttaaggttaatattcttatgtgtgaatctgatcctgtcattatgatgttagctggttatttcgctcattagttgatgtggtttcttcctagccttgatggtctttaaaatttggcatgtttttgcagtggctggtactggttgttcctttccatgtttagtgcttccttcaggggctcttttagggctggcctggtggtgagaaaatctctcagcatttgcttgtctgtaaaggattttatttctccttcacttatgaagcttagtttggctggatatgaaatgctgggttgaaaattctttcctttaagaatgttgaatattggcccccactctcttctggcttgtagagtttctgccgagagatccgctgttagtctgatgggcttccctttgtgggtaacccgacctttctctctggctgcccttaaaattttttacttcatttcaactttggtgaatctgacaatgaagtgtcttggagttgctcttcttgaggagtatctttctggcattctctgtatttcctaaatctgaatgttggcctgccttgctagattggggaagttctcctgaatgatatcctgcagagtgttttccaacttggttccattctccccgtcactttcaggtacaccaatcagacatagatttggtcttttcacatagtcccatatttcttggaggctttgtttgtttctttttattattttttttctaaacttctcttctcgcttcatttcattcgtcttccatcattgataccctttcttccagttgatcgcatcggctactgaggcttgtgcgttcgtcacgtggttctcgtgccttggttttcagctccatcaagtcctttaaggacttctgtgcattggttattctagttagccattcatctaattttttttcaaggtttttaacttctttgccattggttcgaacttcctcctttagctcggagtagtttgatcatctgaagccttctactcttgactcatcaaagtcattctccatccagctttgttccattgctggtgaggagctgcgttcctttggaggaggagaggcactctgatttttagagtttccagtttttctgctctgttttttccccatctttgtggttttatctacctttggtctttgatgatggtgacgtacagatgggtttttggtgtggatgtcctttctgtttgttagttttccttctaacagtcaggatgctcagctgcaggtctgttggagtttcctgggggtccactccagactctgtgtgcctgggtatcagcagccgtggctgcagaacagcggatattgatgaaccgcaaatgctactgcttgatcgttcaagttttgtctcagaggagtacccggccgtgtgaggtgttagaacgcccctagtgcggggtacctcccagttaggctactcgggggtcagggacccacttgaggaggcagtctgcccattctcagatctcaagctgcgtgctgggagaaccactactctcttcaaagctgtcagacagggacatttaagtctgcagaggttactgctgccttttgtttgtctgtgcccggcccccagaggtggagcctacagaggcagacaggcctccttgagctgtggtgggatccacccagagcgagcttcctggtctctttgtttacctactcaagccttggcaatggcaggcgcccctcccccagcctcgctgccgccttgcagtttgatctcagactgctgtgctagcaatgagtgaggctccgtgggcgtagggccctccgagccatgtgcggtatataatctcctggtgtgccgtttgttaatcctgctggaaaagtgcagtattacggtgggagtgacctgattttccaggtgccatctgtcacccctctcttttactaggaaagggaattcactgaccccttgcgcttcccggataaggcaatgcctcgccctgcttcggctcacacacagtgcgctgcacccactgtcctgcacccactgtattgcactccccagtgagatgaacctggtacctcagttggaaatgcagaaatcacccatcttctgtgtcgctcacactgggagctgtagactggaactgttcctattcggtcatcttggctccatcccccgttttttattgacatataacaaattatccaaaaactagatatttaaaaataaaagtggtggctggcagccaagatggccgaatagaaacagctccggtctacagctcccagcatgagcaatgcagaagaagggtgatttctgcatttccatctgaggtaccaggttcatctcactagggagtgccagacagtgggcgcaggacagtggttgcagagcaccgtgcacaagccgaagcagggtgaggcattgcctcactcgggaagtgcaaggggtcagagatctccctttcctagtcaaagaaaggggtgacagacggcacctggaaaatagggtcactcccaccctaatactgcacttttccgatgggcttaagaaacggcgcaccagaagattatatcccacacctggctcgaagggtcctatgcccacggagtctcgctgattgctagcacagcagtctgagatcaaactgcaaggcagcagcgaggctgggggaggggcgcccgccattgcccaggcttgcttaggtaaacaaagctgccaggaagcatgaactgggtagagcccaccacatctcaaggaggcctgcctgcctctgtgggctccacctctgggggcagggcacagacaaacaaaaagacagcagtaacctctgcagacttcaatgtccctgtctgacagctttgaagagagcagtggttctcccagcacgcagccagagatctgagaatggggagactgcctcctcaagtaggtccctgacccctgacccccgagcagcctaactgggaggcacccccaagtaggggctgactgacacctcacacggccgggtactcctctgagacaaaacttccagaggaacgatcagacagcagcattcgcggttcacgaaaatccgctgttctgcagccactgctgctgatacccaggcaaacagagtctggagtggacctctagcaaactccaacagtcctgcagctgagggtcctgtctcgtagaaggaaaactaacaaacagaaaggacatccacaccaaaaatctgtacataaccatcatgaaagaccaaaagtagataaaaccacaaagatgggaaaaaacagagcagaaaaactggaaactctaaaaagcagagcgcttctcctcctccaaaggaacgcagttcctcaccagcaacggaataaagctggatggaaaatgactttgacaagttgagagaagaaggcttcagacgatcaaactactccgagctaaaggaggaaattcaaaccaaagacaaagaagttaaaaactttgaaaaaaatttagacgattgtataactagaataaccaatacagagaagtgcttaaaggagctgatggagctgaaagccaaggcacgagaactacgtgaagaatgcagaagcctcaggagccgatgcgatcaactggaagaaagggtatcaatgatggaagatgaaatgaatgaaatgaagcaagaagagaagtttagagaaaaaataataaaaagaaacaaacaaagcctccaagaaatatgggactatgtgaaaacaccaaatctacgtctgattggtgtacctgaaagtgatggggagaatggaaccaagttggaaaacactctgcaggatattatccaggagaacttccccaatctagcaaggcaggccaacattcagcttcaggaaatacagagaacgccacaaagatactcctcgagaagggcaactccaagacacataattgtcagattcaccaaagttgaaatgaaggaaaaaatgttaagggcagccagacagaaaggtcgggttacccacaaagggaagcctatcagactaacagcggatatctcggcagaaattctacaagccagaagagagtggaggaggcccatattcaacattcttaaaggaaagaattttcaacccagcatttcatatccagccaaactaagcttcataagtgaaggagaaataaaatcctttacagacaagcaaatgctgagagattttctcaccaccaggcctgccctaaaagagctcctgaaggaagcactaaacatggaaaggaacaaccagtaccagccactgcaaaatcatgccaaattgtaaagaccatcaaggctaggaagaaactgcatcaactaacgagcaaaataaccagctaacatcataatgacaggatcaaattcacacataacaatattaactttaaatgtaaatggactaaatgttccaattaaaagacacagactggcaaattggataaagagtcaagacccatcagtgtgctgtattcaggaaacccatctcacatgcagagacaaacataggctcaaaataaagggatggaggaagatctacccagcaaatggaaaacaaaaaaaggcaggggttgcagtcctactctctgataaaacagtctttaaaccaacaaagatcaaaagagagaaagaaggccattacgtaatggtaaagggatcaattcaacaagtagagctaactatcctaaatatatatgcatccaatacaggagcacccagattcataaagcaagtcctgagtgacctacaaagagacttagactcccacacaataagaatgggagactttaacaacccactgtcaacattagacagatcaacaagacagaaagttaacaaggatatccaggtattgaactcagctctgcaccaagcagacctaatagacatctacagaactctgcatcccaaaacaacagaacatacatttttttcagcaccacaccacacctattccaaaattgaccacatagttggaagtaaagctctcctgagcaaatgtaaaagaacagaaattataacaaattgtctctcagaccacagtgcaatcaaactagaactcaggattaagaatctcactcaaaaccgctcaattacatggaaactgaacaacctgctcctgaatgactactgggtacataacgaaatgaaggcagaaataaagatgttctttgaaaccaacgagaacaaagacacaacataccagaatctctgggacccattcaaagcagtgtatagagggaaatttatagcactaaatgcccacaaaagaaagcaggaaagatccaaaattgacaccctaacatcacaattacaagaactagaaaagcaagagcaaacgcattcaaaagctagcaaaaggcaagaaataactaaaatcagagcagaactgaaggaaatagagacacaaaaaacccttcaaaaaattaatgaatccaggagctggttttttgaaaggatcaacaaaattgacagacagctagcaagactaataaagaagaaaagagagaagaatcaaatagacgcagtaaaaaatgataaaggggatatcaccaccaatcccatagaaatacaaactaccatcagagaatactacaaacacctctgcacaaataaactagaaaatctagaagaaatggataaattcctcgacacatacaccctcccaagactaaagcaggaagaagttggatctctgaatagaccaatgacaggctctgaaattgtggcaataatcaatagcttaccaaccaaaaagagtccaggaccagatggattcacagccgaattctaccagaggtacaaggaggaactggtaccattccttctgaaactattccaatcaatagaaaaagagggaatcctccctaactcattttatgaggccagcatcatcctgataccaaagcctggcagagacacaaccaaaagagagaattttagaccaatatccttgatgaacattgatgcaaatatcctcaataaaatactggcaaaccgaatccagcagcacatcacaaagcttatccaccatgatcaagtgggcttcatccctgggatgcaaggctggtccaatgtatgcaaatcagtaaatgtaatccagcatataaacagagccaaagacaaaaaccacatgattacctcaatagatgcagaaaaggcctttgacaaaattcaacaactcttcatgctaaaaactctcaatgaattaggtattgatgggacatatctcaaaataataagagctatctatgacaaacccacagccaatatcatactgaatgggcaaaaactggaagcattccctttgaaaactggcacaagacagggatgccctctctcaccactcctattcaacatagtgttggaagttctggccagggcaatcaggcaggagaaggaaataaagggcattcaattaggaaaagaggaagtggacaaattgtccctgtttgcagatgacatgattgtatatctagaaaaccccatcacctcagcccaaaatctccttaagctgataagcagcttcagcaaagtctcaggatacaaaatcaatgtacaaaaatcacaagcattcttatacaccaataacagacaaacagaaagcctcatcatgagtgaactcccattcacaattgctcctaggaatccaacttacaagggacatgaaggacctcttcaaggagaactacaaaccactgctcaatgaaataaaagacgatacaaacaaatggaagaacattctatgctcatgggtaggaagaatcaatatcatgaaaatggccatactgcccaaggtaatttatagattcaatgccatccccatcaagctaccaatgactttcttcacagaattggaataaactactttaaagttcatatggaaccaaaaaagagcccgcatcaccaagtcaatcctaagccaaaagaataaagctggaggcatcactctacctgacttcaaactatactacaaggctacagtaaccaaaacagcatggtactggtagcaaaacagagatatagatcaatggaacagtacagagccctcagaaataatgccgcatatctgcaactatgtgatctttgacaaacctgacaaaaacaagcaatggggaaaggattccctatttaataaatggtgctgggaaaactagctagccatatgtagaaagctgaaactggatcccttccttacatcttatacaaattaattcaagatgcattaaagacttaaacattagacctaaaaccataaaaaccctagaagaaaacctaggcattaccattcaggacataggcatgggcaaggacttcatgtctaaaacaccaaaagcaatggcaacaaaagccaaaattgacaaatgggatctaattaaactcaagagcttctgcacagcaaaagaaactaccatcagagtgaacaggcaacctacagaatcggagaaaatgtttgcaacctactcatttgacaaagggctaatatcccgaatctacaatgaactcaaataaatttacaagacaaaaacaaacaaccccatcaacaagtgggcgaaggacatgaagagacacttctcaaaagaagacatttatgcagccaaaaaacacatgaaaaaatgctcaccatcactggccatgagagaaatgcaaatcaaaaccacaatgagataccatgttacaccagttagaatggcaatcattaaaaagtcaggaaacaacaggtgctggaaaggttgtggagaaataggaacacttttacactgttggtgggactgtaaactagttcaaccattgtggaagtcagtgtggcgattcctcagggatctagaactagaaataccatttgacccagccatgccattactgcgtatatacccaaaggactataaatcatgctgctataaagacacatgcacacgtatgtttattgcagcactattcacaatagcaaagacttggaaccgacccaaatgtccaacaatgacagactggattaagaaaatgtggcacatatataccatggaatactatgcatccataaaaaatgatgagttcatgtcctttgtagggacatggatgaaattggaaatcatcattctcagtaaactatcgcaaggacaaaaaaccaaacaccgcatgttctcactcataggtgggaattgagcaatgagaacacatggacacaggaaggggaatatcacactctggggactgttgtggggtagggggaggggggagggatagcattaggagatatgcctaatgctaaatgatgagttaatgagtgcagcacaccagcatggcagatgtataaatatgtgactaacctgcacgttgtgcacatgtaccctaaaacttaaagtataataataataaaataaaaaaataaaaataaaagtaagaatttattatctctcacggtttctacggatcaagaatcctggcagggttcagcaggatggcttttctgtatgctacaaagcctgaggcttccgctagcagacttgaaagttaggggctggaatcatctgatatctcatgccctcaaatatctaagctaggggctgggatcatctgaagactcatgccctcacatatctgccagttgttgctcagggttagctgagaccacagctagagctagcagctggaatatgtccatgtggcctctccatgtggcttgagtctcctcacaacatggtggctgagttccaaagacgagttctgagagaagctgtattttttatgacctaggctcagaaatcacataacaccatttacactgcactccactggtcaggtcagtcacaaacccccacccagactaaaagaaagagaacaacagccttgccgccctcaatgagggagtgtctgttacactgtaagaagagcacaggattggataaatgtgctgatgtgatcacctttggaaaatacaatctgccacaacattctttacaagcacatatgaaacataagcaaaaattaaacatatagtaggcctgaaagtagtttcaatgaatatcaaacaatagatatcaaaggtttcttattataatgcattaaagttggaaaagaattactaaatatgatttttaaaatatgtttgaaaattacaattttatgacagtttccctttgtgaattgggattagacaaggaccttaactaaatcccactggatgaaggtccacatctggagtcaaaagagatcactaatttggttgtggatacattgaatttgaagtgccttagagacatctaaaggaaaatatccaggtaagcagttgggtagatgggactgtagctaagaggggaggtctgagagtggtaagttatctgtaagtaggaagtaactgcagttgtgaatatggatgtgactgtccagggagtcagtataagtagaaagacaaaagggcctaggactgatccgtgagcaagttcaacatctaacagttgtgttgaggaggatgaatcctacataagagagagaacagttgccagagaagtaaaactaaatcctcaagattcacagaaaggtcaagcaatataaatactaaaaaaagcccaataggaaggtcatcgaggaactcagcaggaactgttttgtggactgatggaggcagaattcagtttggagttggttaagacagaagtggaagtcattaaacaaagacaatgagtaaagacaatcctagataagcttggctgtgactggggaggaaagagtggcaactaaaggacaaagggctggaagacggtttgtttgtatagtttttaaacagaaaaaaggccgagtatgtatcaaggtaatggagaagatctatttaagatgcagagtgagtgtagaagagaaagggtaaccagtactgaaggttcctgagaaggttgaaagggacaggtggtaggactggttttaaactgagctttggcctcaccgtaatcatatagtgtcttatgataggaacccatgctattgtcttaatgcactactttatcgtgtgtttatgttttctcaccctaattagaatctaagctctataaaatgtatggcctttattgttcaaaccaaccccaccttactcacacattgaaaaccccagattctatcccagcacccaacagtcattcaataaacactcatgtgtcacttagtaatgggagtatattctgagaaatgcacccataggtgattttgtcattgtgcaaacatcactgcatgtacttacacaaacctagaaagtgtagcccactatacacttatcctatatggtatagcctattgctcctaggttacagacctgtaaagcatgttactgtcctaaatgctgtaagtaattataacacgatgataagtatttgtgtatctaaacatctaaacatataaaaggtatggtaaaaatatagtattataatattatggaaccatggtcctatttgcagtccatcattgactgaaatgacattatgtggcacacaaccatacttgttgaataaactaatacaagcagattctatcatctttgtgtacatctttgtgtaaatctaaaaatgtgtgtgtgtgtgtgtgtgtgtgtgtgtgtgtgtgtttgtgtgtgtcctggctatccaaaatgcgagcaagtcagaacccaaaagttcttgttccagagtatagatatctagacaatagtcaggaatagccactcaaattagccctctctttcccatgttttccttgacctaaaaatccaaggatctaaactacaggccatgaaaacattttcacctacagttacaatattataccacttcccactttcctcatgcctaattcgtccatattttgttctagagcagacaaactctgtatccttcatttgacctcctgcaagacataaattaaatttaaatgaatccaaatactttgggcttcagttctcctaaaagaaataaacatggaagtagagcagtacaggccagtaacacactgatttatcttgctgatttttcagaggatagccctccaaaaaatctttacaaacctcaagcctctcaatccatggatccaaaccccagctcccttaaaaataggtctgaatttaaacaaatatctttccgaaatatagaaacctgctttgatggtgactcatcttatcccagtagaaacctttctctgggtaccatccaactgcaccattcttaaggcaacattacctggaactgagggatttgcctctattgttgcattctgcagccctcacctgacttaactgccacgttaaggaattggttattgacctttaagtctttaacaattatttacatacctaggaaagagtctgtgcattcaggtacaagaatgaagacaccgaataaattcagccctcgttttcatttttatgctacgttcagtgagctgttactgcagacaaattattgcagcattctttcaaatgatagccaattttcaactaagagaagattcttaaacccctttctaaaaccttttcctgcatatcggtgaaaaccaggcagttggaaaacacagccctggttaaaccacataataataaattaatactttaaacacatggaattatttaagaatctgcataataatttaaaccctcataagacatagcagcaaaggccccaaaaacctaacacttctcagatatattcctagaagttttatttcaatttatatgtatgcatttcttacagaatattttcagaatttctgaaactcagatacatttagagtccagggaggtgaccagaataattcttacttttgttatttacctggggagctaatcaatattgttaaaatgtaggtgaaagtctttctatttgaccataagttcagcaataatacggaccacatctgtcttgttctatattaaatctacatcttctagaacactgtctggcacatatactccgtaaaatttctttaataaaagaatattataagttttcactattactaggaatgaaaattgattgcaaattattaaggaaaggttagttttgagttttgttcttggttttcattcattctcttaatttgtaccccatgctttcacaaaacaataagttatctctctactgaagcctacccttctatggcctgagacacatacacacaacacgacatgcccttgccacatctattcaatgctgtcatatttgccatgcatcagaaaaataaatttaccaagtagcagaagctctggaaaatcattaggtgacatctgaggagcagaataccaatcagccaataattagcatctgaaaattcatagagtcacagacaaatcaaattccatgaaatctcagggagcttggctccctgaccctggctgggttggtgcccaggcaatgggtaagcagtaaattgtgccaccccaacaggactggaaggtgccatggctagtctaaccccagggggagacattctgacaatgtggcatttgcacagggatgccctaacatggccccagtatgttttctcagaacgggatgacattttaagtcaaatagctctgttcccaatagcacaggtcctctcccaaactctaatagcctgaatttgagaaaaagaggttcatcttggggagaaactgatgttttgcagatgcaatattaaaacaatccatttataaggaaggcaaaaccagatattcagtgtttaacttcatttattacctttccatcattacatagacctcagatagccttagacttaaaaagtcattcacatttaagcaaaactctgttcctggagcatctacactggatacttttcaatgaatgctgaaactggttataaagttgtgctaccaagaggcatgaagagtgactgtcagtaccttaccaaacccctgctgactggaacatgcaagtcagtccaaggatgcagggccaccactgttactgctgcctccagcctaactaaggtcacctttcctgcatgcctgcctcattctaaaggaagaaaacagagaggttggagaataccagctccccatttggtttctacagttgccaactctacccacatgtgacttggggaaagcacccttaagaagagtggggtccaacgtccaaccagactgacccagccttgggggtaaacattccacctccaccacgtggcctgtgtgcacctgatttgaatctgctcctaccctgagccaagggtgaccattctgccaggtccccactccactgcagggtcaggcagcagcctctgctcctggctcctggcccagtgctcggatggcccagcaacgtcactgcggagagggagtctggttgtgccctcctctgaactctccatctggaagactctctagtctccttccctctcatttttaatctgacagacactgcggacagggaaactcagagcagaccaaagttcatcttccctttcctgcttcatggctggcataatcacaggggcagaacaaggttggcatggaccaggatgccaggaattaaatgagggtccctgaccactggaacacattagtcctgccttccaaagtcttaattagtcttcctgtgcctggcacacctaccaccagggaggtggccgggtaaggtgccatgctcacagcaagtattcaacaaaatattggtagagaatggcggtcacaaatgcctgctggctcatggctttgcaacaacagtcagctctgaggtctgggcaccagcggcaagatttctgctctctttactaatgcagacagttctagcagcgttattctgagtgatattcagccaccagctcaatttggaagcaaaatgatcttaacaaacagtggcagacttgatagacaggctgctgagcctggggaccaaaacaaaggatgaaaagaaaaagaaaggaagggttgatgacaagacgaggagtgggaaatgaatactgcaaagaaaaatgaggaggattacagtactagatacttcagtccggcaactctgaaatgagctgtgaacataacaacagactcaagggtggaaacaatggggggaatcaaggcaacggaacagggcagcatctgtcacgaattttgatgctgggacagacttagcgctagcagtggaatagatttgatagtaagtaatatttgagaggtttcaaaagacaatgggtcttaattctgtcctgttttgcacctcttgaactacagtgacataccaaaatttgctatttttctaagaggacattgacagatacaatgaaaattgtgaatacattttttccttctgcattcattatctctggcccttatccacaggcctattgcagactaaattggattttggatcactggtactgaggtgctgcaattaattaacaatagaaacataatatttatatccaggcctaacaacatctgacatttaaactattctgccagtcggacaaattccattcgacaaattttcattttaatgaacatgacagaccacagtttgcatgataggccaagcagcagaacagagttgacctcttggcatgtgttttcaaggactgaccatgctccagaagaaacaatctgagaaactgtcagaataacagaaagaccagatccccagttccacccagacagaccaaatacataccaccctcatgtcccccagcacagatcctagtatgaaactgtcctcatttcatgtgcgagctcaaagttaaatacttactgccccttgtaatccactggataatttttctatctttgggttgctgacattttctttggggtactgaagtcccttagcccttcctaattaaaaagtgataaacatttttgcaaggcatccaataatgtgcaaagtacacaagagttggaactgatgcagctttttcagttggcacaaaactggccttccacattttgccagatggtgtatctcagtaagtccccaatccctgactcgagtgaggggcattgtcaatatgatgctgaagcagagactatctttaaatgctatcttattttgcattatactaacacgatgggtctaacacttattcttgctgaaactttcacagctaaagaagttttcattcttctgtgactcattattcaagccaacagaatatgatacagataaggggaaaaattctgcccctcttaagaaccatataaatttgctggaaaccaatgtcagagagcagatctcccagcaagacttcccattgctcctctatgggttactggtccaaagcacactgggtgaaatagtatgtatttacccaagcccatctctactaccccaaaaacgtggatgtcaaggatagagataaagatgaaaaatgcaaagacagcaaggcagatagaagcttaatagatctgggaaataagtaaggtcagtgaaaaacaatatattgtagctgggatccctaagggccgtatagttctagttcacatatctacaacattccttattctagtttttatgtcaattcaaaagaactgaaataaaattccactttaaaagtaatacttctttggagtagggatttggttcatgggttccaatctcagcaactgaaatgactacctacatggtaatttgttttcaagctgtggctctgactagacccaaaatggtaaccatgcttatgttactattttattttattttattttattttattgacatggaatctcattcttatcgcccaggctggaatgcaacgatatgatctcggctcactctgcctcccgggttcaagcaattctcctgcctcagcctcccaagtagctgggaccacgggcacatgccaccacacccagctaatttttttatttttaatagagacggggtttcaccatgttggccaggctggtcttgtactcctgacatcagctgatccacccgccttggcctcccatagtgctgggattacaggcatgagccaccacatccagctcatgttacttttagatatggccatgataccagaacattaagcactgaaaggatgacagcatttccaccagtgtaacctaatttagaatcaataatgtgtcactcaaatcggcagcatgtacatatatacatacagtgtggatggacacacacacacacatatatatatacatacattaattatagtaatagccacatgtttgaggtttttacatgcatcttctcttatataacaccatgagataagtactattatgaactctgtaacacactgaggaaagggcagttacagttcactgacctccttaagaggtaaagtcaaggtcacaggcatgtaagcggcagagtttaagtgcaaatccaagtctgcccttcctccagagcctgtgctctacacaacacagtggcatatgacagcatccgcaagggaaacagcatgaaggaattgattccttttggcaacagtcaaaatatcttttaaatatcaggtataaaacattttcagaccaccagatgcttattcaattttgaaaaatcaatttttatggagttgctatgagtagtttcatgtttgttaatgcctggttatattcttgaaaaagtagcggcctcatagagaaaaatatatatatttttttgaaagttgggaagaaaaatgagaccttaactggattaaattgaaaatatttgacagaacacaaatgaatagaatctgtaactttaacatgcctttgcaggaggcatgttctaaaatggtcataccaaattcagaacacaatagacttaacatgcttcttgttgtaaacaaaggcattgggttaaatgaaagttccatcaaagcttaataaccaattcaagtgaacacaaagttaagcgttatatactttctgcggtttcagtaatagctaatctaataatggtaaatggagggttattgttgattcctttgcctgtttcataaattagataaagcaacgtggaagttagagtactttagagttttattggactaagtgattttaaagctatctcaaaatataacgaagtcatgacttgaatgactgctgagttgtagcttgttttccatcaccatgttagtacttttcaccagtgttaaataaaaagcttcctgttaactaaaacaattctataaatacaatgtctatctacagaaccaaaccatttaaggtaaagtgtcattgatacagtatgatctgatattctatttcaccagggccaagcttataaaatattaactataagagcagtcaagtgttatttatttcttctgatacaaaactcaggaacagtagaatttctctgcttaatgattttccatagcacatttccaattttctactacagtttattgatctggaatactaaaacagttttcttccctgtctaaagaacacaaaaagccctgtgcccctagtcccatgggatgtgcctccaaagataacagtcgtggcatctcatcaggcgctgaggggtggtaatgagaagcaaggcattttccttactgaaagaaggtgctagtcaaatctcaggccttttgataacgggaaacacttcccaagcctttgcatttggagatgaggctccacacctgcagttctgagagcagatgagttgcccttcacaaaggcagtctattttcctgcatttccccttcatgccctgatatggttactttcaattaccctgatagtccaggaagaaaaatatccctctctccatatttcattcacataataagaatctgcaagctgttctgtatgacagatgaggactgtgtgctgaagcaacttgttccgcctgtcagcctccgagaacccacagcaatgagatacaatcgtgatgacattactagagaagaagtgggtcaaatacatggtcactttaaaacagaatgtcaaccattctttctacttcagtaatttgatgcagtggtactcaaaacacagacagagagagagaaaaggaaagagagagagaaagagaaaaaagttcaccactattagtttagtgtccatacatacacaaatgcaaatgcaaataattgttaaaattactgttcccatatacccttacatgacttttttcatcctccagccaattagtcaagaaatgtttagtaagcatgtggtatgagccagacactgaaatgggtagaatgctgaaaacagacacagcccctgccctcttagagtttacagtctaggataaaggacaaagattaacaagcaattgagattaatgtaatgaagcctgaaaaaaaacgaagtagaaggtactaaaagagcttacaatataagaactaaccaagtctttcaggtcagtaaaggtttctctgaggaagagacatttaagttaaggtcagaagtattagagcagccagataagaggtgagagagaagagtgacaagtggaggacttttctcctcagaatgtttcctttcaaagaaaccattaagacaaaggcctcaggacacagtagaagatataatggagtaaatgacgccatcaagtctaccattgggacttattgtctttccttatttcaatccctagtttagaaaattaatttttaaaaaaaatttttaaacattagtatacctctgtcctatcttgccacataagggcaaaagttaatcataatcacattttcttgctgatctaaatattaaggtagattttactttaaaaaatctaatttatcttgactgtactggttaaaatccatgggttatttttaaaaatatgttttgacagcagtgaaacttgcagcacatacaataccaagagcataaatttgttcagggtataagtacatgaaaattaatataagcagttggtaaatgtgacttataaaaaaaaagactgtaccaactacatgccacaatgggtggaaataaagaagaaaaaggttctttttctctaatatttggtcatgaaaattctgatttgttcttgcagaaaattgtttttggatcattattcatctctcttacagcatagaacttttttccatgggatcaacaaattggaatggagaggaaaaaccggatatattcatgagtatgtttgccctttctactaaagcccgagtgtgatgttcggattattttctttccaaactcaaaatccattcccagaatccaaaatcaataaaaatggtactagcaaaactgagggttgaatttggcctaaaaactcaatgactaagtagagctactaatatgaggagaggtttttaaaaaaatgtctgtagttattaatcaccagcaatgactttagcagctgctctaaagtaaacacaatctacagctactttaaagcaatacagtgtaaaaaccatgagaattaacattctactgggtgaaaggtggcagaatatgccaccccaaaatataccacattggcataagaattattttcaagctaaaggcacttataaaaaaataatttaaaaaaaaaaacagcaggtgcaagaagggttttctgaccctcttctttttcttcataaaagcaagagctaaaatccctgtatggaaaatattctcctgacaccagaaggaaagtaacattcttatcatcaagggcgggatactgagaccaagagaactctgtacaaacaaaccttattaaactagctcttattttcctcgtcacctctccacccagttaaatatcctggcccaaggccctttgccttgtcacatcttcacaatttactactctttatccaattccatatataagtgttcaattctaacttcatctttgggtcttcatttccttatgagggctcccatgtcacaaaaaaacttacattaaataaatttgtatgcttttcttctattaatctgccttgtatcaatttaatttttaagcccagccaaaaaccctaagaaggtaggggtgaaattttgcttcccctacatctgttacttaggtcttatctagagttcaacctgaaaggcatattttaggaggaatattggccaaactggaaaatatctccaagaggacaactagaatggtgagaggttctgaacttcacataagaaacctggggatgttcagcctggagaaaagcaatgggagacagcaaaactaccttcatacattcgatgggtcattcatcaataaggccattccgttttactgagcacttcctctatacaaggtaccatgcaaggcaaaggagatacagcactgagagagaaagccagtcttttcttaccatgcggaagggaaaatggattttctccatgtcacttcacaagatactgtagagtagagcagagcacagattttggaatcagagcactagagtaaaaacctgtactgggttgaatgccattccccacccctccaatatgtctgtgtcaaatccctggagcctgcaaatattactttattagaaaaaaaagtctttgcaaatataattaagaatcttgagatgagatcatactggattgtctgggtgagctctaaatataatgatcagtgttcttacaaaagaaaggcagatgcagacagacagaaaagaagaagatatagaagagaaggccaaatgaagcaaacagttatgtgggtgcaagccaaagaatgcttggggccaccagaagctagaagaggcaaggaagttttctcccctagagcctgttgagggagcatggccctgccaacaccttgattttggacttctggcttccaggactgtgaggaaataaatttctgttgttttaagccaccaaatttgtagcaattggttacaatagctctagaaaactaatataactcccaattacttagctagctgtagtaccttactagctgtgttacccattgctaataactctagccctctgagaaccaggccctcattaggaaactggagacaatagaaatactcatctcacaggtcagagattaaggaggtatgtcaaacgtgcagcacagggcctagaacaaagtaagttttcagtacataatagtgttattattaatggattcagatttactgggaagcttgtgtagaccttagaacaatatatcaacaggtgtaataacagctaatttatgcagtagggctctctctactggtaaatatatgtagagaccagataaatcattttccagaaatactggaaaagggatgtttatattgtttgggaggctggaataaacatccactagccttccttctagatcaacccagtaaccatttctccttggtgcatcaggtcaagatccttaggcaggttaacccagtaagggaagtgaggtatacacagggtttggctgctaccttaaaaagtcccttcccctcgctgtaccttgttgtctttagctataaaataagcatattctgatcatgtcttagtatttccaacttgaaaatgccaagacacaatgagaaagacttggatcaatgagatagtttgggtatttgtccccccaaatctcatgttgaattataattcccagtgtcagaggtggagcctagtgagaggtaattggatgatgggggtggatttttcatgaatggtttagcactatcctcttggtgctgtcctcataatagtgagtgagttcttgtgagatctggttgtgcaaaggtgtatggcacctccccttactatcctcttgctcctgcttttgccatatgacatgcctgctcccattttgtcttctgccatgagtaaaagctccctgaagcctcccccaaaatggagcagatgccagcaccatgcttgtacagcctgaagatctgtgagccaattaaatctctatttttttaataaattactgagtctcctgtatttctttatagcaatgcaagaatggcctaatatcatcacacacttaaattttctgattctcagaaatgaagcaattagactagagtaaggattgctaaggaccagttgacaaaccaggaccaaaccataatattgtttttaaccagtacctagcaaaatgagaaaaatttaaaaaataataattttttaaatgtctttgcttggcagaattaaaagttagcaatcctatgtcagctcccatcctatctcacttcctaattcaaaaattatgtttacagcctctgaaattctaaagttttggaactggtatatcacagaacaatctattaaatttgattcctacactaatattctgtgatttttttaaaggacatttcagaactgtggattctatcactgacgtgttcaagttcaagaataagaagtcatccttttagaatttaaaaatactcactggtaaaatcatatagaactaaatgttcacaacagtaaaatggaaaaatctaaataaaatgagtcgctagtaaatatgatgctatagttttacaaaatgttatcatgaagagaaattgggtaacgcataggcatgaatctctctatactagttcttacaactgcatgtgaatctagaactatctaaataaaaatttcagttaaaaaatactcactgggttgtgtgcaatggctcatgcctgaaaccccattttggaaggccaaggtgggaggatcccttgagtccaggcatttgaaaccagcctggacaacataataagaccccatttctacaaaaagtttaaaaaaaattgctaggtgtggtggtgggcacctatggttccagctactcgggaggctgaggtgaaaggacctcttgagtccagaagttcaaggtggagccatgatcatgccactgcattccagcctgggcaaaagagtgagtctcggtctcttacggaaaaaaaaaaaaaatgctcactgggctctaaaagttcttaatgttgtttattaattcaaacaatggtcagattcaaactcaataaatataatcaactgtgctttatacatagcatatggacagttactatgaaccatttgtttggcaaagatgtactgaggatcttctatattccaggcactatgctaggtactagagtctggtggccaactcagttcttcccttcacagagagtaacacctagctggagaaaaaggcaataaataaagagacaacttcaaattgtaacaagtgctatggaaaaaagaaaggctgaggcagaaaacacagggagggataaggaactacatgagccatacatatggaaaatgaaactgtgatgcaggaatgtgcccttattttttgtatgcctatattattgaactggcataaattctgaataatgaaaatatgtgcttgggttgtgactgtggtgggctcttaaaggtaggctctgcccttctgcaccaataaaaggagtgagaaaaaaaaagtaaagttgacatttgcctttaacaaataaggcaatacaagactgtccatatgtaaaagttaaacatacaatgggggccgggcatggtggctcatgcctgtaatcccagcactttgagaagccaaggctggtggatcacttgaggccaggagttcgagaccagcctggccaacatggcgaaaccctgtctctacaaaaaaaaatacaaaaatcatccagacaccatggtgtacacctgtaatcccagcttcttgggaggctgaggcacgagaatcgcttgaaccagggaggtggaggttgcagtgagctgagatcttgccactgcacttcagcctgagggacagagcaagaccttgtctcaaaagaaaaaagaaaaaacgtattccataaacatacaatggacacagcactctgtgagatgaaattctttaaaaggtatgtgagtcataatttcccatatatgcccaccaccccttggaggaggaggggttggctctctacctaaactagaagataaaactctctcataatcaaagacaggggaggaccagggaggtcttcaagaggagaaacatacctttgaaattctctcccttcttagaagattcagaatatttcaaatactgcaaagtatgccctgggagccagtcaaaatatgtagtaggccagaccacaggactaggaaattaagatacagctgcctgctcctattaggcctaggtgcagggccagaatattaaggttaacttgggcccagtttggctgaaaagacacaggcttcaaataagactggacaggagagcaggtaaataaatagaatattcacataatggaacattatataacagtcaaaccaaataaagcaaggtacagaacaatgtgtattgtacaatatctttatataagaaaggaaggaaaataacgtacatacatatttgcctgtgtgctaataaaagtggctactaccttaagggagatgggtacaaagatgagggtatgagaagaggagcaagaacaaaatttcactttatacctttttatattgttttgtaaaaataaagagctaaaagattataattctcattgctggtgttagtcacacatttggagagggcaattcggtggtatacatccaggtccttaaaactggcatatccctagacccagaaattccacttttgaaaggaagttatctaagaaaataataagagatttgtgtacacacacacacacacattcactgcagaattatttatcatagttaagaaaatttttttaatctacatgtaaaataataaagaaccagtgaaggaaattatgggccatctaaacaatccagtaacatgcaactgtcaaaaactacactgtaaaacatataccgtagaatactcagtggcacagaaaagtattcatagtatattttttaaatcattcattaatttttcaataccttctttagagcatctaccaggtactaggcactgagctaaatgctgatttaaaaggccagttacaaaacagtatataaatggacaattccattttttgtgcatctgtgcatttataactagactagaaggatagacaccaatatgagagtagtgattacctgagtggcaagattatgggtgaaatatattttctataatgaacatatattatttctgcaatatgagaaaaaagcaccacttttttaatcaggctaacaactcccaggatcaagaatgtgtctcattcatctctctgtcctctcaccccctcctgactccctgaatacaaacatgatgcttgcttcagctgcagcaattctgtggccattatggaaaggccaagaactgcaagatacactctccttgacatctctgagctgctgaactaaagccaaagctaaccatttctagacttctttttatgtggaagaaacaaacctctattctttttaagcaggttacttgcagctgaaagcatttgaagctgacatagtaacctattaaataatacatgacacattaaggccagtacaggcaacccagcaaatttctttgatcaaccagcagaaactgaagactgatgtggttaattgccccactagcttctggctctgtattctcttctctgaagctcctgggaagtagagcccaggagaagctgttagtgaggattcgagatccataggggagcactgcttgctgcaaagaaaaaccaggcagctactcctacagctttacaacgtggcccagcattcccactcctggaaatgtctcctaagaaaaaatcatgaatgtgattatgcacacgtgcaaatacatcagaaaaaatggtgaggaaaacctatatgttgaccaagtgggatagattaaaaaataatgtcatgttctaacagtggaatactctgtagacattaatgccatgggaaaatgcatacaatatattgacgagtgaaaacagaaaacaaaactgtatgtaaagtattatccaaatttagaaaaatgtgtccattttctgttagaaaactaacagaacaaatatgcatgcaataaaaacaatggaaaaaaagccacacactgaaatattgatagtgctatcatgaatgggtgaaatgcaatgttattttattttttgagtatttctatatttttttaaatcttccaaatttattttcttgtgcagttggtaagaaaatttcttctaaatagcaccttcttacagaatattctgggccctccgaccaagatgttcaattcatccacaccaactttgtctaatacctgcctgcagatccaatggagttaacaagaaacaatttatttttgtgttttaaaaatagacatggcaacagctgtaagctaagctacagaaaatgataaagaaattttatttccaaataaatttgcattgtataaatgcagtacattttctttaattccataaggttttgatactgctaatttgagaaaaatattgatgtttccttaaataagtctaatttgtattgaaattcatcccctcacttgaaatggaatgatcttgaaaacaataaaaatgaatgttaatttgctatgtcattgataaaagcaattccttttatatccttgtccttatccattagacttcattttacagaaaaggtagctatcaggcaggtctgacctttttgccacctaaggacattagctattagagctcaagctccctagccggatggcctgggtccatatcttaggcccaccacttgccaactgggtgtccttgagcccttgtttaacctctctgagcttcagttttctcgtgtgtaaaacaaggataatacaagtatcgactccatagagttgctaagaggatgaaatacgaaaatctacataaagatcttagttcagtgcctggccatagtaatctaatttaaaaaaaaaaagtaaggtctcttttaacttgctttcaatttttatgtgcagatagatcatggacctgaaattttaggtcctaaagaggcccaagcatcctggtttaagaacccatgttggaaaaattagctgggtgcagtggcgcatgcctgtagtcccagctacttgggaggctgagacaggagaatcgcttgaacccaggaggcggaggttgcagtgagccaagattgcgccactgcactccagcctggatgacagagcgagactctgtctcaaaaaaaaaagaacccatgttggatacagatacttgacttttaaatgcagactcagtatcatttacttagcgttccctatgataaatgagatgtttagggaaaatgttgggtttttttagaccactggaaattgacttcagcatgtgtattagagaatgtaactaccccattcaccttgtcctgtccagtactttcactaaaagcaaggtattgtgaccaataataaaatcatagctaaaataatcactaacatgtcattagtgcttaatatgtaccagaaagtgccctgtgtgttttcatgtattatctcatttaatcctcacaactaaccaatgaggtaagttctcttactatccccatttttagatgagaaaactgtggtataaagagccaggaaagtgctaagtcaagatataaatatagtatgtaacaatatactatatttactatatgtattataacatatactataataatatatttttgttataatatatagtatattatattatatgttataataatataatatagatatataaatataaatatatattattgttatataatatatattatggtaattagtaataataataataacacagcatcattattcaatccctgtgacctgccaaatgcagctctagatgccttcccagtgacatctcttgtgttgacaacaatcttttactattcttatttaatggatgaggaaactgagaacttaaatgagttacttaagatgagctatagctctgactggttccaaagccagccactccagaattactcttctacagagggcagggaaaacagctcattaggtccctgaagtgctctacccaggtcacagaatgttggagaggaataggacttcagaatgatcagatccaagccctcactttacagatgtggaaagggaggcccagagaaaagagacttgcataaggcagtgggagagccagaactaaaacctgggtctcccagttgacatgatgtagccatctcatgttgagtcagctatctcaggcactgtgaaagcaggaagggaaagctgacagcttcagagtgatgacagcagactgtcctccctctctctgctccctgctgaccctgggactgctgcatatgcttcctggcccactcagagtagcagcaacatgacttgagaagaggctcttcaggagagaacccacaatgaagacaggaagcacccatgcccttacatgatctacctagggcccatttccaatggaatccccctgaaatagaattaaagatcaatggagatggagggttgcctcagacacatgtgggtctcttttgtagacatacaacacaacctaaatctttgagaacatgatctgactcaacaaattacctgcattttttctgattaaatgtacatccatcttagtttgtatactggataaaaataaaccaactcgtacagaaagttttttaaaaatagagttttggggtgtttaattaaaaatgctttcagtattatgtaatccttgaaatacaacagttgtttactctgctttgatttctaagctttcctttgatgacagatattaatatttatcatttttctgatgttggactaatgagaatcttaagtgtttatgagaagccatttaaatattacagtactgcagatatgtttgttttctgatttatattcctgtctttaacatcaaccaggatttatttttttgtgctgaatcctgggttgttgttcatcaacattttcagtaaactttaaatagccagaactgatgatttctacatttatttgatggtcaaagtgaatatgaaacttcaccaaataacatagtactatgggaaaggtttagttatgatttataaagtaaaaactggaatgcatgtataactgctagccaggaatagagtaacattccaggtttaatgacactgatctcaggtcatacgtattgagtgctgagtatgtatcaggcactgtgtagaacataattgaaatcaatgatttcacttgattcttacaacagctctaagagctaggtagtattatcatctccattttacaggaaagcgaagctcagagaggttgagcacttcactcaagatgacacagcaaatgagaggcaaagccagaagtgagtcctcagggtcagataatgggctcttatttataattcctctctcaagggtccctctgtgactccccagtatttgaaaaatcttattctctacaaagtataaataacccatctgcacagagcaacagtcttcagacaacccagactttcagatcttgatggctatgatgagtcacacctcattttgtttatcataggccatgcattgttctatgcatggagacagcaataaacagcaccaacaattgtccctgccctcatagtgctatctttctagagagggaagatagataatattaacacaataaacaaagcattatcaccattatggggaggaaacgggaggctatgcaaattcagagaaatagtaaaaggggatgaagtctgcagtttctgtagatttcacttgcatatactccccatgcagccaagactcagctaaccagagaaatgacttacaatcagtaacagaagatggcccagaagtagtgtggtacagtgcaaaatctaacactgaattctcagttagggacctgacataaatcactcaccctgcataaggaccaggtgcaggggagacagccatcagcaaaatagccactaccgctgcccttcatagagcttacagtccaaagggaagagaagcattgatttaaaatcaaaggttaaataaaagctgtaaaaagtataagaaggaagcaaaagacacaggagctaacctataggagactaagaaaggtcaacattctgccaattgcactgtctgtgacccacaccaagtcatttttcctctttacagccagtttttcaaatatgcaaataaaggagagtagactagatgaatccaaccagcttctttcaagctctttttaaaaatctcttgaagccatgattctaacatataaaaattatgtatctcctcttctttccaccaattaaaagatcccaaactgtcagtccctttcattgtattcatctgcctcactactgctagggctttgttcttgattttcactgccatttggcagagaagtcaaatcaggagggatatggatgtgataccgcattagggggcagaagtgggtatcgcagatgctctgatcagaacctagtgaaggaaatgagaaggaattgggttatacaaatggaacctagggtccagagagtgtattaacaggtaacaaattagcctgtggagatagtaggcattagggaagcatcagccaggactgtaactcatgttctggccaaagggaggggaaaaaaaaagtctagaagtagtggagaagcagatgagtggaagagaggtctagacagcaaacagcatggatccaaccacaatactgagatccagggacaggagcattacccatgggaaaaaaatccaaattccatactttgacttcaaggccctgtatggcctgggccctatctatacagccaatttcatctgatgtcagtctccctttccctctctatggttcagccacaggggccttcttttctccctttgatggtgttaagctctttcccaccttaaggccttggtataggctattccttctgcctgggaccccattctattaataccagctcttcatatggccagctccctctcatcctttacttaggtctctgcttaattctcagctctttctgtctggccattttatctcaataggttactcatccctctttctatcacagtatcttataatcttccttcttgtacttgacatattattattacaggtgtttgcctatgtgttatctgtccccttcactagactccatgagggcagtgctgatattttatatagatcatcccatttaattcataacaatctacgaagtgggtactattatgtccattttacaaagagaaataaaactgcaaagaaaaacaactggccatatatatatatatatatatatacacaaattctaaacaatactactcattacattaaaacagaatggcaacttagtagaagccacaaaaatctgaaatctttttatttcaagtgtagcccatggaccagcaacatatatatcacctggcagcttgttggaaatgcaaacacttctggcctcaccagggcccttgcatatagttccagcagtcctcaacccacaggagttggacccagctgttccatctgcaacaggaagccaaacacagctaacacctctaggccagggaaaccttggcctgttgccttgtggaagttcaagaggctagaggaagccttagtttagaggaagctttatccctgctcagaggagccaagagagggcctcagctgtagatttttctgaagcttcttggccttgtttttatccaccaggctggcagaacccagcaaatgggatttcaaactacagtggctacctgttttgctgtatccctagtgtcacatccctcttctgaaggtatcagcagctctcgttaaccagggcctttctgtgtgtacagccctgcaagctttgcacagcacaactccagcaggcaccagtcacatatactctggtatgaatggtggcctctgatgctaagaatgtggcagccctggcccacttcctctgggtgaatctctcctctcccagggtgggcatttgctccacacctggccactcacagtacccctccaactggctatagaaacaattccaagtggtaggcatatggcccaagctagaactccttcaatctgctgtaaattttgaggtattatgggcaaatagatatatttcagcccatacaattgagtctctctaaacttgatggaaaaaatctgggatctttaaggtaacatgttatatctgattattaagatgggaatttaaggtaccttgccttctaatggaaatttatgtagccaattacagtgcccccttctttacataattttaacccattgggattgctttctaaccagtggttcttggccctggctacaagttagaatcactagagcatgtctcgtccagatcaattaaattgggaaaggttggtggcacaggccttggtacctcaatttcagctgcgctagactctgactactcatctatgtaaggcgtcccaaagtggcatatggtgtgctacatagtctatgcttccaggcaggccaacaaagtggtagactacatccagtgaaaatcagacctgccactttctgatgatgtagtaactgacaggcagagactaattttacttacacaagtggctgtaaaacaaaatattcccctctctctccaccccaccattttttgttgttctacctctcccacactctctgcatttgttttacctccctcttgcctctcctgctctcccttggatttcttgccagggtcattcctagaagagattgaactggaatcgctagtgctccaggactgaaacaatcttactctaagcaggttccaacccttccctccacctgtcctcagggctccaaacgcataggtaaacttgtgcttctgggcacagcttaaacatctactgacaaaaccaagcaggtaccgtccttcagttaatgtggagtccaaaggcagcagtgagttttgtgttttgctttgttttttcaaaactaagatgtgggaagaagacttctcagaaaataaaaatcttgttcttaccacattccacagacttcagtgattaaatgactgtagattgtatgctcctccagcctggtctaactaaaatattcatgcattaaaccttgtgagggagtactgatacttcaacattatctatgatggtttctaactccagtagctgtgagtctgagaaactgcaaaatatactgaattttaataggattctgattgttaagaaaaagaggtaaatccataacaaagaacactaataaacacttaaaaagactcagcaagagtctttaagttacagaatcctgaaaatgtgtatcttttgtgaacttctcaagcagtttctcaattttctcttctattcccacttattcatcattaaaagaaaacactggcatacaaacaaaatacccctaaaataagtgatttttaactgcagttaacactctggcaaaaacactctttttcccaccctttctctttttctctgtatggagtgaacagaccagaaaagtaaggccactacattgtgaaataacctcctggtgggcagaaaggttcaggaaatgctgaaaaatgaaattacggtgctgggtaatatatattcaaaccaagaatgttcctggaccgttgatataagggtttaaatataaatataaatactcaaatataactgtatgcattttctatgagtcagaaaaacaactttccaaaggaaagggtctgaaaggggatcagaatatgctaccccaaaatatgccactttggcataagggttatttgagttgaaggcaattaagaacagcagattcagaaaaaacaacaacaaaaaaaaaaacacctctgccctcctccatctagctaaaagcagggcacagattttcctttgtaaaggtgacatattttctataaataaaggttttcccctttccctaccagagagacttcttacctgcataaacaaaccttactaaacaaccttcatttaccatacattttcctagtcattttttcacagtttatccccctaccccagaagcccaaatccccttgtccttttgtaaccacccaacaggttcattttgcctgctgcccagatggtttatccagagagaggaattgcaacagagaaagaatttaattcatgcagagccggctgaacaggagaccagagttttattattactgagatcagtctccctggaacatttcagagactgggattttttaaggataatttggtgggtagcgggccaggcagtggggagtgctgatcggtcgaattggagatgaaatcacagggagtcaaagctgtcctcctgtgctgagtcagttcctgcatggaggcacaagaccaaatgagccagtttatcaacctgggtggtgctatctgatccatctagtgcaaggttggaaaaatatctccagcaccaaccttaggttttgatgttatccctaggagcaactggggaggtttagaatcttgtggcctctagttgcatgactcctaaaccataatttctaaacttgtggctaatttgttagtcctagggggtttgggaaagggttgttatcatctttgttccaaagttacactataaactaagatcctcccaaagttagtctggcctacgcacaggaatgaacgaggacagcttggaggttagaggcaagttagatgcggttaggtcagatctctttcaccgtcataatttttgcaaaggaggtttcactttgtctagtttcttctccacataatatataagcccccagacctaaccacctctttagggtcttcacttcttttctatgaaggcctctgtatgcatatgtaataaatgatttctcctcttaatctgtcttttgtcagtttacttttcagtgccccaggagcagaacctaagaaagtagagaaaggattgtttttcttttttcctccctcacaatcaccacatatatggattatcaagaaaattaaaggtatgtaatcaaattagcttaattattcttctgctttgacagaggatgggggtaggaagaaaactttataataggcagcctttctagaagtggttcatttcaatggttcatttcaagctactcaattagaatgtaagaatattaccagtaaaaatgagtggtattttatctgaacaactgtttaaaccctttcaataacactgccatagatcatgaaagcatgtcactgagtttctttggaacacagttttaatgggattatagccccccactccacccccagctatgaggaatgaggcaaactaagtacaggacgagaaacacaacctgaaattcaatataaggaaaacccttagacaagcacagcaagagatacaaggagggtaggggagaaagagtgtccctggtagttaatctcaaagataactagtgcaaaatttatagttagttcatcaaattccatgacagctttgtgatgacgcttttctttcattcccaaagccttcaaaatgctactttctagatatttcattccccactcagaccttttacctattggattatacctgattcattccacgatgctgtgttattagaatcagtggttttcaatgttaaatgcactttagaatcagctgcgaatcattccacaatgctgtgttattagaatcagtggttttcaatcttagatgcactttagaatcagctgggaaatgtaaaaaataaacaaacaaaagaaatcacacaaacaaaaaaaacacctgctcccctccccactctttcggttatctggatgggaccagccccaggtgattctaacttacagccaagcctgagagccactagttggaaagcaatccaaacaaattaaaattacataatgaaggaataaacttacattaggaggccaggtacctcgaattcccatcctaataatcagatataatgtgttaatttaaggatcccagattttgtccatcaaatttagaaagactcaattgcatgggatgaaatatatctatttgcccatgatggggttcaggacatactaccctgaaatattgtaagctgaatgaatttgagaagacagcagaagccagaaggtcagaggtcactctctgaccttccttctgccctctctgaagcaggtcataaaacctaggaagaattatctggccttctcctgaagcaggtctaagaccctcctgtgaaaggtttctcacttcccatacctggaatgaaagaacatccttatctctgaaaacaaagggttacagagaatctgaacaaacaggtcttgctatgtttcctcccattgttagctcatgttttcttattcaatcatacttctacacaactatgtacttcttcatcaaatctagcataaaaaatacacaggtttaccagttttgggggtcttcattccattatgaagaatcctgtgtcacataaaacttacgttaaataaatctgtgtgcttttctctcgttaatctgtcttttgttacaggggagtcaaccaagaacctgagggtgaggaaaagatacttctcctccccgaccccataatacgccaacttttacagaggattgaagaaattccaaacatcatatcatagaggtaagcaaaaacagtagaattaaaggttatctaagtcctcttagtattcaaaatatgataaacaaggaaacagagcaggatgcatcaacttgtgttttttattgacaatgataagaataaaatcattagctaccatttatggagtaccagttactgtgttaagcatttcaatgggttacctcactgaaaactaaaaacatccctctgcaatagaaattatcgcccccatttcacaaatcaggaaattgaggctcagagagatttggacactttccccagagtcacacacatagaaagtagcagaaccaagattaaagtccaggtcttttgctctatcgagtccattctcttaactacatcatctgtcacctagaccactgaagagtatcctaagtacttgctactcaaaggacgatccatggaccagcagcatcagtctgttagaaatactgactctctgatcctttccaggtctttaatttaatcagaatctgcattttaagatcagcaggagacttgtatgcacattaaaattaaagaagcacaaacatacatgcttatcccacatcaactattacctcagataaattcattatccataatgcatccatactttttaaaacctgatttacttgacaaataaaaattgtatatgtttatggtatacaacatgatgttttgaaatatgtatcccatgtggaatggctacatcaagctaattaatatgcactacctcaaatacgtatttatttgtggtgagaatgtcagaggtgtttgaaccagagcaactccatcttcaataggggctgagtaaaataaggctgagatctactaggctgcattcccaggaggttaaggcattcttagtcacaagataagatagaaggttggcacaagatatgggtaataaagaccttgctgataaaacaggttgcagtagagaagttggctaaaaccccccaaaaccaaaatggccacaagagtgacctctggtcgtcctcactgctatactccctccagcgccatgacagtttaaaaatgccatggcaatgtcagaaagttaccctatatggtctaaaaagaggagtcacgaataatccatgccttgtttagcatatcatcaagaaataaccataaaaatgagaaaccagccaccctcaggactgctccgtctatggagtagccatccttttattcctttactttcttaataaacttgctttcactttactctgtggacttgccctgaattctttcttgcataagacccaagaaccctctcttggggtctggatcaagacccctttctgggaacaagaacacttaaagtctacactctaagtaatcttcaataatacaatacatagctatacatccatacttttatgaaaacaaatccaacaatttcatttccccatttaaggccattaaacaatttcccaaatgccctcggaataaggtcgaaatgcaggtaaccggactctgcatagtattactcaggctcaccattctcagcaaactaacacaggaacagaaaagcaaacaccacacgttctcactcataagtgggagttgaacaatgagaacgcatggacacagggaggggaacatcacacaccggggcctgttgtggggtagagggggaaggggagggagagcattaggacaaatacctaatgcatgcagggcttaaaacctagatgacagattgacaggtgcagcaaaccaccacggcacatgtatacctattaacaaacctgtacattctgtacatgtatcccagaacttaaagtaaaattttaaaaaaatttaaaaaaagaaaaacatatctattactcaggctcacctctgcagccttattctctccacctcctccagccattgattttcataccctaagcacacagaccttctttctgctcatcaaatcccaacatcccctccctccctccctcctgtcctccattgtactaggttcttccctgccgagaatataccctcactcaccccatcagtgcctccctaccagccccatttactgctctcaccagagcagatgcagtgcctggaacagagctaggagcaagataaatgtgctgaataaaaatatgtttaggatactgagggcctccgctgtttcctttgtccttctcctctgctgttgctgtgatcctcattcctgttgctccttccctgttccctgcatcacttcttttcagtaactcacctccttatcgtaacctcatggctattgaagttgtcagctttagaaagaagcactgccacatccccacggtcattgccccaggattactcaccagctggatgacaactgcctcactctaaccctgagcctcctgggataggaccaatcctttctagagatggacagaaggccccactgacagaaacaggctgcttttaaatcaaggatttaatatataggtggaaccatagatcaggggcctctcagcaggcagtaccgagccaaaagcttcactgtctctctgcccacacaagagagtgtcactgtgctgacaagacaggttatcaagagttgtgaggaacttcatattttaaatgtgatgaccaagtgtgctactctaagaaaacaagtggcaaacaaatccttttataatataaatacctgcttaaagttttaaatcttgaggaaatgtgaattttcatatatcaggcttacaataacaaaaataagagctattatatttatctattgactgcaagctgttaagagcctgacaacatgctcaaagctttaaacacactttcttcttcatcatcactgtgaggtagaaatgcttattatccctattttaagagagaaaaccaagggctaagtaacctgtctaaaaggcacagctgggaattaaatcatgggtccccagacaacccctctactgcttctctgctatgtcttactatatagatcactttctcatctgagaagtcacagatatggacattcccaaagagacaaccccttggagaatgatctcaaaggctgagatttttctctgcaatgtacatgttgaaagcaaagtaacctcctacatcttatatttcaaagctgcacttctgcattaaaagagtaaacagattcaatgaagagatgtgggaacagggtgcttatgaatgcaatgccacaagtactttttcagtgtctactggtggtcaggcactgtggtggaagctgaatgatcagactatcagttgggagagcgtgggggtgggggcatgggggtgatgaggagaacttctcaaatagactgtttcaggaatgtttagccaataattcataaaactgttactttattacctaactatatggaaatcatctttcagaagagaccagagttacctgccttattatctgtgaatacataattgaaagggccaatatgtcttccaaaatgaaagtcacaacttgatagatttctgagagttcatattagagggtcagattttaacatgtgaatgcaaacatagtgtcagaatttgttctcaagtgtctgaaagaacaaaagagaaaagagtaatgggagccaaaaccagactaacttccaaaatagaaacagagcatgttgaagttgcataaacacacaaataaagatggggacacaaaaacatttcctaaagcattctatcaaaggctgcaggaaaaaggccaagacaaggataccaaatagaaaagcataagcctaaaaaggttatccacactactgtgaggactccagaaacctgccttcttgcagaaacgggatacttttgacatgagggcatgagatgaagattgcagactacttcgtaacacactctcctcatttataaaataagagttagattagattatttataaggtccttccagtctgaatgcattaagtccttatcatctatgtggtccttgcaccttaagagagatgaccatataaagaagctcaaaaaacatttgttgaattcatgaagtattacaaccttaccaataataaataagataatttataacaattggtcctggtctgtggccttgaaagagcaaattagaggagaaaccattatctaaagagctacacatctggtgttcctgctagctgactgctggtggaatgaaaataaccctggacttgaaaataagatgcttggttctagtctaatctctgacacaaaccaactgtgtgaccttgggcaaactgctttaccacctgggccagtttcctaatctctaaaataaaggtattctaaaactatatacatatatatatggaatctttattataggccaagaagtgttccaagatctttgcattagaattaaatgatctcaaaggtttttgcagctcaaatgtttagtatctaagtacagaggcagcatggtataattaaaagattccaaattctgtagccagaaaggttggactcctcctcagctctgtaaggtaaggtctttctctaagcagagactgttaagcagaagggcttacagtctcagtccttttattcaccagtgttttaacttgaacaagttacttaactttcctagccttagttttctaatctgtaaagttgatataaaaatggttctcactctcatatagcttttaagaggattaaattataacacatatattttattgaatatatattatattgctagctgtgtaatcatgggctatcttctcaagttttttctcatatacaaatgggaaatgtagtattaaaaagagatcatgtgaacaggttctaaatggtcaagtgttagtggttttggaagcatgtacgttaatacttggaacaccgtatacaacaatcccatatctaacacttagaacagcatatgcaatcaataacaacacacacacacacacacacacacacacacacacacacacacacacacacacacacaaaccctagacttctttctttactaaatatttctagtccaggttgcagcaggtggacacaggccggcagccatgaacgcaggtccacatgggagttgtagttccgagtcaagcggctgctctacagaacggctagaagcgagacttcgtctcccaggagacatctcgccgtgcaaaatggcacgccacgaggtggagtacctgcccgacgagaaacaagaggcgggactgcaactcccagaagcctccgcggccaaggcctcaggccgcaggctgaagccaaggagggagagttcaggtagatccggcttaacatcaggtgcgagtagggaccacccttggtagtctgggcccggcccaggtcagaaccttactaaaacaaccactgtgagtattttctattggtcccagcacatttctgagagaccagaataataatagcagtaaatctgcaagtggtaaactttcacaagcataacctcaatttagatttcggcttcaggcaacatcctttggccacttgacctgggagcattgagctccttgtttcccagataagcgctgtgagtggctgttccaaggtaacacagcgagggcagaatgtgagcctacagagaaatctgcagatgcatctcaagttccactaacctgcctccttaccccccaccaccaccaacttggatatacctttaaaattcccccctttgacgctaaaaataaaaacaacaaccataaaataagtgtaagaaagtccgaccaagtaccgatgagttctcccacaacaataaattcgatgcctctttgcctgtttttgaagtagtaatgtaaaattatctcccaaaatgctgccttctctatactccggtttgctcctgtcctgggcacgtgttcagcaaccccttaggggaatccagagctgcgtgtttaacacagacctgttgggacggattttcgctacttgtctatgaaactgacgaaccatcccaaaacggcgggtgccgactacacccccagagccaagagctgtggcgtccccggacccgctggcgtggccccgtgcctcagtttccccaatgtataaacacggtggaggaggaacgggttagggctagggtcggtgcttgggaattggggggcccgagtccccaccctgagaccctcgtggggcggaagagtactcgggacagaagcccaccgccccgtgagcggcgccggccccactgggctccggggtgatgacctgacgcgcgtggaaacccagacccgcgccccagaaacagtattccacttgggcttgcctccccgcccctaccttccaggatgttgacagctgggaatgaaaggcagagggagggagcgcggggccggagcgccgcctgggagtgtgcccactgggtggccgcctgagggacccgggaacagagggcaaaaagtcctgtgaccggacagagcagagcggggactgcaattcccagaagaccccacggtaggggcgggacccaagatggccgcttgtctggggacaggagcggaggccaatacgcgcagagcatgcgcctacgccgggccaattgaaagccatagtgacagtaaccctgattcaggggcgggaaacactgaccacagaagacaagttgaggtgagaatccccttacaagggggtttggggcataaatcgcacaatctttggctttttctaactagaaaaagaaacatgattcttttcacgtgtaacgaaaggctgtaccgcacttttgcttttttctttcctcccaaaacgcgtttaactatcccttcacgacttcccactggctggatttcttttcgtttcatttccccactctggatctttctggattccttaagccttcttttctttatgtgtctctcagaaacacagacttgcagtccctggcttgatccatcaaataatgtggtcatttacgactacgctcagccctccctggcatcctaacaaaattgcaccacatgcgccccttctcttttcctttctgtcttttctgtgctgtttttctccttagcatttgtcgttacgaagcattgtataaaatttacgtatttatcttttttaccatcttactttctcactagaatgcaagatccctgcagatgtggatttttgttttggtcactgtagtctttctagcacctagaaaagtgcccagcacatagtaaatacaccgtattttcaataattgaacgaaatctagagtgacctttctcccctagtctccctttctctggtgcagatcaacccgtttctgaccaccatggttccttgtgcttgttcccctgtttaatccaaaatcattattgatgtattctgtgccaaatgccatgtgggtgctggagaaatcattgattcagacccaattcctaacctcaaaatgctctgtctagtgacgtatgaaaagtaaaattaattttacaataaatgcaattacaaattgcagaacacctacgtaattttcacaaggtcatgcagctcctaagcaaggactagattcctggctgcagactcttgccattacatcgggaaaaacaaagagcagttttctctcagacaaacactaagataggtccccattttccttagcaccatttcctttctctgtctctcacttttttatttggcctgattcattacatgcaggcaattacatcaagtcttagatctctcattatttctaatatttgaatcccatggagagtagcaaggtgtcctacaaagtgtcctggtgtgaaaatctgatgtccttggaagcttgactctcagagaatgtcacattggattatagttcatcacacagacaccatggccacataaaatattatcaaattgtgaataacaaagtgaaattgaaaaaaaaaatatagttaaaacagcaggaatgtgagcaatatatgtacagactgattttgtgcatagagattaaaacacctgttcagg

SEQ ID NO: 203 - DNA, 66980 bp, Homo sapiens
  source 1..66980: mol_type = genomic DNA
gtcaaggaccaccctctcttcctataacctcccaggtcctggcagcgtatggggatagcctgaacaagtttctctggctgtaaagaaataaattaattaaataaatttgtttccttggggctaaaaaagaaacaaaaaatcttgcctggattacctgaatacattcaagccaaaggctcccaaataattctggtcctgagatccaggccctagcaaggcctgcttaattttttgcttgtttgttaggagaaggtgggaggagggctgttggtgaccttcttctcggacgatttatccatatttcaggaagaaaggcaattagaagtagaagacagagggagaagagatctagggtatgcagggaagccagggataccccttccccctatccccaaattctggagtgaaaggcaacagcaggactaagttgtacaaatcacattggtgtgctttgaatttatttccttttgaaccacttgctggttgttacttggtgtgtgtgtgtgtgtgtgtgtgtatgcatgccctcacacgtgtgtgtgttggggggagtctcttagtcctttaggtctacttttcctccctcagtggtaccctggagacaacaaaacatgctgcctacagtatgaggaggcaggccaacaattatctggagttttttatgtaatcaagtgaattaggggccaaatctgactgtagcccctatcgtcttgaggcgattgcccttggaacagaaaaagggggttctagctgtgcttaggaaaagggaaggaaggtctaagggcaccagggtgtcttttcaagcctgtaaaggagctaagatggaaagcagggaaggggtaaattgagatccatggttctttcctaagtttgctcgcgtggctttcagggagtttatccctctcctcctgaaagtggaagagatgagagtgaggagggggaaaattactacattttatttcctaagtttctccctgaaattgcagaagggacactctagttcaggaaaagcagcataaaagggtcagaacacttattttatttccccttctttatgtcttctgtttcttctccttcctcttccctcacatacatggtcattctgcatgtgtctccttctgttctttctggtctgaaaaggggaaacatcagaaatccataattcttgacaaatgaacccaaactaaaatcccttacatttgagtttgaagattttggcctctggccttccctccagtgggctccattttctcccctttccccaaagctctcctttgccttggacttggcaacccagaatggcatggcagggttgggatgtggggggccagtctgggccgagggccccaagctccagcagtcttggtccctgctgctctgcctgatgctgctacagcctcgctgggaagctgagggctgggcttttatttaagttgggttgagcagtggggaaaggctggggggaggacacagcccaggttcacggggaggacacagcattttctctcccattgcctttatattcggcagcgcctctgacctctcccccacccccatctctgaccctcccaagccagcccttgctcagccctggtctccagataggatgccactgcttttgtaggactggggatttcttgcccagagtaatgggagaggcaaggcgcatgaatgcctgtaagtgcattgtatccctctctcttcaatggctaagtaaaaagaagacgggtgaaatgtcgacaccaatcttccagggttccttctctccaagcgccaggagatccccacaggccaaagatcccattgacacgtaagtagttagcactcggtctgctctgggggtgaggagcacaaaagtttaaactcttatttgccactcaatttttgtctcaactcccggtcttaggcagggaaggcgggaaatccaattgtaagcggaggggttctgcttggagaaaaagacggttctgtgctgagtctgtgtacctggggagtaaagaaatttggctcaaaaaagagagagtctgagaaagtgagactgagggaaaaggactggggcactttgcctttccgagggtctcttgctgctgtttgtgtgaagtttcctacaaagttttctctgcaatctgtgcttcagttttctttctgcttggacttggcagattgaaatccagagacagcttcccacagctaggggtgtgtgtgtgtgtgtgtgtgtgtgtgtgtgtgtgtgtgttggggggagttgtagggaagtgaaaacaattaaaaggtttgctgggagcttggagccagggtgtccttctctgcttttctaggattaggggagactgactctgaaaggggcccttaagatcaagggtgctatgacggggaggagcagtgcgctggagcaactgtaccatctttttctctgccttttgcccagtcctgggggagcaagctattgcactcacaaaaccaccgctccgggttttccacagcttctatctggcactgcacctatggagagctaattttaatttaaatgttccccttccaagagacccctctcaggcttggaatgagagatggaagatccctgaacaccagaactccagcggccaccagagcagagggaatatttattacctctctggatgtcattacctaagaatacaattttatgaacttcctaatctgttagcttgatttatctggatgggcaggagcccaaaataaacatttgggggatttgttaaaaaaaaaaaaagtctttgcctcttaccaatgtttttgatagagctgaccacccttctcagcctgctttttctgcaccctgcattgccagccccattttgatttttctcctgcagcgtgtggctgctccgggtgttggagttttagctgcctcttgataattaaaaatgggggcagtgaactctgagctacagatctgtgaggagccctcgaacattttaaaacctgcgcagctcaaggagctcagacccctttggagcttggggagcagaaagaagctaaagctgatctggagctttgctcatcagccctccaatgccaggagcccctggctctccctccactcctccgggtttttcttctcttctctctggtgtcagttccgtagctctttgaacgcagggccaatccagcagagcccacatccaggcctgccgggataagggcctctgcagcctcatcttcctgcttccactttctgccaggcctggaggataaatcaggaggaagggaagacaaggatgggtagggaatatcagactatgtttgagggcgattagggttacagagcctaataaagaggaagggactattttaaatttccgggccccatcaacaattttcagattcctgaataggcagcatcctctagggtcagctctgcctgcctcgatggggtatgagtgaagccaaaatagtgtcgcttctactcactcctcctttctgactccctcttttcccagcatcaaagatcgggagaggaaagtatacagtattttaatttccaggcagaaaaaaaccctggaaccgagtgtgcaggaggcactgccagatagccaaaccctaggttccactctggagctctggcttcccgggaagcctggccgcgagagaatggggcaaaatgtgactgtcttcatggggtgggggtgtcccagctccccttctcacagaggccagggtcttgaggatcgcgaaatggggccagccggggcaaagacgaagtttcaagggccagcggcagccaggctcctcctctgggttccacgccacgtccgccctgggcgcggtgtcgccttcagctgggtcacgaccccgggcttgggcggacaataggggcgcggggcggggagcgcgggatgcgtggccagctgagcgggttcactgcgcggtgaactccgctgggcctgagggtctcgccctttagatcccagcctctcctttcttcctcctatctcaccttccatcttttcgtggaaaattgagaggaccctcaatcgctccttgaccaataccctacggctaccacctccaaataatgagatttcattttctttagaaattaaaagatagttttctccgaggtacaagagcaggaaatgggaccctctcaggatctttgtggggatggagaggggagatctaggtatcagtggaagcgttctcgacccgggactcaggaaggccctgaaggatcccaggccatcaaaccaacaatcccctccatcagaggaattccagccaagaatgtccccttctctcccagttatagggagaattgccctcttcggttttctggcctttgtttctggatgtcaggttaggcttagggcttttgtaaaaggggaaacacttctcaaatccgatgggcagggacagagctgggcgtgagtcatttgggagaaatcctccaaactggtctgttctcgttgaggcgatctcaccccaccacagtgatagcctggctcttatttgaggctctgcccctttgggtggtatcattgtgtttgtaactttgtacatgtggagtctttccattcagctggaatagattttggaaaataaggttaccgaatggggcttgagttttagctggaggaaccaaagggcagccagtttagagaaaggaaaaaatgggggagggagacaaggaatattcataatacacacttgcttgggcctccccacctcatccctatcctgcctgacccagctcaggtgtgatggggtgatgtgggcctcccagctggaaacctcccctcaaggattcagtctttgataatttcaaaccttcctggaatgtgactgcctccagctctgtctgtcttttcttggccatttcagagtctctgcctagcatttctgctgctttccaagttccatatttcctcctgtcgtggccctggttccaatccttggactcccttccaactgtaaaagcagaggaagaaccaaaaggtggtgggtggcagtctgggagggacagctgaggttcaaaagttcctggctaagcctccaatctgggccacctcaggggctgatctgaccactccagagtgccccctgggccagcagcaaatagaacaaaattttatagccggggcagatgttggctcggccatctcacccggattccccttcatctctcttccactgaagaggctccaatctccactatacctttgttctctttcctttccccctcctccccctcctcttcctctgtttgatcctgccaaccccccaaattgtttctttagatctgaaagcatctgttcctgtctgaccctcccccaacaccctcctctttctccctccctccacctcaagcagtcaaaaagcccccaaatggaaggcctctggcctctgacctattctgatacaccaacgtccagatacctttgaggccaaacctttaggcccctccccagttacttttctttcattctaccagctggagagggtcctggaattgaatgagttgagtcttggcccctagggaccagtctcttctctgcctgggacaattaaccatttttcaggtaaaagcaaggagtccaaggttgaagggtttggtgatgaactatttagataactaccccagtcctctgttgggcttttgggggctctagattttgaacatatccatattctgaccatagacagatgtccttttctaacctctacctggccatttcttttatcaccctttctgacccttcccttaattgcaaagtcattttctgagcaataagaaagcccctccaatccctcccagaattcactaatctaaactaggaagatcaaggcagtttccatactgtgcacattggagggcctcttttctctgtttttcaaaaaataaaaaagaaacaaaaaaattactccctcacatcctctttccccccactcatacccgtagaatatatagagagtgttgtaaacccaattgaggtagacagtcgcctgtcttttcccctttttagtcaatccacttgggtccaagttcagataattcaggcccaaggactttgaactctgcttggttgacctgtctctagcaaaaacccactttatatctccagggcaccagactggaataatcccaaggtccttgtcctggtgcccacagttgaaaactggtagaaaagagtaaaccttcctcattcccttccctccagctccatcctgaaatccagccactgcctgggatcctgcctcctcttctatcctggaagagtagcagttggccaagagccccagattcatgctcccagtggctttgccacccagtttccatgatgttgagaggcaaactacctacctaccactccctactctctctctctctctctctctcacacacacacacacacacacacacacacacacactggttgggcagacctggaccagcccaggatgttgttcttgtctgggggaaccttacctaaggaggatacaggaggtaagagcctgaattttgtgatagcatctttgctaattagtcgggagagaagactggattgaatccttctctccagtctataatttcacacagacctttctgtacacatttacctagagacatatcctcaaaacatacgtgacacatacattcaaggatcttaacatacttattttttattttttctgttcacatgtgcatgggtaggtgactttgctgaaagtgatggtgagagagagagagagagagagtgtgtgtgtgtgtgtgtgtgtgtgtgtgtgtagaggtgatgaatgacagagaatgacatcccaaccagcgcatctatgaagtgggttctttgacttaccactgatgtcactggtgccggaggtttttgctgtccccttttgcccttaaactgctctaaaaggcctgcttctttgctgagaccatgtggtctaaggtctcactcttgatcccataatttggctccttaggcctggggtggctaaaaaggaatgaggcaagagtcagaagactctctagaagatcagatctctcacttaatctctagaagatcagatatctcacttaaccctctcacttctgtgtcaaggttaatcaaaaccacaaacatttgtttaacactccaatctatcctattttgcccataggtaggacctagaaaacaaccactccacaatagcagcaactgccaaataactatctcctagggttgttaattgccttacagtggtattagaggattaaatggattaatgcatgatgagcacttagattcttgcttggaatagaataagctttcggtgagtgcaatctgttattattagtaacatcatcaggcattttcttacgtgcttgctatataccaggcactggactagattcattgtctcattcaagccttataatagcactgtaaggaagttattatattcctatttgacacaaaaggaagctgagtgagcctcgggaggatacggatgtgttccactggcagagcccagactccagtcagatttgcctggccccagagtgggtgttctgaaccactccaattctttgctcatgataggcaaggagcactggtgagagtatgggggtcgtgtcagccgagggcaagcaggacctagattagcttgggctttgctaccttgcttgatctcacctaggcagattcttgttctcatcaacaccaggctccaacccagtggttctcaaactttttggtctcaggacccctttacacttttaaaaattattggagtttcaggccaggcacggtggctcatgcctgtaatcccagcaatttgggaggccgaagaagcgggtggatcacgaggtcaagagatcgagaccatcctggccaacatggtgaaaccctgtctctactaaaactacaaaaaattaaccaggcgtggtggcaggagactgtaatcccagctacttgggaggctgaagcaggagaatcgcttgaacccgggaggcggaggttgcaatcagccgagagcacgccattgcactccagcctgggcaaaaagagtgaaactccgtctcaaaaaaaaaaaaaattattagagtttcaaggagcttttgtttatttccatgggttacacctatcaatatctaccttattaaaaattaaaactaaaagcatttttaaattgtttaaaaagtaataaatattatatgttaaaataacttttatgacaaaactatattttcccaaacaaaacaatttagtgtgaagaatgtcattatttcacatttttgcatctctttaatgtctagcttaatagaagacagattctcatatctgtttctgcatgtagtttattttgataagctgttttgattgaagtatctgaagtacatagcctcatatgcagacatataatcgaagcaggaaggacctgcagagctcctcaaagggtctctgggacccccagggatccttagactacagtttaagaaccactgagctaaccaactgtgataaccagcagaagccactataataatattactggacacccttttagctctttagtggtgcttctgactacaaaacccatcaacatttcactatttcatgctgtatttgaattgtgttatcttaggtaagttactcaatttttctacctcatagatagatagaagatagatagatatagatagacttgctatgtgtgtcatatgtgcattattcattattgtttagcttgaatatatagagtaaaatataaatttatagataaaatagctttcacatgtttagcattgtttgaggtgggcagcttgactattaatatcaatcttttcttttcagaaggggaaactgagccaaagagggttgatgtgacttgctgaggatgacacaatcagcaactggtgggcagtagggcagaactcctgtcctttgactcctagacctatgctcaccctctcagaatccctctctatacagacatggctgcaaaacatgcctgtggagggtggatgtgtgccaggcacaaaccatttatgaagtatatataatgtttgcatttatctgaagatatttatatctgagagaaaaaatatcttgtattcctgcatgcaaagttacagctttgcttggtacaaggcatcagcctgccagtgtttctccttcctcatcaaattatccatgtgtctgtagttctgggctggatatatccactgttagggatactccttccttccaggtctcctgctggtacattcccactgagagcaggtagatagcccagcttgtcacatgagcacacagaacaggcacacctgagggtagcagtctcatccccttctttttctttttcctatacatcatttctaacataccttttcaaaaattagtggtctacaggtgtacaaccaagggaagcatcgttgtatgagctgaggtgtagatgtgtctctgcagatgcaaatgcagaactttgggtgcccatatacctgtctaggtaagccccgtgtaaatgtatgagcaactggggtctcaattctttcattaatctgataggtatttattcacaaattctatattttatggctgtatgaggctcatgtttatgcaggatcctgtgagaaaaagcctcggtgggaagtcagtctgtctgaattctagccaagctttctgctcctagctgcctgaagcaaatcatttacccagtgagagcctccacttcctcatccacataatggggggaaataatgatagtctcagctacatctcgggatgaggagtctggtggggaaatagtaggagatgtctgagtatgattctttttctctcttttctttctgtctttctttctttctctctttcctttctttcttttctctctctctctctttctttctttcttttttctttccttctttctgttttttttttagatttgggggtggagtctcactatattgcccaggctggccttaaactcctgggctcaagcaatcttttctcctcagtctcctgagtagctgggactacaggcactatgcccagctttaggattcttttcttttatggaaaagtccaaacaaaatagtagagagaataatataatcaaacactagtaatataatcatcatttcacttcaacaatgatcagcctacagccagtctaatttcatctattccctacccaacagtacctcttacattttggagcaaattccagacataaaatttctttttttttttttttttttttttttttgagacggagtctcgctctgtcgcccaggctggagtgcagtggcgcgatctcggctcactgcaagctccgcctcccgggttcacgccattctcctgcctcagcctcccgagtagctgggactacaggcacccgctaccacgcccggctaattttttgtatttttagtagagacggggtttcaccgtgttagccaggatggtctcgatctcctgacctcgtgatccgcccgcctcggcctcccaaagtgctgggattacaggcgtgagccaccgcgcccggccaaaatttcttacgtagtaaacatttcagtgaatacctttaaaagttaaagtttattaataacataaccacaatatgattataatacctacctaaaatttcttagcaaaactcttcagattttttttttttttttttttttttttgagacggagtctcactctgtcgcccaggctggagtgccgtgggttcaacctattctcctgcctcagcctccctagtttttaaaaagtaaaaaagatctaagaaatgttaagcggaggtcgggctcagtggctcacgcctgtaatcctagcactttgggaggccgaggcaggtggatcacggatcacgaggtcaggagatccagaccatcctggctaacacggtgaaaccctgtctctactaaaaatacaaaaaaattagccggccatggtggcgggcgcctgtagtcccagctactcaggaggctgaggcaggaaaatggcgtgaacccaggaggcggagcttgcagtgagccaagatcaggccactgcactccagactgggcgacagagcaagactcggtctcaaaaaaagaaaaaaaagagaaaaagaaatgttaagtggctaactcccctctgtctcatgctcagggctgatgaatgtcaataatagaaaatgagaatggggagaaaaagatgaactttccttttttatttttatcttaaaatcccaggccacccccagctcctcccctctactcattaggtccattacaaatgggctgagaggggaccctggaggtctaatgtggtggaggcagccagaaggcatcctcggaagacactgcagacctcatattggatgaaaatcagagtgaaccagaaggaatctgagctgagggcctgccaagccattctccagcatcagatttcttcctcggctcgccaggcatttgaaagatgtctgaagtctctttggagttactgatctccaaagacatgcagatacatgtaatagcatatagaaacccaaaaggagattgcacagagacacaagtaaacccatctgcccatataccagctatgtacaaacatatgcaaacactcagaggcagatgcaaatatacacatacaaatcagcaaactcaggcatgcaggaaaacagagatacaaacccaaacactcaaacatatataaacatgcagggatacaaacatgcaggttctggaaccaaatagaaaagcccagaagtgtgaaaatacactttgagacatttttactactgaccagttaacatggccaagctccaagtctggctgactctttccctcacataccatcaaataggccaaatattgacaaaactacaacctgagtcacattcacaaaaatgtgtacctgggataagtcatcccaaggcctttcccctgcccttgtcagcacaagttctctatcattagtgctttgtctccccaaaaggcaggaataagagtggtgtggtgtggtaccatgtatgtgtgtgcatgtatccatatgaagacacatttcttcattctgccaagtcaacttgtcgaaaaggggaaagaacactagccatgcacagacctcaagtcactgcaggctgatgagggaacattgctttgcttaccctgtgctacagctgtaggttgaactgatttttccccaaatcgattggcccacatgggtgttttggcatcttctagacataacctgggggtgctttctctgggcccgagagaggctgcgccaattgtctggggttgattcttctgagtgaacttaccaatcaattaaaagaataaaggtgatggaactggctggatcaggttgttggctaggcattacatggccatggagtgatactgagtcaaaaaggatgggcagaatccaacagttttaaaacaagatccatcaatagatggagataaaccagtggggctatttagcactgtgctcaggaaaaccagtcaactgactaaactgttctcatttcaaccaatttttgtgagatgcagcagaagcaacagcatctgagagtcaagggacccaagtgtgtttgcattgaaagctggatctacactggcatttagggtaagggaagggttgtgcaaatgactgtagattcggaaggataaaatgtgagtatttatcaggaacttaaaactattatcattggcaagaaagtaaaagttgtatagtgaattgaggctttttctttgtatggaatcacagaatgttagatattgaagggaccttagagttcatgtggaaactgaggcttggagagttttaaatgacttgtccaaggtcacacagcgagtaaatggctgagacacatttagacaccatattagtttgcttggactgccataacaagaaccacagcatggacagcttaaacaacagaaatttattttctcatagttctggaggctagaagtccaagatcaaggtgttagcagagttggtttcttctgaggcctctctccttggcttgtagatgtctgttgtctccctctgctttgtctgtgtcctaatctctttttttttttttttgaaatggattttcactcttgttgccctggctggagtgcaatggcacgatctcagctcactgcaacctccacctcccaggttcaagagattctcctgcctcagcctcccaagtagctgagattacaggcgcaagccaccatgcctggctaatttttgtatttttagtagagacacggtttcaccatgttggtcaggctggtctcgaactcctgacctcaggtgatccgcccacctcggcctcccaaagtgctgggattacaggcatgagccatcgcacctggcctgctgatctcttcttataaggacagtagttatatttaattagagcctacccatataatcttgccttaacttaattacctctttaaagggcctatctccaaatacagtcacattctgagttactgagggttaggacttcaagaaatggaacttgcggagacacaattcagcccttaactgacaccatgactctggattcctagtccgctgccattgtgcccatgtcagactaagtcatctggtggatcctattcttaagttggctcaattttgttatgtttcttagggatggggaagctgtttagagccaacgtgaaattgaaaactgtttcctggagccaaggcccattgggaaactgagtgagcatgggctggggaatccgggattaggctgaccaccaaacactgggaaatggaagtttctaaccagaatcttggaactggaaagaactcagtgaggttaacttagccatctcagatggaggagaacttacctggtatgttcagagaacacaactgtctgagagctctcatcactgatatattctttcttatgtgtattcagattcttcaggccaagctcaaacccctatcccttgcctccagtcctcagcgttggacagtaagataaaactcatccaataagagaggttttctcccttgaagcttgaagaagccttgacaagatcttaaggaaatttttttattcaagagagcctctttctctcctcatctgaggctggaggtggggaatttagaggcaaaaacttcccttaccccgttgttgtctgtcctaagaccttcagccccttatctgggccctggccagctctagaaaatggattaaggtgagttgatatgtaatgtggtacagaagcagggagaggggagaagccctctaatatcgcagagatcacagatggctccagtgggattatggggcatggtgtatgatgaggcttgtgccaaaaagtggccacaaccaggaagaagggtccatcttattatgatggttggtgactctccctgccatggagagcaagcttggattctggggtttggagggagcaactccaaaaatatccagctgaaacacacagagccagagtcagcatggtgctgggactagtactggttcagggatcagaacacctgggttctgatctctgtctgagcctcagtttctcttccttcacaatgaagtggtttgattaggttatcactaagatccttccagctctgagactctaagcaaaaactgaaggatgctggggggcagggagaaggaatactctttgtagcaaatcagatgatggactatgtgtctctgtgaaccaaaccaggcacagaaaactctccatcttcattccagagttggtggggggtgggggagtagggggtgttagctgtggtgtctccttatttgacaactcaaccttttccacagagcccctgcagacacactatggggagctgtttcccttaaggaccctgcccctgagggaagagaggcagaaacaagatggggcaggaagttggaaagggtgtctgcatgatgccaatagccaggtgaaaacagagaaatcagcccactatctgcttagtttcaaatagaataaagggatccaattttgtagctttcatctgatgtaatggataatgagatgcaggatcagccttttgcagtgattcagtttaaagcccctgggaaggatctgtttccccctccccaattatcctgccacaaaaaagccttaagttccaccattaaagcacatggtgttaagtacagtcctctgcagatcacatcctttaaaatacaaaagcaccactgggatacttcatcaaacaaggatagaatcagaaaagtagtgcttagggggtatgcttagggagatgaggggccctgaagattaatctctagatacttctcagtttcacattgcctgatccttgtgggaaagctagattctgcctgaggaagtgggaactcagggactcccctagaaaccagatgcctgcaattatgagtatatttctagtcctgggaaatgggtggactctaagtggtgagggtagttatcacaccaaaaaatcacagaggctgccagtaaaacttaaatcagggggatggaaattctgataatatacgtgcatttgggtcagccactatagaaaccagtgtagaagtacttcatggggccccctgtatgtccagaggatataaaactattccagagggggaaaaatcccttccatttctatgattatctactgtatatctaacccataaggcatggtttgaaagtattaaaacctagcagatagggaaacacacagccagggttcagatctagtgatgtgaccttgggtgggtgacttaacctttctgagaatagatttcctcatcaaattcagtataaagcaactggcatatagtaatcttctagaaatggaaactattatagttatgagtactgagggagcttcaggacactattcatgaattggcactaagccatggaatgaatggtcaccatagtcagagcaaatcagaggtccagaccctgataaattcatgcataatctttttcttttttctttctttcttttttttttttttttttttgagacggagtcttgctctgttgcccaggctggagtgcagtggcacaatctcggctcactgcaagctctgcctcctgggttcacaccattctcctgcctcagtctcctgagtacctgggactacaggcacctgccaccacgcccagtaaactttttgtatttttagtagaaatggggtttcaccgtgttagccaggatggtcttgatctcctgacttcgtgatccgcctgcctcagcctcccagcgtgctgggattacaggcatgagccactgcgcccggcgcataatctttttcttacctgagtgaatcttgttttttcccaacttaatcttatctttcaggatctgccaataaaagaagcagaaagagtcctgtacccctccatgcagcctggaaattttaggtttgggccaaagttggccttacccacagacaggatgggtggctgccttcatgacaggatttaagaaaaatcataaaccatcctcacccaaatttgtattatgccacctgccacatgggtctaaaattccattattatagatatttcccccgatctgggcagtggcttctgaagacccctacgaaaaacacacagttgcctgggagaatgtgcatgtcaacacattggtgaaagtttcctaacctgcaatctagcttcttcttcaataaagaagaatggtctggaactcaggacaagtaaattttgataggactggggttcttaaagggccagagcacaggcctcttcctttcaggaggtacacatagaatgtatggacagcagaaagacaccaaatgggcgtgggacctactaagaatgtccactgggccatctgtgatttagggagctgagacaatgagacaattctaactttcagttcaccttgatattgactctacctaggtcttgtaccttccagcacagacttgcatcctcccaagagcaatgatgtacttgggcaagaggtagagaggcgatactagtgtctgagtagtctgagcagcgacatccaggtctcagtgactgagaccaagcagctctgtctctgaccaacacaatcatgacagcagctaaaggtctccactctgggttggggtcaaggaaatgagcaactaagagtgtgctctgcagatcactgggactctagagggtcttttagttggtccaaaagtccacccagaatccgtcgtccaaacacacgtgactggtttgtgttttgttttttgttttgttttgtttttgagatagtcttgctctgtcgcccaggctagagtgcagtggcgcaatcttgcctcactgcaacctctgcctcccaggttcaagcaattctcctgcctcagcctccctagtagctgggattacaggcacctgccaccgcgcccagctaatttttgtatttttagtagaaatggggtttcaccatcttggccaggctggtgtcgaactcctgacatcatgatccacctgcctcggcctcccaaagtgctgggattacaggcgtgagccaccacgcctggcctggtttgtgttttaattgtaatctctgaggagatataaatatatatttgaaagagcaaagaaattaatatttgaaaaagtataactattgtcatggttatttactaaggaaaaaatgtgtgtgtgaatattgaatatgtatgtatgtgtgtaaacacacacacgtattcttccctccctccctcctttccttccttcctttctttccattgacaaaagaggccaatgagatatgcgacaactggcatctctgcaatctgaccagaacagcctgaaggccaccagagtggatgttacatctgcaggactggccgctttcctaccaatgtttttcaactcggatgttttggcatcatggcagcacacatcctctctctaatccagtctgcacctaaaccctgtgtaggcagtttctgccgtaaaaagagcagcccgataagtgagaacttggttcctcctacattaccctaaatattgctgtgatatcagggaaataatattaatacttacaacaactacaaccaagttgtagggcctcaactactcccctccccaaactttcctcctctgaattatgagaaaacttctttaagaaggttggaaggccgggcgcggtggctcacgcctgtagtcccagcactttgggaggccaaggcgggcggatcacgaggtcaggagatcgagaccatcctggctaacacgatgaaaccctgtctttactaaaaatacaaaaaattagccgggcgtggtggcaggtgcctgtagtcccaggtactcaggaggctgaggcaggagaatggcgtgaacccgggaggcggagcttgcagtgagctgagatcacaccactgcactccagcctgggcgacagagtgagactccatctcagaaaaaaaaaaaaaaaaaaaaaaaaaaaaaaaaaaaaaaaagcaggttggaagaactgggaatgagagaggagaattgggaatgggggagaatgtgttaagcaggtgtaaaacataggaagagggtctgtaaacgctccatctctgagaggggggctttgtggacgggaggagaaggaactaaagggtggtaattagcttattattgtttcccttgggtgttgtgagaattccttaggagacacttgtaaaaaagcagagggaagacagtaaatacacatctaatgatatgctaaataaattattattgttattattatgactataatagcaattgtaacttgcttcctgctcgaatttccactaaagatgggaactgacccccttactgccaggcctccacagctgtcaataacccccagcccccgcctccccaggaatcagtcgagtaattgggcaatatagactaggcttcagttaacagccgttcttctggtgtctgcaggagaaccaaacaggagctcaacataagcagcaaggcctctgccaggtacctgctctagcaaagaaaagaagaaaaggaaccttgccgagaatcgtgggggttatatttagggaataacttcttgatttccaagcaagagaactcagggagggcaaaaactgaggcaggcatttagggagggggcgggtcacagaaacaaaggggaaatatacaaattagggatactcagtctagagatcataggcttctaggactcctgcaactatcaagggcacttccagaattttgctaggaagtgagccaattgtttttgtcagcttctcaaaggggtctgggacccaggaacagctaagagccattccagcccaggtaaaagggacccaggactctttggggttaataatagtggccagtgtctattggtttcctgccttttggctaaggacaaaccaatagacactggccactactgtaacctgctgtttacagcaactgtcagcaatccccccctcaacccccctacttctagccagagcccaggcacctgccttgagcccttcttaggcaaatatatgtaaatgtaggaccctcagttctccctccctgaatttctttagggaaagcaacaaccatccctgtaagccataggtattcatggggaggaaggagagggctagttgtctgagagggaaactgccaaaggctgcagactaggaaatgggattccaggtttaagatagctcctttctggacctcagtccttcacctagtcacctagtcacagggtggattgtctctaaggatacttaggggaaaaggaaccaaattcgggagggtcctccttgctttaagccttgatgggagagggggaggccaacccttctctgcagactgggatcctcaccagacagaggagctccaaacctgcccatctcatcccatgcaccgacggtgcctggcctggctccaaactcccaaaaggaactattttacagggaccaaaaaggggacactggtgataataataataaaaaaaaaaatgaaacaatctgattgcggcattactggatcagaaaatgtgtgacctttttaaagttaaattgttaaaaatttttaactattaaacattttaaatattaagcctgatctgtttggtagccctggagcagggctgaggcatagagagaaacctttccttcagccaggttgtctgtctcgcactgatttatttttgttttatttgtggatttcttaatggacccaatggtggttcctctttgcacccctcggattgacaggcaattccttcctagcccaggtctcagctctggtttagttttcataacttgggggtccagggagccaggagactggagatagaaagcagaagtgcactggggtggtgggtctgccttggcttacccccaaatttccagattccaggtgccttgctccagtacccgccccatcctaggctcaggatgctctcccaccctactaaccaccggtccggtcaaagcccaagctgctgccagccgccatgttatctcccagcctggctagggtgcctgctagcctgcagtggctatggtggtgtgcagagggagggtgagtttttatattgactgccattccgtttacctcaagaagtatgtttgggcaaccattctgtgccagacagcagacagagtccctgcactgcaggaattcctagtcccgtgggcaggggtgtgtggagggtggcacatggtggttagcctggtccaagggtctccactcccttcctagcatcctagagatcctggaggccaggttggccacggagactgagttcaggataattccttcacacattcaacgaagttatctgtaactccctgtttaaaaacaacaacaacaacaacaacaaaaaaccacaaaaactggcagtcgtgggaggtatttccccactgggctggttggcagcaggggaagaattggggacccctggcccagcggtgcctggaaggaggctgatgtaagagtggtgtagctgtgagtgggagaagtgagatctagtggggtaagtccacgttccctgttcctaaactcaaattctccctgaaaagacccagggcagcactgttagggagctgaaggagtccctctgtgcccagagggaattaggccactcaggcctcagagaaggagggcgggtggtgaggacaacctccccaagcccccatcagagcaggcccaatacttgcaaattcactcctcagtccactagattctggtcccatcctacatccccgccaaggcacaggaggcccagataaaaacaagctttatttggccaaattaactcactttcctggattacctcacttatcggaaagtgaaagtacaccccacgctcctcgccctgtccctgcctaaacctctttatctctgaagcccactctttgagacctaaaaattagggttcaacagaaacgctctaggactacaggagggacacgacagtccctatcctacagcgcactaaaagccaaactgaaggctgcttcctcggtggagagtgtctcagggtgaggtggtgggactgttcgccgcttcccattttacaagctccttgtccacagccgtctgcgccagcccctcacaaaaccggttctcgccttctggtgggtgctggtgtttacccctttcctcccactatctgttcaaacccagcccacccaccctccattcacctcccctccttaaggctccctgagctctatttacccttttgtaactccatccctccataagtacacaactctcctagctggtttcctagagggcagatacagtgtttccagttggccctctgcagatatctgtgaacaagtctctcccatcccctacatataaagatgtctgttctagacaaacgggcctaagtcccaacgtaaaaacatcacaagataattacaccttatatacatacagatctctctatagagttatatttgaaagtgtctataactctagagagagattgcagcatgcacatataggactataattatttatgtctatttttataactatgtagttataaatagatatgcctatatatagtgataataatatagaaatatctccatagccatatatggctctaagtgaatgctctaactactctatttcacaatcaataagtatatatctcctgatacataattctaacaatatacgtttttatctatatagctgttcagagatataaatctgtcaggatatcacatgtacataaagccggatggctgtaagagagtcgtatattttcccatatataaatctgctcctataactactgtatatgcacaaatacaatggaaataattatatttccctcaaacataaatctgtaaatacaaccacagcacatttaggtacggttagacatagagcaatatttcctagacatcagtctgtcaatagagccaccagtgcctccaaacagagagttatagagggagttataaataaactctccagatgggaaccggtcagtagaactagatgtaaacatgactccaagctgttctttcttcttcttcttcttcttctttgtaagatattcctgaagcaagcccagtcatataacagggtgcagaggtgtctgggtactggtatttttccccccaggagggtcggatgtcgctggactttgggaaaccgagcaggagtagataggggacagtgcccgctcccaacgcagcccagaagtcccttccttctgtctcctggtggctgagagctcgggcaagtggagaggcctaagggagaaaaatgaaaaagcagagtctggcttgagtcgtttggcccttcggcctaaaaccctctcaacagggaagccccgaccaggcgtcggagcggagagagcccacgaggcccagaggctgggggaaaggggctgcaggccaggctgcggaggccgagcggagtccccagccggtgcctgatcgcccggcgccccatcgcccggggccgctgcctcgccggcggcctggaacacaaaacctgggccctagccctgcaccctgcgctcagcgcttccaccggtcttattttattgctgttttgtccgattaggtatcgcagcgtcctccacccggtgttgttctcaaatgcgaaggaacccagggctttctgaatatatgtgtgtgtgtgtgtgtgtgtgtgtgtgtgtgtgcgcgtgctggctttaaataagtgactcactggatagtgtatttctcttttcagaccaaatgggtcaccggctactgaaaaagaatccagacctctgaaagggtttgtgacaaattttttagaagttctcacgctcatctgttatgatgattttcttttcttttttctcttttaaaaaagttggctaatttgtgtttctatattcctctttaattttatttttattgggggtacaattgtttttaaaggagggatttcgttagacccgaaactgtggggtggcttcctctctagcaaacttactatctctacccctgtgattcccatctcccccaagaaaacaaactaattaaatgaccagaaaactgtacctggagagaatgaggtagatgttgccggatccgggaccgcggtctttgcttgcttcatgaaaaatcggctagtctccaaactcgcgaaggaaaattcaaggcgcctcaactcctccttctaaattttttaataaagagcctagaaagggaactttccctgggcctgccgaagccccagcctggctctcccaactccccagcggccataagtgtttttctgcttccgttcgggcccccagtcttcccgtcttcccgggcatctctgagctcttgccggatcaaggctgtggtcatcgcctcattcatctctgccccttggcctgagcctgcacatttggcctccttcttaaaacaggggctcctagagagtcccaaaagccattaaccatccccatatgtgggatcccttccctgatcacacaaagcagaagcctgagaaaaaaagcaataaagagtggcctcctggccctccttcccctcttctgtcccttgtctgggaaaggggttcccaaccccagccccgccaagagcatattaagaagctttcttcctcccttcctttcctatctccccctcagatgctgtgatcctgactccttcttctgtctccacctcaaaatatttcctcttgcattttattgttattctgttatggagggactgttaactactgttttattattattattcattatttattgttattatgattgttgttagagatttgttcaccaccgttcaggggacagcagcctggcccagggggaagcctgcctctctctctctgtctctctctctctctctctctctctcacacacacacacacacacacacacacaccctaacacagtgcacactcacgcatatatgctcacaaatgcctgctgtgttcaggcccctgcacagcaatccgaagaggcaggcatcctaccccagcacccaaacaacacactgcccatgcacaccagcattcaggcagaacaccacccccagaccaacgccaaaacccacacgcaccgagcttgcaaggaaaggaaaatacgtaaagaatcccttctctcccacaacctggaggggcgagtcaggcctctgtctcttccccccagtcgctttcgctttctcttttttttttctccttgtttacagcttcagagagctcaaggcccataaatcttgaggggcctacagagcgcagagcacatttgtatgcatcgttaggactcgctaatacctaagcccattaaggagcgtgtatgcgcgtggtttccggtgtgtattaacttatagttaaattctggaggaaagggcattgtgaattaacatataccaaatccatcatgggcttttgtcatatcagattagtcagtcatgggtttgggggagcaacttgcctgggtcggggtgtacccacccttcaaactttgtggagcaggcccgggggtcttgggaaacacgaaggcattcctatccagccccagtcattcggatcccccaggcctagcggctgcacacctgcgagatggcggagggactgcagacccgggtgcgggagaccagcgccggcgaagacaggcgggcgagggaggcccctccagcgtcctgctggggttgagttggggcggctcgtcccgtggccgctgggtcgtctggtttccgctttccgaaagaaatgagaggagaggcaagtggagtcgctgaactttaattaaaccgtagagaagacagtggggggaggggaaaaaaaacgatcggagaaggaggagaaggcggccgagagatcgaggaaaggaagtcctggcggctcgggggaacttggagatctctccaaggggctgaaagctggaagttgtatgaaggtgttccttttccacaccccagctactctgccccagtcgaagaggctaattctggccctcttataaaaaaaagaaagaaaaggtaaagaaaaagaaaatctaattatgtggcatgtttcagccaggtgttcctggttccaatgactcagaccctattggagccccgaggatctggataattgggcctgcatagacagagatgaaggatgccatttctaaaaggaggaaggggaaaggaaagtccatctcttggggtcttgtagaaaatgccaaagaccaaacgagctaaattattgtgtccgtgtagatctatttgcctatttacatacagcaggctgtgtgggtggggggtgagggaaggcaaggaataaacgaccaggatggagcgggctggcagtagagaaaatgagccccccgccctttgcgggaacagccaaggggcctcctcagctcgcagctcaggcggccgtgcggcgggccggtccggggccgggggccggggccggggccggggccggggccggggccgggctgggggaggggaggcgggggcgggaggggaggcggaggcgggccctcccctggcgctgtgaactttagctgggccgccgcctgtcagccccagaaagcgttaaaggtgcagcagctcgcgccagcctccgcagccgcctttgtacgcgtgatttatgacttcaatcttggttcaccgagagttcacacggctttcgctgctgttgaaggttaaaagatggtcttcgcttgacaagtgggactattgaaaattccttcttctttttttttattttattttagaagcgaagagcagaggctcaggagagaaaaaaattggggggggggggcgggagacaggggttgcaggtgggccaaaatggtaggtcaggaaggtttgtcttcctatatttgggattttttgttgctaggatttgtgtgcgtgttggggagagggtagagaataagagggagctaggcaagagatgtaaagatctctcatatttagaggccaaaggagtgggaaaaaaaaaaaacaactcgtgcttccaccgttaattatctgggtaacttgggtcacaccccctaactgatcctcctctagagaccggaaatgggccaggtaagggagagagtttgggtaaagggtaaggtttgtgtgcttctcactgggtgtacttgatcatccaccttacttgggtaactacttttttttttttttttttttttttttggaaatggggtccagctctgtttcccaggctggagtgttgtggcaccatcatagttcactgaagcctcaaactcctgggctcaagtagtcctcccaccttagcctcttaagtatgtgagactgcaggcatgtgccacacccccaggctgggtagctgcttttcaatgtgcttctgcacccacagatttggacaagggtatttttaggcagcagtctttcaactctcttcatcctgaaggtttagcctgccatttacatttgatgcacatgaagaggctaatgggaaggaaatctatagaactggaattggaagtcctttcgaatcccaaatccccttggtctaagagccagtctctcttctttctagcattttgaaaaaggtcgtgccacagcagagatggtggttaaagatctcctaaagaccagaatctaaggcccctttgtgatctaaggctctgagtacttggagagacaaaactcactccttctttgtagattcagagagacagagagagagagagagagagagggaatgaggagataccttgaagctgagggtctgcttggctcttcgaggtttttttaagatatgtttttaaaaatttttctggagtgggaatttgggatcgtgtgcactgggaaggggaacagcagagagctgggtctggagttgggtgtgcctccctagccctatttaggcccgatctccatgatcgatgctaggtaaatgtcttcttaagaaatagagccagcccctcaaatccagatctgggaaccaaaggcatgcacgctagaaggggcactccctgcttctctttctacatagcgttggagaggtattttcccactgtgtgaggacttagataagagaaggagaagagccagaaagatgtccacatctcgccgggacagctagcaccaggccctcctacaggggacctcgtatgtaaatagcagaatggggagcagagaacagagagaccccagaaatccagagtccaggctctgaggtcactttggcaggaatggtcctctggccttatgaagaacagaggggcaatatggcactgtttagaagctcagggggtggtagctgttaggagaaatcagccaaggaagctaatggatctcttccaggttctggttgggaagcagaggaatgaacttaatggcctctggaagtaatgtctgtactgaagtccccttcctaccctttctgactgtgttcctccctgggaaataattccagtgggcttgtgcttatctgcaagtctggggtaattatgaattattaattcatcattaagacttgattgtgaccgttgctctccagtggacccatttatctccttctttatgaggcagagggcggtctctgttagcccttggcttctgtaacaggcaaactgaggccagcccctcttgaaggcagtccttgaactctgccctaggtgggatggttgcctcattaccagtcaagtcatgttgcacctcagagtatttgtgcaatacagccacctcccacaaacttcagatttcaaagtgctttgtaggctcctggagagatagagtaggggattgggagtgagactccaacaggggaagaaacttggccaagctgtgtgtggagacaggaattaaggcgaggtgggaggacacccaggcacagtatctaagcaatctgggatcaggaatgggcattttgccttccttaccctaaggagatgctagtctccctcaactctctggggacccctgaacacacatctggccccttttcctgacctctctttcccccaccagcctctcaatcgagaggcacaggtttcaagacacatcatcccctccgatggttaggggtgggaaagtcagatctgccagttgtttcacatctgtaagaggcctggagagggagaaaattgctcctatcccatgaggtaattcccatctaaatccctgctataagctcacctcccccagcactgaaataattctcttcatccttttttccccctcttcttccctctggaactacaggcagggagattgagggcaggagaggcagctcccaacagctgtacctagaggaagagacagaagtaggaaatgaggggagagtggcttaaacctgttatttcctacaagttttatctccattattcaaacccaggtcaataccctgaaaccagggccatgggaagccctctctccttgtttccccaactctctctctctcacagaaaaggagccctgcgtccctccctgaggccaaggggctgctctgaaaactgctctaagaacactaccactttctacaggacacctgagggcccagcccccatggatctctcagtgcctgtctggtccagagggagccagtggctcttgccagcacatcaccattttgtgctccacgagggggtggtccatggagtcatctcatctttcagcccagacctcactcactctttctccaagccacgccaacattccttggtctctcccaagccaggaggcaggtaggaagcccatccagagggtcccctggaactggctaatatagtttaatttactgtttggtggtcaataaagagaacttgggaaaaaagggaaggagcaactgtgcctagcgtccttctcagccacccctcccctggacattggctttctccatgaaacagtggactgttgttcttggacaaccattccccaccatcttctttggaagggcttgagtttcaccctccgttcacccccattaatcaccccagcagctaaacatcacccagccccctctggccctttctcttcttgcccttagtattcatggcggagcattcctcactgctgcacgctcacaaagacccctcctctgacacgaggtccctcccactccccaaccacccagtccacgatgggcactgctcactgttctggatgttccaactgctggcgcccactcctggaccccgttcccccactccccagctatctccatagccactgcccccttcccatgcacgtgtcggcttaccacgccctccttcaggtacctcctcttagccccacaaaccctcttcagtctttcccagccaccattctgccctccatgccctatgcatgtgtagcccctgtctgcttccctatacttctccttgcttctctcttctttccctccccaagacattccgtaggcacttcatatggtggacctgaagcccttcccttctggccttgagaaactgagaggcagtgtaccacagtggttaaaagcatgggtttgtgattcaagtccctgatctgacacttgctagttgtacaaacttgggcaaattacttaacctctctgagccatccataaaatagacatacccgctgaccttatagagttgttctgtagatcagattgaattttatttgcatagatccgagcattcagcaggggcttgataagtggtagttattgtgttacaagcttcttgtgaagaaagagagatgttcttcagattccaaaaagtgaaggaattgcctcctccagcaccagagagggagggataaaaattacacagtcttgcagataagcagggcccatttaccgggcactgatactcttctattagctctagagggtctcaactttcgctgcacactggaatccccagcgagtttttctgtttgttcgtttttgtttttgagatggtgtcttgctcttgtcgcccaggctagagtgcggtggcacatctcggctcactacatacaacctctgcctcctgggttcaagcaattatccctgcctcagcctcgcgagtagctgggattacaggtgcttgccaccatgcctggctaatttttgtatttttaatacagacggggtttcaccatgtttgccaggctggtctcgaactcctcacctcaggtaatccacccgcctcggcctcccaacatgctgggattacaggtgtgagccaccatgccccgccacaagttttttaaaatactgatgcctgggtcccacctccagagattccaatttggttggcctgtagtagggcctgggcatctggatttttaaaactccccaggttgctaatgtgtagccagaggttgagatgcaggccctaggaaatgatacaagagataaggggagggctgacacttctgccagagcaagggaggggagggatgctcagctgagagctgcttctcaaccttggacatcccctaccagtggcactgcttcagttggggaagttttcacttagaattagcttctcttgagatcccagaatttcagactctcacccttttcatttcctataactattagaatttacaaaggggccaccccaagaggagacagaggaatcgacagattgacctctaagaggctcatctcttatcagaaaagcatatggtccccagaccaccagtgatagaagcagaggcagatacctccagtagtgggaaaatttgtagttacatagtaaatggagtttctacctggttgctacaataataggccaagcaattaggatacaagtttccaggatcttttcctatatttccaaaaagataaatcacccctaggaacagaatctgcatattgtaattaactgataaatatttcatgcctggttcaaactttctcctcttctatttaatggccacaaacttgagcacagaggaaacaggagtgaggagagtgggggttggctgtaggggggaggttctaccttggcttcagggagggagaaactgtcttagttaattatttactgtcctcctgttcttttaagaaaacattgctcacctggagaaaatcaggtcccaggtggtaaagggtgtgacttgggcttgttggcctgagccctgacctcccccaggagaggccagtttttgatgaccctgggggtgctgggaactgcaggctttggagtcaagggcccagtgtttaaacaagagctctgttctgtcacttattaactggatggctttaggtaatttacctaatttatgtgaaactcagtttcttcatctgtaaaacagacataatttttaccttgtagggtggcctatgctcagttggctctcaatgcttgataactattattatcaacagtaacaatgaataattaatagcccattggattgtaccctttcccttcctcaaccctgctccaatgtgtagggcacctaaactattggatgcttactgtgagtacggtgaatgccttagctcaattaatcaacataattctttgaagggaatatcttatcatccctacttacctgtgttttgcaaatgagggaacagggcgtgtagaagttaaataccttgccaggtgtcacacaactaagtggttaagagcacaggctctgcagtctgactgtatagtttcaaatttgggctctgccacttaataatagactctccttgacttacaatgaggctgtgtcccgataaagctgtagtaagctgaaaatattgtaaggtggatatgcatttcatacacctaacccaccaaacatcatagctcagcctcgcttaccttaaagtgctcaggacactttcatcagcctacagttgggcaagatcatctagcacaaagcctattttataatcaagtgttgaatatctcatgtattcaacatgagatatgtattcatctcatgtattcaacatgagatatgtattcatctcatgtattcaacatgagattcaacatgttataatatactgtgctgaaagtgaaaaacagagcggctgtatgagtattagaagtacagtatctaatgaatgcatatcacttcggcatcatcataaagctgagaaattgtaagtcaaagcatcataagtcgaggaccgtctgtaatcactgcaggatggaacataaattgcttaacctcgctaagcctcagtttcttcatctgtaaattggggatatgaatggtacctacctgaaaggtagttgtgagaattaagtgagaaatgcgtgtatagtgcatgtctcagtactggcatgtggtaagtgcccagtaaatgtgagttgtcagtaccatcatcatactacccagcaactcagggccatggtgtctcctgctgtttggtggtgtttgggaggtgagtgagtgtgagggtcctccaaaggtcacagagctgctcttttaactccccctgacagacacacacacttcagtatctaggactcgggaaaaaggacactaagcagattatgactccatttcgggaattaaatcaaaactcaagactaactcaatttggcttctgacaagagggaaaggttaaaagggagtgaggaggcggctgggtgtgcgttcagaattgcaattggttctggatcccacctccaagcccctccacagggccaggcccaaggagtatcccccgggggtggaggagtgaaggagccttagaacctgtgttatctgaatgtgggtgaggtggggagaacatggtcaaggagttgggaaattatccagaaacattttccaaagggagatcttcccgcataccacctcaacctggccctgggttgcaggggaaccccagaacggatggggtctgggggcttaagacaggtaggtggcctcagtagaggggagaaacagtcctgctggagacagttgcctccctggagaagtacctgggctagtgttctctttaaagacgactagcagcagtcctggtatgctaaaaacattatgtgtatgtgtataaacatatattctgtgtgtgagtagccactcagctcttactcggcttcgcacatttgggccagattattctgagcattgtaaactaaaagcgaaattcggtttctacttaagagagagcgtgattttcctcagtattatctcccgtgcccccaacactccaccaggctttaaaggccattatacagaagggagaactgagactccaggaaatgggtggcttgttcagaatcacagaagcagcgtggatccaagaagggatctgttcccaaacagaaaccagtgtcttgggagagagagagcagaggaagcccgcacctctgccctaacctgaggctttgagcctcccgcaaagcggagtgagttgagagcgcccggaaggcagacgctgcggagggagggactcccgggctcgccaaacagcggggcctcgggcaagagcgtcgccagcgcgtcctcattctgcgattactgtcaggggaccatccatcagcgccgcccgggacgctgggccagactgcccgccgcccgcccgggtctctccagatcgcattagcgtggggcgagggcgcagtgcggcaccggctgctgagggagaggcgtggcggggaggggggcggggcggggggacgaggacatcgcggtggggccactgcaggggcaggggagaggctgctttaggaccctcctccttttcttccaatctcccgcctctgggatctaaggtggatgaaaggggcactagaatgggcggcttttggggggcagggggcgcagaacactgaaggcatcagggaagggtagtgatgggggcagttaccagaagcagagaggaagaaatacctgtaaaggggaaagccagagaaattgtctggggaggggagagactgaaaattgcactggggaggggtgcagagattgggggttagtggaagaaaaagactcaaagggaaaggaaaagagaagctgtagagggaaagagaattggaaaggaattgaggagagagcagggaaataggaaaccacagatcgtcaggggccgacaaaaccttagagacaatctactgcagcccctcattctacaaatgaagaaatggaggcccagagaggggaatcccttctccaaagacccactccacctgctagctgggcaggctcttgaccccaggctcattcattcaacccatgtgttttgagcatctgctgtgtgctgggcactcgtctgccgagatgatgcaggatcagctcctgacctccagaagctacagtctttcctcaggagcttggaggggctgagcatccaggaagctccctcaccccaagccatcagggactccctgagccccacctctcctggccattgaaccttccttgccctctgctgttctgcttatctcctcatggagggtggcagttccctggaagatcttccctctccactttcctggggactccccaggtgtggagacaggtacttgatagtttggccaacttgttctatctcccacagccaacagggtaggcctaaaagcaaagtccatattccttgctgggtttctcctctgggcatggacaaatcccacaggttgcactgagatccaatcgagctgtggtaaggaggattgaggctggacatgaagaagtacttccaggtcccacagtctgggaccattttcttgctggggctttaaagtagctgtccttctgtgagcacagtgttggcaccatcttccagggaaggacttgtcttcctcagtctccagttagccttgtgtgagacattatgctgggaatgttggggttccagatacctggtctctgaccatggggtttctgctctagacatgggtgaactgacatctccctggcatcctcccagtcactgccagctctgcaacatcatggaacccctgagtccttcacaactcccagatcatctcatccttcctccttgctctgggaagaccatgtctgagtagttccaaccaacctctcaccttaaacccagtccctgacaaccagaagtacctccttagtctggacttgaccttccttgctgccatggtccatcagcgatgaccagggctgaagcagcacgttttttctataaacacccctccctcccagtgatgctcacccaatcctcggtggtcaggcagggagtggggacagcttcctggcaagagctctggaaggcagctctgcctcctctgcctgaagcaagctcctatatactctgagatggtggtgttcattttaaagaagggaccatctttcctccacagcccagcttacatttggagggagacaaatgtgagtttccaatcccagaatcttagccactgtaccaatctccatggatgcatgggattcaggaaaggagagaaatgagcagagtgaggacatgaataaaatccatttcataccccttgttccagcccaacttccagggaaaggcccacagagggcaagagaggtggacactgaaaattccagactaaagacgaacagacagatttcagcattattccttcttgtaggcaaagtggtgcctgaggatctaaccaatgaaaaagcctgggaaataggctgtttctgcaccccctgacccttcatgcagagcaggatatcggcttcagcccaggagcaatgctagaagttgagaggtttggagtagactgtgaagcagttcctccgagggcatgccagatgagggggttggagcacccagcccagaacagcatccaaggaaggaggccttggcagtaactctctgtgtctctgtattaacttcacatacattgtcttgtgtgatcctcagtgccaggttcagcaccaggcacagaatacatgcttgctgtacaaatgcataagtgaagagccatgggaggaaggtcaggatcctcaattatagatgaagaaacagacacacagaaaggttaaatgacttgctcaagttcacatatctcatcagagacagggccaagtttcagtggagagccactttagtggtagagggtggtagggaggagggaggcaggaagggagggaatgaaccatcagataccacaccagggggagaggagagctgtcatctctttctctttgtgaaaagagattacttcctgggaaagacggcatttaagaccatacagttttaaaaataacccattgaaggttgatgtgtagcatatgcaaagttctgccaaaaacatggagaggtcaatgagtagacgaggtcattgaggatcagaaaagaaagacaacactgagagtctggacagctaagccccagaattttgctagtcttaaatgctgggtgacatcaggccagccacacccctctctgagcctgtagagaatggagatgccagatgaggaggagggtacacatgggcaagaggaggcaggtcattgccttcagggtagcaattggaggcatcaagttcccacttccctagacctattctttgttgttattattgttgtttctttcatctgattttaattgttttatgtttttgaataggaaatacatgtacatggttcaaaactcaaaaggcaccaaaagttatacagtgacaagtaagtctccccggaacctcagaactcccaggccacccatgtcctcactccattataactgcagtaaccactgaattgtataacctccaaaggtattttctgcttctcctggcttgtaccctgaggccaccacaaagctgagttgagcactgatattctgaggagaggcggtacgcacgttttggcccctggactggtggggccttggaatactaaatactctcagtttccactctgaaaagatgcagaaacttgaggtcaggagagaggacatttctgcatgcttagaagctcagaagcctcgcaggtgagaggatggagttgggagccaggcagaggcaggaaccctctccggggctccagtaccacactcacaccccagagcctcacagtgccctctgggttagcctggctcaggtgtgcacccagttaggtcctgctcaagttttccagagaacaaggcccagtgcttcccctccaccacctgtcacattgttgggaggcctttcttgatgtctcactctagttccttcgactttggttgcagcccatggcttttgattctgccctcagtggagatggaacatgctcttggagatgatagcttccagtgacccaggctgttcctcccacttgcatacacaattttccttcaggccctctaattccacctcaatcttttttccggacttagaagacacatgcctgttctttcagctaccctcccccacctgaattcccagtctgcttccattcccaaccacctcattcttgccctgcacatccctttggcattattgtccccaagtatgctttggtcatgaagatggtaaaatcccaacctaaagctaagtcctccaccagattccagaggtaaatccagcctagtctctttgttaactgaatctctccattttgggtgatgccctagcccgactcttgaacttgtgcccaacactctgactctcagatcctcacacatggcctgttgtgagataaggcacaagttcaccccaagcctgggatggcctcccctctgttctcttctccaaaccctcccctggtgaacctcatcctttgcatttactcactaagcaattattattgagcactattccaagttcttagaataaatacattggtgatcaaaacagagaaagaccccccgcctgtgtggagtttacattctagcagagagagacagataatgaacaatattcttactaaataagtaaattatatcatatattagaaaattataattgttacagaaaaggaatagatcaagtacagaaggatcagcatggaggggaaatctgaggtttttaatatggttgtcaaggagatctcactgagaatatggtatttgaacaaagacttagaggtgagagaggaagtaagccccatagacatcttggcaagagtattccaagtagagggagtggctggtgctaaggccctgaggcaggaacatgcctggcaagtctctgggagtgagcaagagtgggaggagatggcatcagagaggtaaggagggaacagacgatgttcggcctcgtaagtcaacttaaggactttgttttttactctgagtgaagtagagaggaaagacatgattgggcttcagggtcttgttttgttttgttttgagagagagtctcactctgtcacccaagctagagtgcagtggcacaatcttgactcactacaacttctgccacccaggttcaagtgattcttatgcctcagcctcccaagtagctgggattacaggcacctgccaccatgcccagctaatttttgtagttttagtagagacggggtttcaccatcttggacaggctggtcttgaactcctgacctcgtgatccacccaccttggcctcccaaagtgctgggattacagtcgtgagccactgcacctggcctggacttcaatttttaaatagtctttttgtcttttgtgttgagaatagatcacagaaggccaagggaagatgcagggagatttgttgaaaggtcattgcactaatccaagtgagaaatgtgtggcttggaccaggatggcagcagtgcatgtggtgagaaaggcccaaattctggatttggtgacagtttcctcttccttggcttccatccttttgctctctttgcttcctctcttcttttctaggttgtatgttttctctcttcttgaaggctgagagctctctgtggatggggctcaatctctgttcctgggatccggggcaggatcccaggcaaagggcagacaggccccatgctgcctgggaacaggctgacaagccacgcagcttcacagccctccccagttacagggtccctgagccaaggggaagaggctcctgtttctaaagaggatgtgatgggcagttattgaaggcactcagctgggggctccactctagtcttaatctgagccgccctcaaggaaatcataaccagctcttaaaaacatgttaagaccaaagctggtgcgtgtgtttgagcggagcttcagacagctacttaacactgggggcttctgggcttttgattcctccacttctagcctgccatctccccacagctggctggtgcttatcagccaagacgttgtttaaatcacactcatttcctataaacatttcacttgaaatgccatactctgctccagaaattcatctatcaccagcctaggggtgtagttgaggagccttggggtgatcgctccccatctctacccctgcccccagtcacccctcctcccatgacccatattctcaggtttcacgccataagaactacttcccctcggtgtaacagggcacttagtgccagaattatttataacattgagatggcaacagggcaatagggagcagcccagcccatggacactttctctttgaaagctcgatcaatggacctagatcactgtttactacttggtgtctcggcctctgccgtgtttcctgctggctttgggggatggggaaacaggggtccggaccaggtcaaggctgtcctcagagtttaagatgcttataagccaggcctccaataaagttatgccttcactgtacctctattccttggccaggcacttccctgcctcaggtgagctctcttcttggaaatgaaccattcttggggcttttctcaaacaggagccctctgcctcccccaggaaagctggcattatgtccctaccacagtggcagagctaggacttgagctgaggaagtcatctgatatggatcagaatggggatgtggaagattccgggagttcttccgaggaatggcttgaattggccccacccagtctggagtggaggtagagggatggatgaattcacttcttaaggactgaaaacctttttaccatcctcttcctccccagctatagccaattactcattgtcctaatttgaaggctctgttgtctggactggaggatttttacccattttccagcctctctcccagtctcatttatttgggcagtgtcacattaaaggcattgccagacttcctagtccttcccaaaggcctgacccaactccttcccaaatggtgaagcacctctgcctccttccctctacacctgtggacctaccacactggggaactcctaggtgagttccagagaaagcccaggtgaaagactatgagccagtcagaagggatcagggtagaacccaagttgggacaggcaggggaggcagtcccagtctttaggggggtcaagtaattcccctttacaagccaaatgaagaaaaaaagttctaaggggagcatatgactccataaaataaaggacataattgggagcgatatctaatttatctgttgaatgcctcctacgtactcttttatcacttagatggacagaatataattggtgtgctgaacgccatcaatctcagggcctgggcttcctgtgctggctacacctattactgtcagattatgacactgtaataccaagatcaatgacattttaaatgtgctccagttatgggcaattgctgacaataaaaacagtgacaaattgatgaaacttgggcagcgatgatctggtgtcaaaaataaaccataaataatctgatttccaaattgagagaggtgcctgggacaccagcttaggggggaaaggcccagcgagaagagaacctatcctgcccacatgatcttggccactcggaagccacctgctctggaaaactccctctaggctgacctgcaaggccccagcaggaagatggagaggtggtctttggttaaggcttgggttccccttagagagaatcgtcatcactgagactctgggaagtgtctgtgtgtggctgccaaggtgggcgccacacaaactcactgagatactggtgggtggtctttcatgtcctgcccacactgaggaattagggcagactggttgagtcatagaatcacacttagccaatgttaaagctaaaagagaccttgagagtctctcttcatggagggtcaggctctgtcctccaatctggctcagcagagggacctggatcttccctaactctgcttcaacttgccccaggcattatttccccaggctaatccccttccccacccgttgcagggaactccaggccttcaaccagcagaactattttggcgtacattaaggtgggcctcctccagctccttttttttttttttttaagacagagccttgctctgtcgcccaggctggaatgcagtgacacaatctccactcactgcaagctccgcctcccaggttcatgccattctcctgcctcggcctcccgagtagctgggactacaggcgcccgccaccacacctggctaattttttgtgtttttagtagagacggggtttctccatgtcggtcaggctggtctcgaactcctgaactcgggtgatccacccaccttggcctcccaaagtgctgggattacaggtgtgggccaccatgcctagcctccagctccttatttttaatggattaccttaatttgtagtattcctttcatacatttttctcactttaataatcacaattttaaaatatgaatactttagtagcattgctaatactactttatataataatactttagtagtattgctaatactactattacaaggataactactattgggaagcatttattgcgcaactactatatgtaaactgttccaggtgtttcatgtgtattatttttcatccccacagcagccctgtggggtgggtattgttcttcacattttagaagtgaggaaacaagcttagagtcgtagtgatgtgcctaagatgacacagctgataagcagtggagcaagaaaggagcctgggatgtggctcaacattcatcttttttccattgcccctttcacagacctttatattcccatttatagacggggctgagggcctccctaaagaacctatagttagtcaaaggcagagctagacctaagcctagcttttctgacacttctcgtattagacctgcattgtacgtattttttttttaaagactggtcaaatgcagtagtgagaagggggaaggagcagaacaaggatttggatctgtaactgactgtgaacaatcaattgagatagggcactacctttggaccaccccccacgctctttccagatgcaccacaacagtcctttccccaggtcaccaccactccctcagccaggggcttcagccttggcctctaagagtcagcagggggtcacagttggctttgaaaccaagcagacaggtgtttgaatccccactctgccaccttacagctgtgtggctttaggcagatggttgtgagaatttaaatggcataagcatataaaagcatttggcgtagagtctggcacatagtagtgctcactaaatggtagtcattaaagatacaacctgggacagtggcagctagtttaacaaaccaccacactccgtagcacctctcacctgggtgcaagtgccccaggccacactgcagtagctgcacgctgagggtgtccccagatatataagaagcctctccaagggccacagaggttttttgatggcaaatggtttaaaacatcgtttttatattaagttgtataaaatatactatgttataaaatgcaaagtttgcatcattttagagctaaaacttaaggccacaaaagaatctattttcttattaataaaaaatcctatttttatataatgcaaataacgaagatgaagtaacctattatttaattaaacatgtctttaaaaaaaaaaaaaaaagaaataattggtccttgctaatggcccttcagggcaagcccccagactgctggggtccaagtttaccctcctgcctctaatatcaaagggactttggcagaaaagtttgagaaaccctgtcaggaacagagcctacacaaggaccacgaaatctgacttcttcattctttaaaagaacaaaacaaatagcaacattgttttttctaccttcctactgttttaccttcaagtttagcattaagaacatgaaatgttttgtttaaatttatgattcttatttctgattcctttctgtttaataattactagctgaatcattaatcatcaaccaagtgaatggtcacactttatagaaggctacaaggtggaacacaagatttgttggattcttaagaaagaaactaaaagctgcttgcgacttagatgctcctaagttttatgactgtggtgggaatttgagcatccaggccttgcttctgatggtcctctcgttccagtgccccagttctaatcctctgtgggtgccctcggtaggcacagccttggggctgcccagggctcaaggcatccatgtttttaaagtgcccaacaatggcttttgattcatcagaaactccacaggacacccacctaactggggctctgatacctaattcagcagcacccaccaccaagtctttctaagttttattttctttttaatattacatgcaatatatgttaattataaataaacgtaataattcaggtaggtgaaaaggagaaggaaaaaaggcccaagtagtttccccactgaggaagaaccctggttagcgaggcaagtcacgtgattttgggaatcgtgttgaatctacacccatttaaggtggaagtctatatagcttgattctttggtggtttagagctctgctccgtttagagttcagggaggtggtatctacagggtgtattgctctgataaaaattagcagcctgcccaagttcaaggtatgaggggactgatcacagatttatttgagaatcattacgttggccctttggtgactctagggatgagatccagagtacaaggggcccacacttccaagggatcccaccacaccttcaaatagcaggctcatggaaagaggattcccagattctccccctccagctacggcattgctttacaatatttaacattccttgactaaagagcaagtctaacttgcaagtactcctaggacagggactggcttagatccatgacagctccctctctgagagaagggcgtgccttactccaccagaccaaacaaaactaaagtgacctctctgctccccccagagaggggcactggggatggtaaaagcatttctgtccctgaacccagggatgaagtagagaaatgccacttaaccatagtcaggacccaaagaattgtgagaccaagctaccaaaggctcaagtgaggggctggaaagagtgacaaaaacagagaaggacagaactgtgagccaccggacttcatttaggaagtcagtgctagggtaacaggaaggattgggcgggctttcaggggagtggaacgtgttagagaaagaacaaaactgagtggagacgcaaggcaggagatggtttataggtgaattagcagcagagggtgggtggtggctgtgcctggggcaggggtggtggggtgaggaggtgggggtggcagtgcctttgagggagctcttgcagagggcagccttttgaggtgaagagccagagctctgggtcttaagagttggaaagcaggttatatttcacatccttccctgaatagagaaattgaatttggtcaagaataagtcctaagaagcagttgtgagcaccccacctgtccatcttgttgatgaatatggagtgggagaaaagttgagtgtgggcatctgacaaggtctttatgatcctagatgcacttactataccttcttcctcctcctctgccttggctaatgggttgtgggtacccaccgcacagagggctataagacagtccttgtggctgatgcagaagctgggccctgccctcctggccttctgaggaaagtgattatcgtttttggcttgtttttcaactatccctttgcccccagcaggactgaacctttccactcttaccatctctgggtcccttcagatcttttatagccttgaactacctgctacaagatttttttctgtcctaagaatggaggtccggtctgcttcctaacattaatcccttccacacggcacagccttgttttctctagatcagagagatggcttctggattcatctttccctgcaatccagcttctcctcctggggccctcatactggagactgggatcatcatccaggcttttgcactgggccaggaatttgggagtcatcctggatccgtctgcccctgtcaacctttcgctgtcaacggatatttattgggcgtcctcaacagccaggccctgttcatggtactgaagaacagcttgtataaaacaaccctgccctcacagggcgatcaccagtgacctgtggtgtggagtctccttttacctatgtctcctccttcccactgtcaccatccttggtcctcctctgtcacctggaatactccacttggtaaccagcatgatcttataacgctagttttacccttgtcagcactttgccaaaaacctcaaataaagactttttttaaaatgtgcaatggaaaaataaagttataaattatatcataaccagtggacctctttttaaaatgcactgaagccttataatgttattcatggatatatatctatggtaaaaatagaaaaaatatatgatggtggtgcctctgaaagggaggggaatggtactggggaagggacaaagggaacttcaactttatctgtaatgacctgtttattttgaaactcaagagcaaaattgacaaaattttaacagtaacttaacaaaacctcaagtctggatagtgggttcaagagtgttactttatatggacaggcagtgactcatgcctataatcccagcactttcagaagccaaggcaggaggatctcttgagcccagccatcctcccgccttggtctcttgaagtttgagactagcctgggcagcatagtgagaccctgtctctacaaaaaaaaaaattaacagcaactcaggaggctgaggcagaaggattgcttgagtacgggaggtcaaggctgcagtgagctatgactgagccacttcactccaacctggatgataaagcaagactctgtctcaaaaaaaaaaaaaagtgttgcctgtaatcccagcactttgggaggctgaggcaggtggatcacctgagctcaggagttcgagaccagcctggccaacatggcgaaaccctgtctctaccaaaaatacaaaacattagccagatgtggtgggatcagtctgtagtcccagctactcaggaggctaaggcaggagaatcacttgaacccaggaagtgcaggttgcagtgagccaagatctcaccactgcactctagcctgggtgacagagtgagactccgtctcaaaaaaaaaaaaaaaaaaaaaaaaaaggagtgttacattagttgtctgtattgtagatacacttgtcaaaatttaagccataaaaccctcagtgtccctcactcttcccacccccttagcctggcctggcatactgggtctttcacaagcttgtgtcaacctcctctacagactcatctctacactgagggacttgcagtttccaagtgctctggccttggggcctttgcccatgctgttctcttctgaatgccctttcctgctttgctactttgttcttgcccttctggattcagctcctgggaggccctgtggatagaagtcagatggctcaagtaggcagctggttaggacccaggagacagaaacgtgtctggggaggacaacactttcttgtcctggtttctattcagctgcaactagagaaacagatcacctgtttcttgttcaaaactaggatcagtgagaggagggtggaaagagtaagatcctccacagtaccctcccacctcccagcctccccccacatagactagccccaaggcagaaacttcccagcagaaaaaggaaaactgataacctcattccttggtctggctctgttaggattatcatctggtttcccctgctggtgttggaagagctgtgttggtgcaggccagtgctatcctgtgactagagggaagaagctctgcctgggcctgatttggccacaagctcctagtaagatgctgaaaaggaacacaaactctaggcccaggacgccctccccatgccatcccacacctgacttctgcgcaccttgtgagcagatcagatttggtgttgcttcttccacatcatcctcgcatcccctttcacagactcggatatatcccctcatgggaacctatggatctacagcatatctatggatatgccaccccatggcaactgtcctttccccttcatagcatacatcaccctgaattatagctgcctgtttatgtatgtgtcttctgcaccaggtggtactccctgatggggcagggattgggtctgtcttgttcacagttgcatctccagcacctgcaactctgcctggctcagagtaagtgctcagtactttttgtttttgattgaatgatagaatgacgagtgaactctatttcccactagactgtgagcaccatgttgacagggaccatgccctgatcatctctggatccttagggcctatatagtgcttgccacataggaggtgctcagtagacacttatcgatttgagtgaatggacttcagtttctccacttacaatctgagtaagaggaagatattctttgtcctctctccctccttctccaaccacattgggggttgtggttgatgctgtgaggtcattcctgccttattcaacttcatgtccaaatcttctaatggcaaaacacaacatggtggccaagtctcagagtccaggcatccctcccatagcccatagccaagtatgggagaagggtgcttcagggtctctctccattcactttagtctccagcattagccaagatcccactgtctaccctgaattcttcctgctattgcacaaggcttctttcatcttactgtattgtcagggaaaatatagccaagattatctgctcctcaacctgaagtaacatatagattctgcctaattttagaaccggtgttagccaggtgtggtggctcacacctataatcccagcattttaggaggccaaggctgcaggggaatcgcctgagtccaggagttcaagaccagctggagcaatatggcaaaaccccatctctacaaaaaaagcaaaaaaattagctgggtgtggtggcacatgcctgtagtcccagctactcaggaggctgaggcagaggatcatttgaacccaggaagtggaggttgcagtgagccaagatcgtgccgctgcactccaacctgggtgacagagtaagatcctgtctcaaaataaaaataaagaataaaaccagtgtttccacatctggaactttcttttcaagtttatatcacctctccttccaaatcaggtctcccctcctccaggaagtactccttgattaagccaaaaatgttttaattttcaccacttgtcctactactctgcatccccacagcacttgtagtttgtacttattccctatcctgtttaagtgtgtgttcatcatcctaaccatactgcataagcaggcactattttaagtaggcttgacagattatcagaaattgacaagaaaaaatacacacgaagaagaaagtagaagaggattttttcttttcttttctttttgctttatcatagaatttcttgtcttggtgcttacaagctgtgtagcacaatgagaggagaatgtgatttctgcaaaacacttcaggaagcacaaagtatctgtaaatacccaggaataatgaccatgtcttttatttgtattatttttctaattcctccactctatagggcttgcccaaagtccttgattttagcccttgagtgttggttggctgacttagctttggattgtggtcccctgagatcgctggatctttttaagctttagagttatgccctaccatgtggatgcaagtggaggaaggacttctcagtgtgacccatgagaggagtggctctcctgggccccaggccccaggctgcatgcgtatgggagggaggaggagaagcaaggaaaggaggagagacagaagtatatactgagctggtagttgggggaagggttggcgggtggggagaagggaagagaggagtctgggccaaggccagaggtgtctccctggggagtcctcggagcgggcagccggacgtcgctccatccttcccgcctgacggatgcgtctgctgcgcaggcacaagctgtcgggccaggccctgccaaggcagaacagtggcgcttctgtgcgcgctgctccgctccgctccggaggatggggcccgcccgggaagccagggagtgatggagaaagcagacgtcccagaacaggagccgtggggtcacagaagcacgcctgcctcccgaaacaaggggccacaggacgaggtgggaggggaccgggaatcaacgcgggggagcgtttgggggaattgttggtcgaaagaagagaggcagaaggacgcgcgctgaaggagcctggggatgaagagctcgatgatttggccacaagccccctcacctttaagaacaaagctttctgcattcagttgcagagttttgtttcccggtcagatgctcagagaccttccaccctgtcccccacccctcagccttgcccatctccacgagcatcttccgcgccctcgcccgggactcggagcccaccaccctccgcctccgcctggcctggcccgcgagatccctgccgctccagttcggaatctgggatccgcaggctcccagatccgcccctggcccggctccgacccgcccgtcagccgcctcccactcagcgttaattaaaacttgcgagatggagaggctggcgcggacggctccgttttatttgcagcatctttcatgctgctgacgatcgtaaagggctttaatattgaaatatgggccattttcccagctccagccctcgccgcgctctctccgcacccccacacccagccaccccgcgcttgatgaaagagcccctgcaaatccattaaggagagataattgaaaactccggggtaatatttaagaccgcgtgccgacgcggggtggagggcctaactgcgcccgctttgtccgtcagtgctggtgcgtgccagtccctagcgctctaggcccaccaaggccccgccgacgcccagccaaggcccgccgtcttagcggtgcctcctcactccctgcactcaaagggctggctctgcgctaacctggctgtgcctggagacccgacttgcctggagacccgagttccaaaaggagccacagggcacgctgtgtgacagatggattagggccagcatgaacgggggccaaagcatcttgtcccactgcttcagcttcggtttggtgcaccagcatcaggcactgctcaagcttctgagcacggcatcccctctgcctgcaagcttttccctccagcactttctacttgcggaactgctgttcctctttcaaaaccaacccagttccaccccaagtaagtgcagtggggtatggaacgtgggtgggagtatagacacaccaagatcctggtgtgaccattgttgcagctgcatgatgaggacactatactgctctgttttcgtatgttttcaatgttccacaacaaacatgtttagaaagcagctgaggcatcttcttttacgcctccctctcccataaatacagactacctgttatcttgtacattgatgttccttagcacatcgtgttgccattatctgtttaaagtctttctgcctactcagctgtgacatcttcagaacagggatcaggtctaatttcactccttagcccttgctccaggcccagtgcaaggcacataacatgcgctcagtaaacatcactgaataggctgttctctgggtacctagaagtctctagggcttaaggttaggatacaagcacacggaaggagggtagggcaaagcatggaagaggggtggggtctgtgaggctgggttgggggtcatgtctgtctcccacaatgactggcttcaggatgttcccagaatgggaaaagggtggaggaccatgttctgcactgtgatttaggaatccttaggtctctacctgggacttttggggatgtttctccacttcactccatttggcttactctcccaatcaggttagacacacacacacacacacacacacacacacacacaccaccacacaccttagacagggaaagagtgggaaagagggaagcagaagagattatttgaagacctacttgtgcaaaaggcatgagtagttcaggcatttccatggatacccagctaacctcctactacagggcctttcctacttacccctgttgcccagtcttccccaacactgtgtccaacacccatacaggggttgtactcacaggatggcactatcgaggaagagggggctgttctgactcagcccccctaaccgcacattggccctgaagccacagttgcaatgatgccctctctatggccagaatgagatccaaaccattccaaagttccatttccaaacaaggactcctcgttagaaccacaaaacatcagagctggaggcaaccaaaagagcactgtgtcccctcttagtatctgtggggcaactaagacttagaaagggtctgtgatgtgccccaggtcacaaagccattggtaactgggcgggcggggtggctcacgcttgaaatcctagcactttgggaggccaagatgggtggatcatttgaggtcaggagttcgagaccagcctggccaacatggcgaaaccctgtctctactaaaaatataaaaattagcgggcagtagtggagcatgcctgtaatcccagctactcaggaggctgaggcaggggaattgcttgagcctgggaggcagaggttgcagcgagctgagatcacaccactgcactccagtctgggcgacagagtgcgaccctgtctcaggaaaaaaaaaaaaaaaaaaaaaaagccattgctaacaaaaccagtgctagaatcccagcaagttagtggtggagctggaattagaatcccaatctcttgacccacttaaatatatacaattggtattcgaaatgcttttcacaaacattatctcatttaattctctctctctcgataggatctcactctgtcacccaggctggagtgcagtgacatgatcatggcccactgcagtctcaagctcctgggctcaagcaatgctcccacatcagcctcaggcacatgccaccacacctggctaatttttgtatttttgtagagacagggtttcggcatgttgcccaggctggtcttgaactcctgggctcaagaaatcctcctaccttggcctcccagagtgctgagattacaggcatgagccaccgtacctggcctcatttaattctcacaaacctatgagatagcgtcacaattcccatctacagatgagaaaaatgaggctcagggagagccatgatttgtccagtgtcatacacgggtggaaaacagatccaggatttgaaccccagtttgactggctccaattccagtgccctttccactcacttctccagtatctccccctacaccccacccagccaagtcaggccagtttcccagacactcacccttcatccctggacatctccagccagaggtcttttttctccttagcccagcttcccccacccagggcaatgttctttgccccagatttggaggtggcggtgtggtagtccccgccgtggttctgggtacaggcctccatgaactgaagccatgcacagcctggcctcctgtgcgcagccctactcctgttcgtggccacggaggcctcagccataaatccccaggtctcagctcataaccattagcaagcgattgggctcatcaggacgcctttatgagactcaggtcaaataaatggattgccggaggtcaggaacaagggatctccttggcttgccttgccttgcttccgagatgctcccaccacgcagaggttggcagattctgtttgactcacagctgtaggtggaagtgggggcattgtcacagtgggataaagatgtacagtatcccctggtactccacacccatagaaggaaaagcgcttggagatgcacatcctcagatagcccacagtcattagggctggaggaacgcacacacagaggcacatatacacactcagacccccatctctgattcaaatccactcttcagcaaccaaccccccaaccccacccatctcatatcctctgatgtcctcacactccattcctcctgtgaggtatttcctgaaacactgcttctcaaacaccactgcgcatacagatgacctgggacctggttaaaatacagattctgactcagtagatctggggtggcacccgagctctgttttctaaccagcttccaggtaaggccagggctgcttctccagagattttaagcaatggtcctcccacattggaagggtagggtctttcaaaatgtaaaagagataggagtgtgcagtttgggaaagctcctctcccactcctatcccccaaatgctgctgtgcacacccaggtgactgaactgtttctagaatgctgttacctcactctttacatggctccctctcattcttcaaacctcagcccaagtgtcacttcctcagagaaactttctctggccacccaatttattttattttattttattattttattttatttttttgagacggagttttgctcctattgcccaggctggagtgcaatggcatgatcttggctcatggcaatctccgcctcctgggttcaagggattctcctgcctcagcctcccaagtagctgggattataggcatgcgccaccacgtctggctaatttttgtatttttagtagagacagggtttctccatgttggtgaggctggtctcgaactcctgacttcaggtgatccgcctgccccaggcttccaaagtgctgggattacaggcgtgagccaccatgcctagctgaccacccaatttaaagggtccctgctccaccctgtctgtgattacccacttcacaacaggtctcaaaattgcatgtatgtatttgctaacttgcttacttatttttttgtctgtttcactctccgaaatgtatggtccttgagttcagggattatgcctgttccatttattcatgaattcttggcaaccggtgcctagtgcatagtagatactcagtaaatattgctggataggccagtcacagtggctcatgcctgtaatccccatactttgggaggctgaggcgggcagatcatttgaggtcacgagttcgagaccagcctggccaacgtgatgaaacctcgtctctactaaaaatacaaaaattagctgggcatggtggcacaagcctgtaatcccagctactctggatgctgaggcgggagaatcatttgaacctgggagacacaagttgcagtgatccaagactgccactgcactcccacctgggtgacagagggagcctctgtctcaagaaaaataaaaaaaataaaaaataagaaataaaagattatctgaaagaatatctgaatccaggactgaggccgtaggtaatctgagaaagtatcttggaggaaggaaaatgggaggaaaagaacattgtgtgaaggacttaagaaaggtgactcgaggaaagtggggaggcaagggtattcagataagattggccccattggtcctgggttgatatgacaggggtgaggaagggtcctggagggagatatcctggggttagcagcagatgctgcagggtcttggaaaccatagcaggcactaagaagacacatgggcttccctccacctcatggacaaggaccttcatttttattcattctttcctacacttgacaaattcttactgagatcttattaggcaccaggcactgtgctgggtgctgaatattcaggaatgagcacaatgggtctggttcctaccctcctagagattacagtccagtgggagagactgacagtaaacatattaatatgttacagttgggccaagtctacaaaggatagggtatgataacaggtatgatgggtgggttccctagggagaagattccctagggagtgacagtcacccagagtgctgatgggtggaggtcttccttgccagccccctgccaagctttcatcctggacattcctgcattcctctgcactgtccctttaagaggagcatctcttccctgagcaaaggcggttcgggcacacagcctgagcctgccaaggttgtgggctataaatcaacgctggcactcccttggcagtgggctctcctctgagctgcccagatggcgggcaagcctggggctccaggggcagccaggcactcaggaggggggaggcgggcatggtggggacacagctgggccccaggctcctgatggcagctgcccacctctgtctaagggccctaggccagggagaatgccaaagtccttctattctagtcccagggaccttccgactcccaagtcagtctggcatggggctgttgggattattgttcccaccccagccagggaccagggccttataggcatcctctgagaccaagggtcttggatgacctcttgggatcacagtctgttctaacattcaacctgaaagttctgcctgtggtttgaccttctttcctcttgctgtagccgaggtgtcttcttttaccctgcatgaaagatgaaagacagtagctccccatttagtgggggctttgggactgtgtgatatctccctccgccttcactttaagcctcccagaaaagcagaataaaaagattcttcaaggtcagttggagagatggaactctgccctcttgggggttgccatccctctgccaccctcacaggtgctgtgacagagggaacatatgttgctcctaccccagaggacagagacaacatcttagcagccacagccccacagagctgggctcagcaggccttgacagaactggaaaggcaggctctctcctgggcctgggcctggcctgagcctgggttgtgggtggaggggtggaagcaaagcctgtagacccctcccagaaaggaatcaacaggcttgactgctctccccacgctcactcccaaacagtagaacagtggaaaattcatgggttccagaacaatagagatttcctgggatgtccttgtcctcagattctctgtgagaagtcagagtttacaagtccttagagattctttctcacacactcatcatacagattaggaaactgagatgcagagaagttcacccaggtctttttcaggttgtttttactacaccacatttgccacctgaacagaaactcccagagctaccactaagcaggatgtattagactctaaaggtagtagtatagatggaggttagataacaagtagaactttctcagaatagtaggtcacagaagaagatgagaagcaaagtaaagaaagtgcattctctaaaacagtggggtgggggcgggagggatggagccaaagaatcaggttagaattttgcaaaaagatagaaatatagagaacacaggagagggagctggcatagagcccagagcaagggcaactggggtgtagagcttctagggttcttcattcaggacccctagatttcatctgtcccaggcttctgggtatcaccagtagtttaaagtcaggccttatctgggctgattctcttggctttctccttgttctcccgggatggcttatctggctgccagagtcatttgccgtctctaatttgtgtttaaattaaagttcccacaaacagaggtttaatgtgctgttaccaagaactcccaggccccctgcagctctgggaagttgaaggggctggggagaagaggtcagtctgtgcgcatcccatcgaagctgatcccactggcattggacctggagtggatagcccaactaagtgtctccgtccttgctgctccatccagaatggtgatgacagggggcagggcagggaaaagcatgctcacaaagggcctgggaccaacatgcctgttcaggggctcctgggtggctgttcaccctttttcaggatggtgaggagaaggcaggggaggtgggcaatgagaacagggcagggggtggaaaataaggtgagagcaggaggctccattctttaacacttgtgtatggtgctcactgtgtgccagcactgttcctgggcacctcataactaaaaattcaaccttctacacaacctgtaaggcaggtgttattatcattagccccatttttatagatggggaaacagaggtatgcccagtatcacacagctagtaagaggcagatccaaggagtcaagccagtgccgtctagctccagattcccagtgctatgctgacacttaagccaagatttatctgtcaccctcccaatcccttgatcacaaggtgaggcttctctttgccagagcaactgagacagagtgaagctcccatcctgctcccccgatctttacctctctgggccgcagtcttctcatctgtaaaatgaggataagatactaagaggggttgagggtctgagaaggtttaatgagacagcttgtcagtgaccagcaccgggtaggtccccagcagtggctgcttccttctctgtggtctaaccatgagccttcctgctgtgccttcctgcactgcctcttaattctgctttcaaaggagctagcggcagtgatcctcgccccttaaagaaaaccctcaggagaacgttgtccctcattcatttgtccaaattctctctcttcctctgggaaaccctgaaaaagagggataataaagctgaactggagccccaacctgctctgtccccacctcctctgcacccaggtgagccagtcagggcggcaacagaaaataaatgacacattcgaaagggtttcactgaagggtttagtgatgtgacagtttctaaaggcatagaccagatgaagaaaactaataagggctagtgtggcactaggatagaaatatctctaccaaagcccaatgccaactggggtcacgggacacaggagagaggccactcagcaaagctgtgaccatgggggaaccacaaccaccaccagagcttcaggcaggcaaaaagggggagtgacagggaatgggggaaacaaataccctgactcctctctcccccttctcagctgggacctctattggctgagagatcagggggcccaggtgacacagtctgcagaggtcagcctccctgggcagagcagcacagagaacacagtggggcaaacagaaaaccatccccgtcccatcccacccacgagtccctgctctgataccaaagccttctctctgctgctttattgccacctctgtcactgcctgcagccaaacagtgactgacagggaaggagagtcaagactccttcaacacaaatactccagctcacaaggaaggtgggatccaggcagagggcagcttgagggaagagggctgtgtctgaagggcagcagggcagggactgcccactcccagcatggagagacaaagagaaggaccgcactgggggtgaggatgtcaaacggcgatagtaaatgactctctttcctcagcatgtgatacaaatcactgtggatcttccttcctcctcccctctctagaccgggagcccctgtggggaagggattttgtcttgttcatccttgacatctagcacagtgcctcttaggggcataatcagaatttattgaataaataagcaaatagatatgtaaacgaatgaacaaacccatttgcagctcatatgcacagccctgggccctggtcagggagcactgttgaatgaatgacatgcagcattcctacagaagttttctttcaatcagttccatcatctaccacctcaggtttcctttcagccactcagtcacgggccacacagcccacgtttgtctccacgctggccagagctgtgctttgatagcacccactcagatgtgcagtgacctcatctggctcctcccgatggaggaataaggggagtagcaagtgacttcctttctcacagcagcctttctctgagctctttcttgagagaaatcttgatccatggcaaaccgtctgtggtattcttggctgcagcccttggcaggagatgggaggagggaatgacagtgccaaggaggcagctgaaggatcgtcaccctgggagccacagctctggcttgctttttccaatgggccataaagactgagggaggcaggcggaagcaggggcaccagactaacaaactagagtttcaagtgttgtccccatgcgaagccgacctggcgaagtggttagacacagacactggggctgggctcaagatccctgttctaccacctgctggctgtacaaccttgggcaagatacttgattaccatgcctcagtttccacatcttaaaaaatgtgaataacagtaatgcctacttcacatcgtggtgaaaaagtagatgagttaatagttatgagatacagccaggcctggtggcatgggcccatagtcctagctactcagaaggctgaggtggaaggcttgcttgaacccaggagttcaagaccagtctgggtaacatagcaaggccgctccccccgcttttttttgagatggagtttcactcttgttgcccaggctggagtgcaatggcatgatctcagctcaccgcaacctccacctcctgggttcaagtgattctcttgcctcagtctccggattccagggatgaaccaccacacccagctaatttttgtgttttgtatttttagtagagacggggtttcaccatgctggtcaggctggtctcgaactcctgacctcaggttatctgtccacctcggcctcccaaagtgctgggattccaggtgtgagccactgcgcctggctgcaagacccccatctctctaaaatgaaagttttgaactatttaggagagtacatgatccatggtaagctctatataaattttgttacataaaattaaggttgtagtcccataaacttttttctgtaataagctgctcagccttagatacctctcatatttgctgtgagaagtgaacaaatgcatgtgaaaactataatgtgtttataatttttattatttgtcatcaagatcatgtaagagacctgatttagcagagggtgaagggatgcgaaaggggctgtcagtcatcaacttttgattatctgccttgttaaggtccccttcttgtcaacatcatcagctctttggcttgttcaagtcttttgttgacaatatccaggcctctcatggtccctcccacacacaacgggccacacagcaagggctggaaggaaaaagcctttgaaagcaaaacaggtccttcccttccttagccttgaagcgggagtaaccactagacagaaggctgtgagggaggactctggcacttccactgtggctgctttgcctttgggcaggaggggaaactgatcagctccctctgtggtagggccgcaggaagagatgttggtatttgtaatgaagtgctaggaataaaaacacatacatggccgggcgcagtggctcacgcctgtggtcccagcactttgggaggtcagggcaggcggatcacaaggtcaagagtttgggaccagcctggccaacatggcgaaaccccgtctctactaaaaatacaaaaattagccaggcatggtggcgggcacctgtaatcccagctactcaggaggctgaggcaggaaaatcacttgaagcctggaggtggaagttgaattgagctgaaatcatgccattgcactccagcctgggcaacaagagcaaaactcggtcccaaaaacaaacaaacaacaacaaaaaaaaacccagaaaacaaaaaacaacaaccaaaaaaacccatacacacatacttatcccagtgtccagagcaaatgttctgccacttactgctatgggtgtgatttcagacagctatttaaacctgagtttcagtttttctcatcttcaaaatggaaatattgatgcctaattcaaagggtgaaaattagtgaactatagaaaccccttggtgtatgtctggtccaacaaatggtagctcttattagctaacattttgtaatatctgcccactctctcctccaagggatggagaagtaatgctgagttccagactaggaaaggtagtggtagcagaaagtgatttacaactctgacttttttcacattttctttccagagcacatagtaagttcttgttggttcattcattcattgaacagtgtttacaagtttgaacaagcttgaacaacttgccatcattttgttcacttgtattcatcttactctcaccactagaactgcaaggtccatgagggcagaggcagtgtctgttgctgggtgagtgactggattgagctcaaagcatgtctgaagactgaaatgggccaggcaaggagatggaaactggaggcctggattctggctcggtcatacctccaagaacgtaactttccctcgaccctggggagtcttcacagaccttccttctgctgtgaggcactggagaatcacttgagaccagactcaggaaactcttccctgatgggaagacattcattcatccactccacatctctgaagccccaagagaaggatctgaatcccctagtctgaagagtcagcaagtgtccaacatagcaatcttgataaaaagggagaattgataaaggagggagcagccccacctcagtaacaagagggaggaaaattccagctagtacatgtacttaacatgaaagcagacatgtgccaagaccctgctttcatggatattaggtgttcccaaatataagaaacacccattcttgcccacaggcctcactggatactatccaagatgtctagagaataagaggaaagagagaatcataatatccaaaaggtggaaacaacccaaatgttcaccaataggtgaacggataaacaaagtgtgatatatccatacaatggaatattagtcagccctgaaaaggaatgaagtactgataaatgctacaacatggatgaactttgaaaacactatgctcaatgaaagaagctagtcacagaaggtctcttattatatgatgccattcatatgaaagtccagaatagggaaatctacagagactgaaagtacattagtgttgttaagggcaagaaggaatatggggggatagggaggtgatagctaaaggttacaagatttctttttgaggtgatgaaaatgttctaaaattaactatggtgatggttcgacatacttgtgaatatactaaaaccattgaattgtacatttcaaatggtgaattgtatgacacatgaattatacctcaagaaagttgctttttaaaaagacagcgtaaggggtggggggcagttgagatgaagcaggaaaactgtgatcagaagcaaagctcaggggctgtctggcctggctgccccaagtcaaagcctgcatttcatacaggcaatgttagggtagcccccaagccatgattcggaaagataaattgaccccagatggaatagggctgggtcccttctcccttgacagctccctttctgtgttttttctggcacaagaaactctgtcatcttgtataaataggagaaatttatggcagttttccctcttcttctccctggtgggctactaggaaaggtctagggggaggagggagcctgaaattccaaaaatataaatgtggaaagactggagggggtcgaggagtctctttgcctgccttagctctggccccagctctcctttccctttgcatgtttgaccatctgggtgatgaggagggtagagaactggtgcagcccgtcctctctgcaagcccaaaagagatgggtcccaaagcagatatccgacaggaggggcacaagggaaatcaaggaaataggcttggctgtcccatgaaataattggaggagacacagaccactgccctccttcctggatttggctatttttgtacttccctgtttgttgaggcagcctgatacagcgggaagagaactcgtcctcgatttagaaagattgacagagaaactaagtgtgtgaccttaagcaagtcatatcttgtctccgggcctcacctgtaaaaagagggaggggactgaatttatcaggggttttcaaatgattttaactctggggtccttccttcaaataaaaccgtatgcagtgacccaacatgaacatgagtagtaggctgctgagcttcttgaaggtaggaatgggagtctcagggccctgtggtgactggcgagaggcttgtccaagcacaagatgatctccatggcttttccagccccgtcctcaggagggatttgcccccatggtgaagaggctcagttctgcacacccagtgggcttgaaatccagctccaccccctcctgtgtgtccctcagcacataacttaccttccttgaacctgtttcctcgtgtgtaaattggaataatagtaacacatatctcagaggattgtcacatagattacactaaataatgtgcatagagtccttcgcatacttatctggcccaataaatattattatagttattccgtgatctgatgtaatcatttttttattttgagacagaatctcattttgtagcccagactggtgcacagtggcatgatgtcagttcactgcaacctccgcctcctgggttcaagcaattctcctgtctcagcctcccaagtagctgggattacaggagtgtgccaccgtgtccagctaatttttgtattttttagtagagatggggtttcaccatgttggccagactggtctcgaactcctggcctcaagtgatctgcctgcctcagccccacacagtgctgggattacaggcgcaagccattgcacctggcccgatacaatctttttaatttgaaatatctggtgtgagaaggtgaattagaaaggatgacagcaaaactgctataacacaaaggccccaaaacacagtagcatatagaaaacagaagtttatttctcacttagtctgggaggaagcggttccagacagcaggcagctctgttcctcctagtcagtcagggacgtgtgttcctttcatacctttgctttgtcttcccttagggatgtcttttcagttgcctggtcaaacctgtctcaggcacatctgcccagctcatgaaagagagaacacaaaggagaatttacccaatgtcatcaggctttgaggacatgcttgcctcacattcccctgtgtctacacctggcaacaagagcagctgggaaatggagtgtccagctgggtgtctctctaccctcgtgcagcaaggaaagaagagattttagtggacaacgggcagtcttaatccagggctcaaacccacacccgagctgtcctcttcctcttctcttcccaaaggaagggaaataaagtctacagcccagaaaacaatgtgaccacccatcccctaccccaatcaggtccctgccattcatcccaagatcagcagtcttgggaaagtggcttggaagcctccctccagaaagaccacccttttgtccatcttcttcacatgggtggatgtgagaaaagtttctctccccactgcctgcctgccactccctgtctcagtttcagctcacgctctagccctttgttcccagtcaccaagagtgactacaaatgcgggggaacaggaggacctgaaacttcatggaaattgagactgggacacagaagccatgctcagaggcagcctaggtgagggttctgatgccaggaaatccagctactactgtgtagcctaaagcggggattaagctctcagaacttcaatgaactcttttggaaataggggtaagaagcccacttgtcagggctgttgtgaacatcaaatgtgatcatgtatgtacctagtacatagtatgccttcaataaatggtaaggcaaacccaaggcaaatcgaattcatgtccattactctgacccagcctttgcataaattcttttttcttctccttccttgtcaatgcatggctccctccctcttctttacttcctatcctcattcccctaccatctgaaccctgatgtggaatctcttttctcatgaaatcttccatgattgaaaaattcctgcttggccacttcccactccaatactctatcttcgcccatcttccatctaccccatggtcctggcccaagttcacatgtgtcccatccctcccttcaaaaagcatgcagcaatggaagggctttaagtttgtcatcaagcagatcagagttcagatgccaactctgccaagttctagctttagaactttgtcagatcacttcctctccttgaatctctgtcttcccaaccctctggtgaggtcaagtgtgtgtgggctggtacataaaggatatttaatctcctctgctctactcaacctcccccaactcacactcccaggactaactctctaccaaagggagttattagaccaagaaagtaattctcccattaccagccccaccccaaccctgcccagagaaaaagaagtgacttcgagtctatgggtcttggagggaccaccaacccaagagctagagcagaagaaggacttggatatcctagcttccagggttataggatctctccccaagccctcatatggagccccagttgcaggactagcttcagggataggagtgaaagagttgatctgattccaatcttagcctgtaagtagtagctcacctgtgcctctattttcagccttcctagatcagaagagcaacaatatcaatgacaactaatgcttacatagtgtttcctatgggatgggcattgttccaggctcttcgtacatataactcatttaatcctgacagcaacctttgagctaggtactattaaccccattttacagacaaggaaactaaagcacaaggggttaagtaacttgcctaggtcatacaactcacataaggcatgactgagattcaaaaccaggccgtctagctccagaatccatcctgttaaccactctgccataaaaagagctaacatttactggcagtttctatgtgccaaacactgtggaaaacacatggcatgtatttcttctaattccaaataaccccctgagataagttctattattagtatccctgttttacaggtcaagaaactaaggcagagagaaaagttaagcaacttgccctgagtcacacagctagatattaatagtttcagaacccctagctgttttgcctcaaatcccacctccccacccctgctcgaagcccctcctcttctaggtgggttgtttagttcctatcaccagttcttcacaaatctgctttacccccgacagcctacaacccttgttctccaaaactcctgttgacctccgtccctttcccttcccactttctccctagtccctccgctccccacaaagtc

SEQ ID NO: 204 - DNA, 432189 bp, Homo sapiens
  source 1..432189: mol_type = genomic DNA
atttataacctgtgctatggtttgaatgtttgtcccttctaaaactcatgttaaagtttaattgccgttgtaacagtattaagatatgggacctttaagaggtgatgaggctatgagggctccactttgatgggtgggattaatgctgtatgaaaaaagctaggcccccccttgcctctgtggcctgacttctgccgtctgatgatgcaccaagaaggtccttgccagatgctggcaccatgatattggacttctcagactctagaattgttagacaatgcatttctgtttataaattgcccattctcaggtattctgttacaggaacacaaaacgtactaaaacagatgttagttggaccatcagcttcatagactatttaaagactaggcaaagatgtatactcattagctaagcaagggagggtaaatcttggttagaccagagatgagattcttcctatggtgtgctggtattttttcctgggtccttatgacatccaggcctctaccctcacataggtgttgtaattcagaacacaaacctaataatgtttctcaaaaatgttagcggcctttggattcttcttttcaaagaatagttctagaatatttctccatgatagagtattttgaaggagagagcggtctaatttgatgaatgaatccatcagttggaagggctttggccttagtgtcaagaaatctgggttctagtcttgaagtgttcaccaacagtaagtgtgatttttagcaattcccttgaacttcagaagttttactgagatattttctccaatgtccaaagatttttgcagctcactgactatgatttagaagattttgtagtggtgaaatgtcttcctagataataactatgtatgttcattaaacattgctatacataatagggtatattgcagcaaatatctagaactgtagcgtacggcattcaggaacaccaaagaaatgaattaactaaaaagcacaattacatttgtatttaaatagaagactgttttgcttaaagtgttttatgtttataaaatacctgcatgcttcatattattccttgaaaagaatgtgtaccttgtgcttagtaaaagaatccatacaattatgtttctattctgtttctccagtttattattttcaacctatagcctgaagtcaccaatctctttgtgccccgtcccttgggcaatgtatattcaggaagtgttgcttttgggtaagccttgttgagacaatgcctggctggttttgtctgttggttgttagccttgaatgtctggccaagttgcccacagttgataggggacaaatgggagaaaaacggaaataccaacgatagacttcctcagactcagctcttgcagctcagaatagtgtacccgagtggtaacgcaagttagaaatgactggtgttctccacattacagtactactgggatattgctttacatgcctcctgaaaacaaatctgcattgcacaccagatggacatgaaaccaagatttattaaaatacccttagcatatttacaattgaaagccatgaatgcaattctctgtaaattccaaaaaatataattctcttaaaacaaattaacagaggtatcaacagattaggataaatataatctatcacagagatagaattttttgaatagacaattgacgtttttctaatcaatatatattatgtacaaaaatacacttgatattgtgaccaagtactgtcaaggaggaaaaaatatatatatataatacacacatttttattatgtacaaatcagtgttggttccttcactctctttttaaaaataaatacttcatttggttgcaaatgacatttataaattcaactcatgagcatttctcagctttgacaaaattaaatatgcaaacaaattagaaatacgtatttttaaaaatgcaaagggaaaaatacctgaatccaatgagcttattatgcttaaaaatatcccaagagcgtgtaaggtttcatgtctttaaagggccttctcctttccccaactgtcttcattactgcctacaatcttttcagattatatctacagactggtctaatacttaattaaacagaaaagcctatgttttaccaggttaaatggctatttaggacatgcttgcacttttaagtgctttcaagagtgtagcagttactgttcatctgaaaataaccaagaagtgtcaacatcctgattcagaacaggggtagatgtttgaatcatgaatagtagtaagaatggagcggcaataaaaatccttatgattcaaagtgtttgcctgcacagaattaagtcaatttgtccagcaccacagaaagttacttgagattcaaaaatctggcgttctgcatcatagctggtgacccggtctgatgtacaaatttatcaagagaatggccttaattagtttaaggtaaaatctatgagaaattgagaaggcctagaataagaaccccccccccaccccgcccaatcttcttaaaataaaataaaaagagacgtattttccatctcttttatggattttcctttttgcttaagtgatgaggtgatgctgacattaacaagaggcagtcacagcagtgtgtctcacatgggctccttggtgacagcggagctccctgtccaaacggctgaggaacggagcacagggtgtgagaggatggaggaggggccaagggagctactcagttgtctatgatgcagaggtgtgaaaaaatctgggtctgggggaaactgtaaagtaggaaagaaatagccatggaatatgaaggaaaaggacgaggaaacagaagtattgaaagaagaaagtgaaacaaagctagaagtcaaaatgacttttgaacaggcatggagtaaacagggtctatggtcaagcagccccatggatctgaaattgttggagctgttaaaccaagcacagaccagtttcactggggtacctgctttcccagtacattggcactgatcaatacaagatcaagggcactcacatttgcctaatacagatgccttgaatttccacggaaaagctgtccacgatacgaccatggcaaaaaatcaccagctccctaacaatgtaatctatcagcaaaacattgcactagcctcgttcaaatttttctcctccatgcgtcctttttttcttgctcatcccattgcttgcaaactcacaagataccagttatatgaagacataaaactgcatggatcaggtgcactttagaaagcagcatccagggtccagggtgtcactaagaaaactaaaccctgaagtacttgaaataatttacatttctgctaggtctgattcatactaggatgttgactgccttcactcaggttctaggcatgcaggccagtgcttattttccaggccaaagcacgatcccctaaatcaaagtccaaggccaccctgcttgccatgctagtctaaatgaaaactcaatgaaagaaaaagactatgataaaccaatgttttctctaaagattcttaaaaattatccaatttctaattttaaaagtttctgcctttttagtattttagattggttctttaaagggaagttctttttattaatgcatactctctttgaagataagacatctagctgacagtagggtcatattacttatgccttgggaaattacagaattgcacaattataaatttaataattttggagtagacctatcccttaggtagatccccaaaacctatttgtgtcattgcgagcaaacagaagaattgatactagactttccctctcactcatggatttgttttcaatggaaatggaagccttccaaatattatgcagaacacaatctcagtggcgctgagctaccttctttatgccttgtggtccaatgtatgaagaaataagattttatctagagacaagttagcatgaagcgaggaaaaaggagatatttataattcacaaaaacatctaaaatgtaaagatttcaaatgtccttttagtcccttactgggaagagcagtataatttttgtatgctataaactcctttttatacatctcctataaagaaatctggaattcaaaatccatgctaagagtttccagagtgttcatccctcaacacttatcatccatgtcatggggaggtagagagtaatttccctgaatagccagtggtctatgggactaacctttcatttgggaaagacagatctggaaagcgaacccagttaacagtcaaaaacacattcgtttcataagaggaaagtggaagaaagcccctgaagagaacaatgaaggaaagcaggtacacgtttgccaaggacattaacaaacaattgctaatgtgtgcctgaaatctgatttccttcttgatgtattaagataatgcattggcagctcacactatacatggagagaaatattcatattaatttaagacgttctcatagtttcaaaggtagagagcccctcagtgtctgcacaggtagaatttaggaaaatgttcagcctatgtgagagctatagtgtggtagaggttgtttaatccatgccaaattctttggacgtgattttctgcctgaaactatagtcttctttgcattttgctggcccaatgtcatcaagtttcacacaaagcttggaaaaatagcccacaagtgtagttggatcagcctttagaaaaggagactagagattctcagtatatttaagagaagatttaaaaatagaaaattacataagcgtagagggaatgtagaaaaataaattgatggctatatctaacaccttcatataaaaatggaataaaagtcaatcttccccacatcaagaacttcagagatgtaatataaagtctggagttcacatgagctcttgactgaaggacacgatcctatcagagaaaggtaagagagaaaaggtcttctatggccctggttatcaccatagttaggagaagggctggggatagaggaggaaatgagttccgtaagttccaccagacagcagacctactgaatgaggcttaatttgcttccctaatctctccattggtagaaattgcatagtggcttaagagacagttagccagctgccattttaatatcttcatgtttccaagttgttaactacacgtttcccaaatcctaactttatatcacagtattggttaagagtcttggaacaaataaggatactgaattggcttcaaatttgacatgttaaaactctcttaaattcatcactttccaacaaagcattgatctggaagttcagtagattgcccattccttgggaagggagatgaagaattgtgaaaccaaaatgcagtgcctctaataaggtgtcaacagcggacaggtgtgcagaaatgacacaaaatgggcttcccagtcacagacaagctgtgtaactgagcccggttatgcctggattcaattgctaatggagagatgaatatcattatgtaagtctaaagaagaaagatatgctaagtcaagtatttgaagatgcttttctttaagccacttctatactaataacagtttccaggcagctggattgtttctctctatagctggaaaatggaaatatatccaagttatttgcattttggaaaggctaaaaattatccactcttttcaaatcccatcagcttggccacacagactggtttcatctgtgttgcagatttctttatgaggtcaaagtagcagacatgaatgaaagttcacttctttattctctccactctcttcagttgtagggtccctaaaggtaaaataactaatacaaaacaaattttaaaaagtggaagctttttctttcctctccactttttggccatttttgtttttattaggacagacaggataaaagaaaaatgaagctcaaatataactgatgcttgttagcaatttaaaaagacaatttaaactgttttataaaatcagatatttaatatttggatcagatatgtgggaggggggaaggctatatatttttggacttcttcctttttgtcatataaagctccaaattgattttatctttgttgtttttgtggatggagatgagtactacaaaattgaccaatttagtatgtcagggaatgaagaggttccccggtcaatgttacagcctggttcctggaaaaagagcctgcaagcgtgcattgctaattcccattcacacactgacttggcgcaatttgctgtgctgttgtatgcaatgatctgcatcaatgacactggccaagggagaagcagaaacagaaatgaggacatgtaactttcaagaaaggaagagtatcattaaaatgaaaatttctctgttgcaaacatcatagagaaaatgtgcaatcccaggccaataagcaaatctttgcccaaaataaacatatttcttctgctacatctcactgcggcccttagaaaaaccgtaccaatgacttatcttactggaggtgttaataccaccaacatattttattccttccttcagtttttccagtttctttaccagcagtatctgaacttttcatttaggaaacaccattcttcatggtgcttatgaaaacaggaggtgcctgaaggaggctgagaagaggtttgcagcttctactgtccttgataggggaggggaggggagactgcatgccatctgatattcaattcctcaaccatactggcaatttgttttggctagaacatttaaaagtgtaatagctccactgggtttccttattccacttctcagatttcagaaaatctttataattcctgagtagttgcagtgagtgtgtagaaagacaccatcatcaacataaggattcaaaaggcaactgttgggcagtaggaccatcacctatgacctctgggcccccaccgtcatcataaacatccacttctgcttggccacactttttcttatttctttttccccagtaagctgccacttattgagataaaagccatacagcacacctcctaacctggtttttgatacttcatgggcctgatgcttttttttttgaaacggagtctcactgtcgcccaggctggagtgcagtggtgctatctcggctagctgcaagctccacctcctgggttcacgccattctcctgcctcagcctcccgagtagctgggactacaggcgcccaccaccacgcccggctaattttttgtatttttagtagagatggggtttcaccgtgttagccaggatggtctcaatctcctgacctcgtgatccgcccccgcttggcctcccaaagtgctgggattataggcatgagccaccacgcccggcccgggcctgatgctttttacctaacgtgtctgtagtgtaatttatgatgtactttgtgtaatttatgtaacttatgatattgtgtgctctgatgctgtcaattgctcatgcaagaatctgaactactgtcaaactgtgtcctcagatttaatgaatattgtctaagaggagacaaagttgtttgtaagttaagggttcttagagttactactaagtcaggtgtgtctggttagatgcagcatagcaaactggttactctcctttctagttcagggagggctatgcctagaacagccacttaaagcctgctggcaggatgtgcttaagctgccaaatggcatcccgatcacctcctctccaggaaaagttcagatcctcctgctacactgaacacaagctcaacagcattttagagggatcattttcaaggcctccagattattttagatgaacttccttgaacaaattgtcattgacctttactgagcatcaatttgagttaaaaatgaaggctgtgtcagcaacgtggtacattggtggacttgggagggggcatcccagatacatgatgcagggttcagaataggtgagaataatgaagattctgccatggtgtcttacaacactaacatcatacatcgactagtgtgacaaaaccactaggtttccccaaccgaggcaggcaaaccttgctttgtagaaataggtattttactgcaaagttttagtctgttcactaggatgaaatccaaagtgggctgtatttgtctaactctcaaattaagtgttctcactcattattcttcagcactggttcctgaagggttacgtggccacagtggcagccctgcttaccttcactgatttctcgtaagcatcctacttacagaccaaagtggactgcaatgagtacacctcaaacctcccgctgctctcaccatcaagcctataaggattgagacttctgctggccccacataactcaaaagagctgaattatatggcatgggtaaaactggcacttttcttgtgcatgataacactagaaggagcatacaatggttataagtggaatcagtttttaattgatccgttcttttggttgtcttcagagttaagtgaaaatgaagagaaactatgtaagaaagcagcataaaaagcttcttgctcacaagcaacttcaagcctttttagtcatgcatgttccttctcggcttttctgttttgcttgtctcgttccttcattgtgaattttaaaaatccaaccatgttaccatattcctttcagttgcaccagtagaaaaggcggttagcacctgcatgaatatggcttctgtgacttgatttgatcctgactgcagtcttcattctcgaagctgacattagattaggatatggtgctgctttcattactggatctattatagaagcattcctgaggggctgctggctggcaggcatatcctgggaagatgctcaggcacctggcaagtccaggggttctggaaagatgctggggcaaggggcaggccacatgtggaggctggatcaggaaggaatttaagatttctgctcatctctggactgtcctccaccaattggggggagaaagctcggcctcttcaaggcctaaaaatgagtctttgatcatattgtccattcatctccagtcctctttcttcacccctcacaagatttcagagacgtggcttaaagacaaaagtgtcagagaggtcaaaggtggtttccttatgtgactcaagagccagggtcagaaagagctgcctgtgaacaatattccacttggaagttttctattaatgtaattactttcattttgatgtaaggaaccttttttctgcccttcagtttttttgacattaaagagtcctgcttcatcctacttcacatgcctatcagccaaggtcatgagcaggtgctgtgagttgcatttgctctcctgtctggaaactgcctcctggggatgggggtcgtccagctgcacagtcacagcacataacgtagaactcggctgcgtatcaacacaacattgcccattcatgaacggtccaaaatgtaaaaggtgctctgccgctgggtctcttgtccaagcacacccaaggctgtgcttgctcaggtattacattttctcctgggagttggggtgcagaatctctgctggcccagaaaaaccacaaaggaccgatgtaaaaacaagaatgggcctcacttaacaactgatgtcaactccttgcatggtaacttgttctccaggatgaagtttatggctatttgtctccctctctccacccaggtatgattctgttttttctccttttcatcacgtaaaccataacaacaaaaaatcatttttttagtctggataatacatgttcttggacctcttcaagaatagttttggtgagttgcaacattattggagagaaagatgctgcaggattttgctgcaacaggatcaaaactaagaccaataatcaaaacagcagtgtgtaacgacaaagacttgaactctcccaaggcaactgtcctcaatgatcttttctctcttctgtgacaatgtgacatatatcaagctttggttataaagctggaaatctcagcttttaaaaaaattttggaaacattttggtatttcttctgctcttagagtggactttgggcttccacaagaaacagtcatcaaatatttctgcaatgttcccttaaatagttttccattgttcctgcggcttaatgagggacttcttaaagaaggcatggggcactctctgcagatgacctcagaaagagatgagcaaaaacaaacatttagtgacacatctttcaagaacgtcctgcaaccctgtggtcacaaagagtatgcgtgcaaggtcctccacctccagtgccatcatttccatgtgtcttcatcttagttagtggtcacactggcttccttctgacgcagtctttctttctgttaaggaaaaaaaaatgaatgtatcattttctttcatctttctcaagttttgatacatttctcaaattttggtctagaatgctgagtttccggaattgtgccaaatggcctagaaatgagagtacctctactgctttccctaagctcttagttatctgcccctccctacctatcacccttactccccagaaaaacaaacaagaaatcaataaccagccaatctaccaactacatccatctaaaacacgggcctttaccatgccagggtggtcttttctgttctcttcttttgtgacaaagaccctaactttgtagtgttactcaaggaccccttccgtccctacctttggctcattgatggaattagagaatgcccaagaagatatgaaaaaaaaaattactatttccaatgatcaacttggcagaactcaacaaaagccatgcaaaatgggagatgaccagatttagtctctgcagaatggcagaagttcccgatttgccatggatgttatgctcttcattctccgagcttcctcctcagagactgccttctaaagggaaggacatggacatctgctgggaagacgtaagaatacacaggagcacactacacagaaacatggacccccatggtatctgtgacactagggaagcacacatatcagtatggtaaggatggtgtgcctgctctgggaggagggtaaatagaaggctaaaatggaaaagggagaagtatactcttttggaatgagcagatgcagagagaagcctttgagaatggatccttagctgcttatgagctatgagatatgatgttgcagtgaattactaaattggcctagatataaacttaagttgatgatttttcgacacccatcctaaatttggaccccatccctaacttgcgaaattgaatcaggaatcagtttacaagctcttccctgatttccacccacccacccacacagacaataaaataagcagccccaacaagcccaggatcacaactgggagcttgctcacaggggaggtcgtaaacccactgtttcccttttgtctatatggctgaccccattctctctgccttgggggaacaagcttggctgtaaaagtctggatagaggcccaaataaaaggtctgaggaagagggagaggctcatgaaggaagaagacaaaaatcagggttcagccgactgccactgaaagtcatacaaatgaatgtcataaatataccatcaaacgggtacaaaggacatgtccggttaggtaggggccatgtgctcaaccatggctttccccgaccaaaaagtatagcccggacttctccatttctcattcatcaacctcatgcaacattcatttagctgctcatggggttgttgggagaaacattatggtcaatcaacagaaataatctcactttgtaacttagaacccatttatattttcaaaggatttgaagcatccagcaaaaaggtactaataatctaaaaggataaagtaagtagttgttggacatcagggcccagagaggacagagtttgaaaaatccgagagaggagggtgatacttccacttcccactcattgccattccccattgcagggtcaaccaaagcagctgaaattcacagcaacaaggaaaacaactaatatttattgagctcttattatgtgttaggcattttacatgtcttttctcagttttctcaaaataaccccaaaaaaaaagtagtatgttcttttcatggaagagaaagaaacaaagtaacttcactaaggttttacaactatttaagtggcagagctgtgatctgaacccaggccatttcattctcggcatcctgggatcctaaccatgtagctattctgactattgtccgtaacacctaggtggagattcattgtgatctctactgaaaactggactttggaggacaacgcaatctcacatataggaaggctggggagactgctggtttccagcatagggagagatgtcaggagacccagaatctggtcctggcttttgttatccacttgctaagtgaccctgggtaggctgtatctttctgcacttcaaattttccaactatcaaaataggagaatccctgcctctttctttaatggggaaaaggaactgaagagaatgaatatatttaaacattttgagaaaaagatactttgagataagggtgactgtactgcgggtagggtgtggaaggatgtgaaatggtaagtgactaaatttggtttatcagaaatgacctatgttgagtttacaggaaaaacatataaagctatgttttgtacctccacccacacatacttttttttttttttttttaaccatatgctactctgggatgggaactgagaatctggatactatgtttcatctctgagctttagcccttcctgggcgcacctcaattttcatgacaatcgttagattatgttgaaaaatatatctcaccaggctagcagtgggattgattttctttgtctccactttcttctctgaagtcaacttgctgactgattcctgagccattttcaatctgaaatagaaatagggaaaagacaggggagagagggaaaagaaaggaagagggaaaaggaaagaagaaaagagttaaggcaggttaaacataaacccaaatgcttttgaattaatccatcagcaatttgaaaatactgaaatgttttttcaatgcttgttattaaattcaaatcctaattaggtgtgaaggcttctctgctttatcaaaatttaattttcttcaccagctgaagcctgtttttgtgaacaatgtggtagtttctgatggatggagtactatgtgcacagagcattatttacttcagtgttatccggcttgtgatccacttagcagataatgagatgattttgaagaatgaagttctgaggaaatgtgaaactacaaatactaaaattcacgaattcacatcaattaagatgtgataacctatagaatgggaaaaaagataacctacggaatgggaaaatataaatatatgtatttttcattctgtaggtttttttccattcaaaaaatatatttatatattatatttatatattacgtatatttatatattatatttatatattacgtataacatataacacatttatatattacgtataacataacatttatatattacgtataacatataacactttatatattacgtataacatataacactttatatattacgtataacataacacatttatatattacgtataacataacacatttatatattacgtataacataacacatttatatattacgtataacatataacacatttacttatatattacgtataatatataatacatttacttatatattatgtataatacatttatatactatgtataatacatttatatattatgtataatataatacatttatttatatattatgtataatatataatacattaattatatattatgtataatatataatacattatatattatgtataatatataatacattatatattatgtataatatataatacattatatattatgtataatatataatacatttattatatattatgtataatatataatacatttattatatattatgtataatatataatacatttattatatattatgtataatatataatacatttattatatattatgtataatatataatacatttattatatattatgtataatatataatacatttattatatattatgtataatatataatacatttattatatattatataatacatttatttatatattatataatacatttatttatatattatataatacatttatttatatattatataatacatatatgtataatatagaaatatatattttatatatatatatatttttttgagacagagtcttgctctgttgctcaggctggagtgcagtgatgcgatctcagctcactgcaacctccacctccagaatgggaaaaatatttttaaatcatatacctgatagaaacttgtgtctggaacacagaaagaactcttacaattcaaataagaagacaaattataccccctcctctaaaaatggacaagggatttgaatagacatttctccaaagctgacatacacatggtcaataagcacgtaaaaagatgctcaacatcattagtcatcagaaaatgcaaatcaaaaccacaatgggataccacttcacatccactaggacggctagaatcagaaaggaagacagtaacaagtactagagatgaagatgtgaagaaactggaacccttatacactgttgatgtgattgtagaattacacagttgctttggaaaacagtttggccgttttccaaaacgttaagcacagaattaccatatgacccagcaattctactgctaggtacataaatatatctataactaagaaaattgaaaagatgtctatataaaaatttgcatatgaatgtttatagaaccactatttatagtaatcaagagtagaagcaaccaaatttccatcacctgatggaaaaattaaatgtggtatatccatacaatggaatactactgagccataaaaaggaatgaatttgctgatacatgctacaacatggatgtacctcaaaaacattgtgctaagtgaaagaagccaatcacaaaaacacatgactctatttatatgaaatgttcagaacaggcaaatccatacagaaagtaggttagcaaaactatgggtttccccatgctggggaaaatggggagttattgctaaccagtcaaagatttcctctaaaatcagatagaggtaatggttgtagacccttgtgaacatactaaaaaccactgtgtagtgaagtgatactaatgtgtatggaattgtacactttaaaagggtgaattttatgatatgtaaattctatctcaatacaacttattaaaaattcattaattcagcatgatagtatttcttacccatcaggttggcaaatgtaaacaattagacaatattaactgtttgtgaggatgcaggggaatgggaagtgccacacagtgcactaaggagaagaaattggtctagttgggtttggcaatatcaagtaaaactgaaagcatgtacactctacgagccatcaagttttcttgtagggagataccaaaaagaattataaacagacacagagctttcactgtggcaatatatgcaatcaagaaaaactacagacaacctaatgaataggttcaacagggtgatatatgagaatagcaaataacaactaacatttattgggtacttaatctgtaccaggtgctgttctacctactgtatttgaattaaacttaattttcacaactctgtgagataggaacttctactattcccatttcataggtcttaaccaccatgcaatgtgcaatgctgcttatgtactgtattcattcaacagaatagggtataacagtgagaaggaatgaactagatctacaaattcaaaaatcacaggaatcagaggcatgatactgagagtgaagaatcctgcagtgatacagtgaatagtccatctgtgatgatggtcaagagctcaggctccaaagcctgattgcagaattaattctcagccctatcacttattaactgtgtgaccctgcacaagggaactctctgtgtgccttatttcctaaaaaacatgacagtaatagtgcatgctacataggatcaataagaggactgagacagtatcagaagcatgtgaaccagagcaactccatcttcaatagaagctgggtaaaatgaggctggaaccttttgggctgcatttccagatgactaaggcattgtaagacacaggaagagacatgaggtcagcacaagatacaggtcataaagaccttgctgataaaataggttgcagtaaagaagctgacccaaactctccaaaaccaagatggccacctagtgacctctggtcgtcctcactgctacactcccattagtgccaagacagtttacaaatgtcatggcaatagtcaggaagttaccctgtatggtcttaaaaaagggaggcatgaataatctatcccttatttagcatgtcatcaaaaaataaccataaaagtgggcagccagcagctctcaaggctgttctgcctatggagtagccattcttttattcctttactttcctgataaacttgctttccctgtactctacagactcaccctgtatcctttcttgtgtgagatccaagaaccctcttttggggtctggattgggaccactttcctgtaacatctttctggcaaccacagaagggactatagtgaggaaacccctgacccaaaggctagctttgggtaaccggtggggtcctgtatcagcagtacagctccaggcaggcggtaatagcagaataaatgtaagctgctattgttactttgcatgcagtatgctacactgtgcgtataattttaaattgaacccatacatacagacatctatctgtatttatatatggatacacacatatgaaagtattcaaaatagactagaaagatactcaataatttcatgatagaggttattgctagaaagatctgggaagagaatgacactggcaataatatgccaagtagaatttcattttatctgtaatacttcatttttaaacttaaaatcttaaagaatatatgatgcatgttaatagttataattctaggtagtgggaatatgggtgtgatatgctatcttttatatttttatttttaaaatttcttcaaaaaatcttcaaaatagtaaatacttaaagatctatcaactcagacatttaaaaaatatgctttttcttccatgcttcaaataaaaatatcttacttaatattaatcacatacttgttggcatctgtaagtggctgagtagcttagctctttatttagctaatgttatacaatttgcttaaaacacacatttagtaatcccatctccctgcccacatgcacacgttagttacaatgaattcaacattcttacttgtgcactggacaataaattaattctactgttgcagtgggaaagcagccatctgaaaaatgcatcaacgaccgggctatgctatgttctgatagattttattgacaaatactggtagtgggccagatccggctcataggctgtagtctgccaattcctggactgtatcataggattcaaaatcttatgcttttggactggcaatacaatctccctgctataaacccagtttacttatcttaccttttcagacccagatctgttgttgtattcgtagtatgctggtttaattagctgagtatccttggataagtcatgtaacccccaaacctcaatttcctcatctctttaaagtgtgaataataccacacctaataacattgttgctataaaaattaaagaaaatactatatgtgattactgatcaagcatcttttccttcacctcactccacgtgttccatgacccacccaaacgacttacattctttgtacatggctttttctcacctttgcatcttgcttttactgttccctcaatgacggtctgagtcatttccatgcatgcaaattcttcccattcttctatttacagcttaagtgtcaaagtcatgaaagcttccttcatctctcttagccagaagtaattgctcttttcttaaatgacaaagcactttgtgcctctcttaaggtacttaaggcatttcatcttagaactgagtaggtgtcttatttttcttaaaccattggaatgacttagggacaacgagcaggatttatccatatttgggacctctccttgttcctttacccagcactgtaccatgctcaagtcagttcttagtatctacgtgacaaatgacatgcattgataacttttgtttttctgacttaaacaatttaaatgtttagtaaatagttataaaatgattgctttttgcatttatccttgggaaaaaactataaaaacatttagaagtgtagttccagttactgattagctgattaagtcttaaacaaggaaaaagaaaagatactcaaggccacccaaatgtgctaaatatttacacgtgtcatcttatgtatagattccaagatacttaaaagtatccacattactttgcccacaaggagactaagactcagtgaggttatgtgactttgtcccaagtctggaatttatttctcccacttaggaggtaagggctttttgcatttaatcaaagaaaatttgctggttagacagtttctagctgcatacacgctcaacctcctcattgtttgtggacttgtttttgtttctggcctaaatgttggctctaatgtccatcagtagatgactggacaaagaaaatgtggatcacatacaccatgaaatactatgcagtcataaaaagaatgaaatcacgtccattgcagcaacatagatggagctgcagatcattatcctaagtgaaataactcagaaagagaaaatcaaatactgcatggtctcacttataagtgggagctaaacagtggttacacatggacatatagagggaaataacagacgctgggggtggggagagtggggaagacagtgagggtcaacaaataatctactgggtacaaggttcactcttcaggtgatggatacagtagaagcccaaaccctgccactatgaaatacatccgtgtaacaaacctgcacaaatccatgtacctcctgaattgataaaaacaaaaaaaaataaaggttatatggcaatccttacaaaagaatttggaaatataggaaacaaacaaacatatcagagaaagaaaatatatattctcaattgataaacgtctcagtaaaatttttgaaaactttatcttttcctctttctcattatcatgcatatgctccctaaggagttattgggagccccagtaaataccaagtgctgccaaagactactgaggaaagacacaagtgtaagatgggaaagtgagtcatgtcctctgatgttcttgcctagtcttgactctgtagaagttgactgtaacctggccgggtgtggtggctcacgcctgtaatcccagcactttgggaggccgaggtgagtggatcatgaagtcagatcgaaaccatcctggctaacacagtgaatccccatctcgactaaaaatacaaaaaattagccagatgtggtggtgggcgcctgtagtcccagctactcaggaggctgaggcaggagaatggcgtgaacccggggtcgggggagcttgcagtgagctgagattgtgccactgcactccagcctgggcgacagagcgagactctgtttcaaaaaaaaaaaaaaaaaaaaaaaaaaaaaaaaaaaaaaaatagttgaagtggcgtggctttccatttagagatttaggctccccactgttatagcctcatcttttgggaaagcctatgggcatactgtgggctttctacaggttagaggcatacagctgcagctaaatcaagtcaattttcagaatctagccatctgtgagactgaggaagtaccaagtctttattcttttgacattcagtatttcactggtttgtgttgtacaaggcagaagatactgaaatcattatgaagtttgtaataacagaagtgcttttatttttgaccacagggattgagcacaccagccaatcaagagataaatgagatatggaggaaatggggcagataagagtgttcaggctgctttacactccttttcactattggaaaatccaatagtttggagcagtgtttgtaaactatttttcaaagagctttaaccttcagcaaaggtgtttcagggagaagaggcagaattaggggatcctccagatgccaatgttggcaagctctgcttcagttagaaaagctttactttgttttatacattgatgatttatgtatgtttttagacaaaaagaggtctgcttttttttttttaacagaactttttgaagctcctagggggaaaaacaaaacaaaacaaaacaaaacaaaacaaaccttcctcttcaggagaaagacaacagaagccaacagaaagcttcttcctaaagaactgtctatgaatatcttagaggtagacaactgatttaagaagaccaaggggatgattcttctgacagccataaccacaagatttcagattttgggctccagtaaaacatcaaatctacaaaaatcacaacatggccagctttcccactctcttctgcttattactttccaggtaagttctaagcctgtgagatcaccagtgtctggcaaatacagacaggcacagtggggacagatccagatgaaccagactgtggaaataagtggggcacccatttatttccctctcataaaggcagagattgcctcacatttcattatgattcattttatttatggtcttttctggaattttgcttgagttccctgatttctgccctatgcaactttccaatgtctatttgcctcctttgcttttaatagcttcagaatgaaaattaaatagagctatcttattacaccttgcctatggcttctcccaacttaattctgtgactgcaattaactttttttggaggggggttcatctgctcatcctcgtttcctttctttcccattcaacgtatctgtgtgaactgtaacaagactgtcaacctgttaacttttgagtaactcttaagtatgatgctaggggtgtgtgtgtgtgtgtgtatacgtacgtgtgtgtgtgtgtgtgtgtgtgtgtgtgtgtgtgtgtgtatatatatatatatatatttttttttttttttttttgtagagatgaggtttcaccatgttgcccaggctggtctcaaactcctgaactcaagcaatccacctgcctcagcctcccaaagtattaggattacaggtgtaagccatcaagcccagacaaaggctaagttatatttataatgaaaaaaaggaatttaggctgatgactggcgtctggacacaacaggtctcaaatcatggttcaggtttgggtttacactctaacctatggaattaattttagtgtttaaaaataggtaactggcccctgaaaattagcgttatcttttaaacacctatgggtgatatgttagaaattctcctaaataatatgattggttcatttcagtcagtacagaaaatacaatctggtaatactatcagggcatttttgttaatacattacttgcttttgtattgtagacaacaggaccaagaagtgacttcaggagcagaggaataaacttttggcctctaatgctactagctttaaaaagaaagccctaccagctacctagtacagtgtgactaaaattaatcaccgctcgactcagatcatgtatgtttcttgatccaagccattaaaagttaatggctttggaaatattggcagacaaaggcaaagaaaagagacacattgagggaatatggttcatgaaaggcatcttgggaaacacatgagatctgaccagctataatatgaatctctttaaaaaaagattttaatatcactcgttgctaaagaaagaagataaaaatggtctaaaaaatggatacggtatgctctgtgtgccaacaggtaatgtgcctttaagtcagcatgccacaggaaatgtccacgttccctaaaaagtaggatgataaaaactgaaggtccaagctgctgcaccactggacttaccctaaatgtaaagacaggagttcagaatctctctaataaatgcaagagctcttcattctcatgactgttcagaaatacatggacgaacatgataaacaaaggaacatgcaaaaaacacatttttaccactggctcagtcaattctggcctatggtcctttggaatggtgaataaggtttccgtggtataaaaaaggtattggccctcactgtagatcacacctgtaaaataaatgactcaccagtctgactacccaatatagctttgctctaccagtcattatcagggacagcttctatgagcaaataatgacactcttatggtctcccttcagaagaaaaagtcagaaaaggggtatatagagcttcaaggatgaaatacaaaaaggagtgaatattcactcctttgccatgatctccttgcagctttgaactaagtcacatcaggccaaggcacaaggaataacatatagactttggggcatcagggaaatggcttccttgcctcagaaagctcaatatcacatggtttatggcattttgaatagagaagattgagggcaacgttttgatctttttctcattaggcttacctgaaacatagatggtattaacgccataagggctgttttaaatatgctttcagagggatatggctgtgtccagccatccctccaaccactgcctggtggcctgaacatcagaagtaaggctctgtccactctatatagtttgttcaggtcttttgatactactcgagtctatacaaggtacagcccccagttcccagagcgaaattgtttctccaggcgaaaacgggctaatgtccaactttgattctaaataagtgagatcgtagagacctgaccagggctgtgaggaccactctcatttctatccatcttgacaacagtcactcacgaggcatttctgaattcctgacataactatcgcacgaggttaactgctataaaagtcaatgaaataagtaaagtcactccctactgtaagaaaaaaacaacaacaaactcattaatttctcaatttaaagggaaattttttccttgctgcagcagctgatgaaaacatcattgactaggctatgtggaatgtttccaaagggtagaaaaataaaactaagagaaaagagccataaacagtaagaaagaatgggtaaccccaagttcatttatcccaggcaggccaacaaggccacatacttagacagacacactcttccatgctcattttctcttcagagtctgaccttcggccctgaccgctctggcaccgaccacctcctgtgcctcccaggtcagtttcactagcagccatgataaaacagaccagcaggaaagtaagaataccagcagaaagtaatcttaggcttagctcctaacacaccagaatttagcctttaaaagttattccagttgggcatggtggctcacacctgtaattccagtgctttgggaggctgaggcaggactgcttgaggctaggagttcaaggccagcctgggcaacacagcaagaccctctcaactaaaaaatgctttttaaaaaatgagttgggcatgatgatgtgtgtctgtagtcctaactagtcaggaggctgaggcaggaggatcacttgatcccaggaattggaggttactatgatgacaccactgcattctagcctgggcaaaagaatgagaccttgtctcttaaaaaaaaaaagttattccatgataaattagcatatcacttctactttgtccaattgtgtactttgtcaaatctaaatctgacaattttccctactctattcctaagatattttcctatttaaaagtaaaaaacttctcttagagactgcatgcatttcaccagctacacagatcagccacttcatagtttttgtgagctatcacttgtatacccaaacatactttgacttcaagtgattaattgcagaacaaagtcctcttccgtttgcagagcttctcccccaggacacaggggagttgaagttggggagccctggacttgccctggaatgcatgatcagttaaagccaatcactctgcacttagtagacataacacccagagccgacccggcgatttaggtgcagagtgaaaggtaacagcatcgcattcatttcctcatttagggagagtagtctgggagacagtttgaaaactgaaatcagccctgtgtcataaatttgcaaatttaattgaaatgcattagtctttggaagacatttccaatcccgataatgaagacatgcatgtgctagcagatgcaagctcccccttttggttttgaaacctctaccacctactgagtctcaccaaaaactagcactgagagcctgtttgcatgggtgactggaacaaaagggtgaggaaacagggaagattgtctggagtaaggagtctctctggcgcccctcaaatcattctacccaggcagccccctgttgcatctctgcccaaggcaggagctgtcaggagtcccacagataagtaatttagaaatattctaggctgaatgaaggagacatactttaggtttccattgttctctgccaagctagggaaatggagtgcggacagatgctctctaaggttttgatttgagctccaaagaggtttgaggcttggcatagccatgaatccaaaggatctccacttccttctttttttctaaacaaactgaaagtaatacagtcaagaacagagctggcgattgttttattccattaactaatctttcttgttctgaacatgtctattctctttaacaaagctattaagattttagattcttgggcaaaagcaacccatatgggatacatttagggacttctaccaccaaaacccaaataaacaagatttttcatctatcagcagcagacagcaaatcttgcaatcaatttcaacatggcaaaaggaaacacaatgattatttatttgttcaacaaatactaactcagcatctactatatatatggaaaaacaaggtgctacagagaaaacaaagtggtacaagacattgtaattatcttctaggggcctatgatttatctaaaagagaaagtgcctataaccaaatgaataaaaaaccaaatcattaaatgacaaaactgaagatacagtaaacccccaaaattctggagatacgatagctcacacagattggagaaagcttcatgaaggacaccgtatgtgatcaataaatttttccagaatagtttcatagtctgtatatcacttgagacataatatttttagattataccattatgtaaatattatagtagttttaaagtagagtcacacactgcataatgacatttcggtcaaagacagacctcatatatgatggtggtcccataaggttataatggagctcaaaaattcctattgcctagtgaagtcatagccaccataatgttgtggcacaactactttattataaaaataaatttagtgtagcctaaatgtacagtgtttataacatctacagaagggtacagtaatattctaggccttcagattcacccaccactgactcactgactcacccagagcaatttccaatcctgcaacctccattcatggttaagcgccctacacaggtgtaccattttctatcttttatactgtatttttactgtaccttttctgtgtttagatatgtttagatacacaaataccattgtgttacaattatattcagtacagtaacctgccgtacaggtttgcagcctaagaacactaggttatgccatacagcctaggtgtgaagtaggctacaccatctaggtttgtgtaagtacactctataatgttcgcacaatgatgaaatcacctaacaatgcgtttctcacaatgtatcccgctagttaagtgacacgattctacgtgtttaaattaagtgctgcaaatttatattataggaatgtgcaaatacacaagagactggagtagaccaagcactcaaaggaggaagcacagaaaagaaggcagttaggctgatcccaggaataacactgcatgattcctccaaacgcatgttcagtcacccaggtccgcctctttatgtctatgtagccaaattcatctgctgtcaatgcccagctcattttctacttaaaatcacaggaagtcagggttggaagagaactgcaagatcacctgagcccaggagtttctaaacttggctgaaggatcactaggaaggtgtcaatctctgatctccaaagcctacctggtacatgtaaacaagaggatggtgaagccaaggcatttattaaggaaactaaacacaaaatgtgttcttgctctgccatctctgtggggagtttctaaaaccacagatttctagactctacactctggtattctgattcagtggatctgtttacatttttacaatgacctccaggtgacttgggagatctgccaggtttgggagctgctgatctctaacactgccctactggcttctgaatctcctctaaaactatctgcttagggtggtcctgattatggctaagtgtcttctcaaagctccctgtagcttccacatttcctttggatcatttcttcctccaaactcttacaccagccaagatcttcaatgctctttcaatatccagctgtgcgctggagaatgcaccatacaagacacagcaaagaacaggcttgtgtcctagaagtggaaagatacacataaactgctaaaataacaagttggaatgaattaaatactaaaggatcgtaagaagaaaatgctgtcagagcccacaggaaaagctaattcttttattaagggagatttcagaacatttctacagaacctggtttctggaggcagcccttgaaagacgactctattttgatcagcaggaaataatggggggaatgcggtatgaagaaattatccagtgagaacacaaggaaagaaagtgcaggtgtgagacagtgagtggtcatagtaggtgcagggagggatgaggctataggaaatgaggctaaagagtgagtttagggcaggttctcagagggccatgctataatttgggagagaatatgaagttcttgaaagaactcaagctttagtgtaaaaaaaaaaaaaaagacctaggttcttatcctcattctgtttattaatgaaactatgacattgaaaattcatttactctctcatgcttagctgtgaaatagcaataaaccttttttttttttccttcagggctgttgtgacaacttaatacattaataaattaaagtaccatccatggctaattatctttcctttatttcatgagcaatggaaaaccacagaatatgtttaaagagataactatgatctaaattctgttttggaaagataattggatgcaatattcagggacacttcaagaggaaatagaaaacctctaggcagagagaagagttagaaggatgtttcaataatccaagtgagagatgatagagtcctgaatcagagcagagacacctcaaatacagggtaaagaacaatcaccattaagggggcaaaactataaagagtcagaaatagatgaaaaataaatcttgtagcagtaaaaataattctcattccagcctgccttttgctaataggaggaggatagtgttgcaattgaaagttagggagcctaagaggaataggccttagttgagatggaataatttccaaccgagacatattgaattgcagatgaaggctgggtatacagtttaatgtgcagtaggaaatgtaggtctaaaacttgggaggccttggcaatgaggtgataggtgaagctgtgaaaatagttgggactaacaaaacagagaatagagcagaaaagaggaacactgagatttaccttggggaaggcccacacttaaggaacagaagaaacagaggaactaaggagggagatgaagaaggggagtagtcaccttcgcagagagacccaatatattatcagagcaacgaggcatttcgagatggaggaaactaccattggtgtcaaaaactagcagtggcacactttgggaggccgaggcgggcagatcacgaggtcaggagattgagaccatcctggctaacacagtgaaacccagtctctaccaaaaaaaaaaaaaaaaaaaattagccgggcgtggtggcagacgcctgtagtcccagctacttgggaggctgaggcaggagaatggcatgaacccggaaggtggagcttgtagtgagccgaaatcgcgccactgcactccagcctgggcgacagagcaagactctgtctcaaaacaaaataaaacaaacaaacaaaaaaaacccaaaaaaactagcagtggcaaagaattagttagaaggagtcatctgatttcagttaggaaatgtgacacagtctagtaacaatctcaatatgcagttctcctgcttcctttagtaaaggaaaccatgagtctttagcagggacatggctcccagctaagcctacatttcctggtctcccttgtgtatggccatgagactaagttctgtccaatgggataaagtggaagtgatgtgtgcaccttccagctcatgctatttaatattaaaaggaaaggttgtgcagtccccttcccactggcaggaactcagcagcaatggtagcagtagacctgacgtgtgcccccttacacgttgggaataaggaccttaccttaaggacggcaaccacaaaagagaagaaaactgggttcctgacatccaaactccttgcattcagattgttatacatgaggaaaattgatttttcctttgtttaagcaacagttattttggcctctgttatggcagccaagacgttatccttactgagacaggaaggagtgtgtggtacgaaaaaggaaataaggaaatgaacgtaaatcattcttttaaaagaagttagaagggaaaaggagacggaatgatgctttcagagagagggccaagaggtgtgtatagttttttaaaccaatgatcctataattcttacagttttttagtttatcctctctccttattcatggcatatttttaattttgcagatgtagttttaaatttattgcttggggaataagcagtttttattatttgtgatttctttttttcttttcttttttttttaaagacagtctcactctgttgcccaggctggagtgcagtggcgcgatctcggctcactgcaaccttcgcctcccaggcttaagtaattttcctgcctcagcctcccgagtagctgggattacaggtgtgcaccaccacacccagccaagttttgtattttttagtagagatgaggtttcaccatgttggccaggctgatcttgaacgcctgacctcaggtcatccacccacctccgcctcccaaagtgctgggattacaggcatgagccactacgcccggctgttctttgtgattatgacaatgttgtttatcagttaggtcttggggcatttactgtttgtgtatttgcacagaaccattttcaaatgtgatttaggaaaattcaaagttttgacaattaattagggggtgattgtattattaagggatttttaaaaataagcagctctttagtggttaaatgaatacaagtcatttaactacataacacagggcaaggaaaagaaagttaacatgttacaagttactgaaattatcatgtatgtatgtcagtaggaaagcagaattcaataaataacaattttatttatggagctttttctaggagtaagtttatcatgtaaagaaaagaattcctgtagtgtctacactgcagtcagtggcttgtggattgagtgacagcatctctaagtccccagctcttggtcctaaagtgacctgagcagtagggagctctgagaacagctttcaggatagcctcacaacagctttgaactatcttctgtaaagggtacagcagttccataatcacccataacagcagcaagtaatagacttaaaacaaaaaccctattggtaggtggctgggtaataaaaaaaacagccccctcgcccccaaaagaaaaaaacaagataactatccattcccctatggtgtaaattatagctatgtgtgtagtgaaatttcttattttcatttcacataaaattcaccaaacttctaattcactcattacttacccattatggggtttttaaatggcacttttaaagtttgctttggctcagggtgaattatatgcccagactttattcctggagtcatgactcccgtaggccttctgtaccttttgcaaattcaaagctcattttgtgggaggcagtgcttcgtgtgcatgcgcgggcatatgtgggggcagtcttaggatatcctaaatggtggaatgttttgtaagtaagggtcctatcacccagaataattcagcagccaaaaaaaataaaaaataaaaaataaaaaagagtaaagaatagccaataaaggtatcagcaaaaattaggttacctacttgcagttatgcatatacttggataatctattgatttaacaggtggaagaaacatgtgtaccaaaaattcattgaatgtttggatatcatgaggtacaaatacaaaagtgcattaaaaggtaaaagtgaggcaaagttgcttctgaggataaaataaaccttggattatgatacatcgtaaatgcaatgttggatacagatgagcagagaaaaaaacgttttgtgtacatgctccataaaaaaacgtgatcttcaagaacaacattaggatcaggcgtggtggctcatgcctgtaatcccagcactttgggaggccaaggcaggaggattgtttgagcccaggagtttgagaccagcctgggcaacatagtgagacaccgtctctacaaaaataaaaaaataaaattagctaggtatggtgatgcacacctgtagtcccagctactcagtaggctaaggcaggaggattgcttgagcccaggaggtcaaggctgcagtaagctatgattgcgtcatggcactctagcctgaatgactcaaaagaaaacaaaacaaaggccaacattagtattttatgagaagaactgggggttcaggtgaggcaaggtagctatagatgtttaccgatttcaagagggcaatgaaaattctttctggcacctaatctctctcccaactcacctgcaagtccttgcttgaaatatcttccaatatagtacctatagctcaagagcaaaggtgaggggcactatggcagaagggaaacacacagctcctcagaaaattagaaccgcagtttctagattcatagagattttgagctagaagagctcatagtcaccatttaattcctgcttcatcctgatacatacattttacagatgtgacaatcgggttcccagtgaataagtgactggcccaagatcacatagccaattaatgggggtgggggggtggcagggtgaagggtaaaaatgcctgttttcagctctctgtctccaggtctttttttacactgctcagcactgcacatattcagaagggataagagaagggactgggatgcttcactgaaagatgagtcctgataccaggggcagcacgatgactgagtgggtcacagactgcacgtctagaaagtggcgcttttggatttgtgcctgggctcagaagtttgctcttttgcttaagattggcttgaatgccaaggaaaattgaaagccattaatataccacgacacagtagattactcttccaaagatatagttaatctccaggtaaaccatattccccagtgaaatattgttccttctgccgaaccacagagttgtgccctgacaccagtttaataagattattgttcactcacaaggcacaagaacttaggacatttttatgtggtcatttgtatgttacagattattctggattttatgaggggaagctgttatcttgttatgaagatgcattcatctcaattttgtatcaaactaatgtgtactcatgaaaactacctaagcaggaaaagtaaatattcaccaccacctaaaattaacctccagtggcctaagtagttttcaacacttccatttcatttggaagtagaatttaaacaaaacagtgttttccatgaaacctgtccctttgaaaatgctagtactgattcttaatttttccaatgattttgagcacttagttggccttccaatatatttaaaaattaagtgagttgaatttttctgatgagatcccaaactagtttttttctttataattacacatcatcaggtttttattttggttatgaattttattttttaggatgcccttgttaatgatgttatgttgtctcctgatgtttagtgttgttgggatatattcggtttctggggaaagtataattgaaactataatatcaaatatcattaaatagatgtcaaaacaaagcaattatagtgttcctcatttaatagaaaaattccagttaatttgcttattttaccataatgaatgtgtgattctaacaggaaagaagctaaaatctttagcagacagagaacactttaacaaagttctcactttaggattttaagaaaaccctggatatcaagcagtttgtttaaatggttgaggagtaatatacataatgtgctaatatttcttaacacacagattttcctaaccatgctgctgcctccagaaatatcttattagccatcatcaactttcagagatgttgttttagggtagaaaccttggtgatccatcctcacagagcatggctggaatgaagggtcccctgaaactgcgaaatgagaagaaccaaaaagggtcttgtgaggtcatgaccctgtaaaggggttggtttacagagtgtgaagcaggcaattcaacagctgcacccaggaagcaatgccacaaacgcccgtggctgggaatcagagatactgtcattttgaaggacttctggataccacctctatgacagactcacaatttctttgatctaacttctatgatacagaacactctttaatgtggaatacagttatttcaacagaagatcattaacatataaagcaattaattgccttctctgttggtcttttgtttgttttagaccatttttagggccccaaggacaaatatactaaggactgtgctcaaaatctgaggtgtaaaaattcttaagcaaaagctgtacattccaggcccactgtgggatgtcccagcctcaaggtgtatggacctggagggcagactggccagctcctatgctgttttaagaatagtattttcgtatgagaattgattccacagaaacttattttagcttactttaaagggctaaataagtgatggcagggcaagaactatgggttgggtgccaagatttttaggattttttttcatgttattatcaacgacctattttctcaacaatggtacttttctctgcttcagttttatctatataatggatatattcagtttaattcccatgttcccaaagaagtactgatgggaagatgtgttgataaacacatctttaacttccttggaaagaaagaaggcctttctctttttttagctccctgagaaaatacttagagactaatactaggtcaaaaatctcacaattttgctcctcttactagtgttttaaggtgaaatatattagggtaggttgtgatgtgtctagaaatatattatgtatatatcttttctttgattacaaagtgaagaataaaaatactgaattatggaatgtcaggcctcacaggttagtaaaaggtagatgctataatgaaatatatcattttccttacgctgaggaattttttgtctccttccactctgttttgaatgccattcttatacatctgttccacaggagtagtagtaagacctgtttgaaatttaaatccatgacaccccttccataacagtggcaacccaatcacaaaaatgatcaggcagaaatgcttttttctgataaataggggcaaattcaatctctctaaggaaaacgcacacacacacacacacacacacacacacacacacacaccccgtctatattcagagttgaggtttttcttctacccccagctaataaaatcgggggctgcaacgaggctgagcggcacgcagtttgatgtccgcagcaggatacagggagtcagaagtggcgctgtaaatccaatgcggggcttccacgctgtgtgaagtgtggcctgagtcacagagattttcctttgatgcaagttcagtatattaatgggaaaagcattcacttttatttgtctatactgtctgcgacagcaaggctgcctcatttagcctgggccaacatgaaaatacacagagaagcaatctgttgcaaattagcacaaccctcctttcatttactagctagtaattggaaggggttaagaaagtgtaacttatcagatcatgtgagcatatctgcctgtgtggacagcaagctttccccgaatttccctacgatccctgaggcaaaaagtccttcccctatgaccacttcatccgaaagaaaacatcgacaggtgtgaaatagacacactttgataggtttaagagtgcagtttcctaggctcctgaaggaggcattaaaatctttttttgaaccttacctttctttagatatgtttttactctcccgtttccaaattgtcttgaagtcactgcagaactcataccacaccataaacacgtagctgggtgtgatctccttctcaccagactttggcttcatcccaaaatatcgtactgttgtttcaaaactgcaacaggtaggggggaaaatggaatgaggtagaggtgagaaattgccaacactaaaatccattagaggggggatgctgggggcagtttctcttgtgtttattttgtaacacagaagctgggggctcatagttactgaagtttattgtaaacctcagaaaatctatttgctcaaactgatttgccaaaaaatggaacttgattgggatgctcctgggcacatcttatctgtataaaatcagcatgtataatttctgggggtgtgtaggtaaaacgtctcgagtttgttcttcatctcaaatccccgtctcttccctgctcttcattttatgtttagtgattacatgcaaggtggatgacacactgactgcagcattagcagcggtcagttcgatagctcattgggaataattaatctgtcaaatgtttcacaaaaaagcaagaaaatccattctatcctttttcgggcatatactggctttgtaatcttgggtcaatcactcagcatctttgactctcaattttctcaagggtaaaataagagatgtagatgatatgatcttcaggagggctaccttttaaagcttaatatgatacaagaatacaaaccactgatgtacaaaaacagatacagttgtaggcatagcaagttttggatgaaaaaccatttctgatcttggaaaaatgatctccagtctggtcagtaaagaatcccaattttccagagtggattcccagatatcagtaagacctatcccagcaaggctcactgcacaccagactacctgggcctcccaagcagcccttcttggaggcactagctttgcagcaatttacagctttgaactcaatctttccccctcacccccacctaccccaagcctcacaagctcatttgccatgagcaagaacacttaaataaatgacccccttttctagggtgttggaaactaatcaaagcaggaatggctggccaggtttattactcaatgctctatcatctgttcagacacagtggttttttttttgtgtgtggccatcctgaatactgattttctaatggaactctattcaatggcgattgtaaaaccctgaagctccgttactattatggagcatactttcatctcattctcggttattgggcaatatgtatctcataagattttatcacatttcacagatgaactgttaattgattccatgggtacgattaggcgagatccaagctggagctgcagctctgagtcccataaattctttgtgcttctgtaaagaataaatctgtttttaatgcaaattaaaactactggtcagggaattttggctcccagttattaaaagactggaaatgtgtaagtggagaaaggcaataactgcagtaatctcttaagggactctattataattccaaacatacataatgttgagaaaaaccgggaagggaagaatgtggcaatgtccactcttgccccagacataacccttatttccatggcagtccaaacactggtaaaaccaaatgtacactctatagcatgtaactttatttcactcaaatgaaaattattttgactatagcatgggaatacataagtagagagttatataacctataggaacaggccattcatttcctacaaagtcacaggactttagaatgggaaggaatttacaggatgacttgcccaaattatcattttataggtgacaaaacagagacctggaaagactgtgtggcattattccctggtagggttgggcctggaattcaggtcccctgattttctgtgaaatgctctgtctgctttatctttctgttgctcatgctcaataacacaggcatttaagagacaaaatagtcgttctaccccacccttttctactttagacacaggtgtcctcctctgtatcacacataacatgcattaccccagggagggcatgtgattattttttctctttcttatgcttaccttctatacagatacatatttatttgagcattcatggggaagggaaagtctttcatttctagtatttagagggacaacttatcttctgattttccagcaaaatatagtgaagtccagttattgtgcttcatggaacacctgacacctctggcatcacctggagtctagattgtgagatcaacatattgcaaatcctggtgcagtttcagagaatgtcaagagtgatttggtggttgttgcacagcctgagaaaaacacatcatcctcctgtgggcctcgattttcccaactctaaactgaagctaaccattgccctccttgcctctctccctggggatttgtgaggtactgcttgcttactctccctgaaagggggagaaacactaaaaaaaatactaaatttcagccttttttttcttatgtgttttggaaactaagaaagcaagtgaacctcttcagaagaaccaaagtacacagactcccagaggatggcctggctttggcactcagcagcttagacaaagataaagtcgcttcaagaatgtgccttatttggccgggcacagtggctcacgcctgtaatcctagcactttgggaggccgaggcgggtgcatcacgaggtcaggagatcgagaccatcctggctaacatgctgaaaccccatctctactaaaaacaaaaacaaaaaaacaaaaacaaacaaacaaaaaaaaattattcaggcgtggtggtaggcacctgcaggcccagccactcaggaagctgaggcaggagaatggcgtgaacctgggaggcagagcttgcagtgagcccagactgcgccactgcaatccagcctgggcgacagaatgagactccgtctcaaaaaacaaacaaacaaacaaaaccagtgtgccttatttgatttcattgttattccactgtttaagaaaatgctaaaagctagaatatgaacctgcaatggtttgataaggcctagactgttgtctttcctagacaaaactccattttaaattcagttttgattcacagagattgaccactgaaaatcttttgcaatttggacaagaaaattgttgatatttaacaaccaggagaattttctctaatatacaggaaacaaaggtcaatcatgcgatttgaaatttctatttgttagcagatagctctaaaatggctctcaaattttagaagattgatttctaatcctatgtttggttttatataactttttcatttcatgcaaactagtccctgaccccttttctctctgctataattccctgtctgatttgtatctttttaattcagccaaacatttttaaagtacagacaatgattacatcaaagagcctgtagcgaagtgaactgttttacttttacagtcctgagatccagagcggaacacatccacttattgtcttacatgcatgccttcagaaactgcttaggaaaagcaaatatgccttagcctcagagtaaattgtttctcttgagaataaaacataagaattcactaatctcacacaaatattgcaacactgaccacaacctccttaaagagtataaccaaacaactgtggtttctacattaaagatgggatctaacatatttcatgtatgacatgaaagctagactaccttcaccacaaagccacggaaaacgctgacaaccagaatttatgactcccctccacagagctaatgcacggcagcagtttcggcccctccacgctgggcccccttttccttcagcaagaatcctgaaaaagtattagaaatttgacatccgccccagaagctgaatttctgtttggcctgacaccaacgtgcccttgttgataatctcttatgtgctggatgtttctataacacagacgtgctagttttatgcattgtgaagggaagcttaacataggaataaggtcaatagagagacacaaactcctaaaaacatagccatggaattatctcagttttgaatgattattatgataggatgataagcacgatttgagaatatgtctgtacttagcaaagtgcaagacttgccttcaccttgctttcaccagcattttaatcttattggtaattacagtgggaagcagggcaagatgttggcacctgtgaaagcagggcagatggcaccgtctatgggatttcagaagtctcggaaattgtggctagacaggaggaaaatggttaatttctacaatctgtttatttgcatttaaattcctaactgggtaactgttcctctcacacatttgtaaagctcatttgtccttagatgctgtctcctacctctacctgtcatctaatttaccagtacttttagaattcgtaccagcaaaatgtatctcaaatttcagccctaaatatgagaataccgctgtctattgccactcactcttctatgagggagggagagccacactgactaacctggtcaactaacaaaaaggaaaaagccctaagggatgagaactgctgatgattaggttccactgggtggagtgaatggttcccatgtgatatctattgagagagtgagcgagcaagaagatgcctgaagtgggtgacatgaatctgaacagaagatctctgaggtgttccccaacttctgggggaaattgtccatacgctgtatgggcatatggacagccccttctccccacctgaacatatggacagccccttctccctacctgccccttgtttataatatcctcctctagaagctgaggaaagacataataagtctcttgggtgtctgcaataattagtttgatctagttgtaatgccaggaaggatcaaactgtccctgacttccatcaagcggttcaggagcagagcaatgcaggacaggcaaacaggcagaatagtgtcatgacacgcatgtgaggcaggtgagtcacttctggatgattcctcacttcctgaggaaaaatattcctaagtcctgctacagtgctttcactccagcttccaagtgaagcttattgcttatggatgcatagtcttaacacatggggccgaaagtagggctagtcaaaccttatgctacaggaaagaagtcagtcacacaaggacaaatactggatgaccccaattgcatgaggtagctaaagtagtcgaagtcacagagacagaaagtagaacggtggttgcctagggacaggggagtggggaatggggaatttgtgtttaaagggtataaagtttcagttggggaagtaaaaatgttttggagatagaactgcatagcaaaatgaatgcacttcataataataatacaaaagaatggctagtcaaagaaagaactggggccaaatcagagctgcttaccttttctgtgcattctccaagtgactttcttccatcttatgctcttttttggctgtaaaagataaatcatgattaaaaattttttcttctgttgtctcctttgcgtaatcttacagcttcaattacacccattcattaccacaggaggtctgaattcggggggggggggggggggtagcctgtaacacatgtcctggcaataacactcaatttgctttatttgctaccactgctttttttttttttaaattatactaagttctagggtacatgtgcactacgtgcaggtttgttacatatgtatacatgtgccatgttggtttgctgcacccatcgactcgtcatttacattaggtatttctaatactatccctcccccagccccccaccccccaacaggccccagtgtgtgatgttccccaccctgtgtccatctgttctcactgttcaactcccacctatgagtgagaacatgcagtgtttggttttctgtccttgtgatagtttgctgagaatgatagtttctggcttcatccgtgtccctgcaaagggcatgaacttacccttttttatgactgcatagtattccatggtgtatatgtgccacattttcttaatccagtctctcattgatggacatttggcttggttccaagtctttgctattgtgaatagtgccacaataaatatacatgtgcatatatctttatagtagcatgatttataatcctttgggtatatatccagtaatgggatcactgggtcaaatggtatttctagttctagatccttgaggaatcaccacactgtcttccacaatggttgaactaatttacactcccaacagtgtaaaagcgttcctatttctccacaccttctccagcatctgttgtttcctgactttttagtgatcgccattctaactggagtgagatggtgtgtcattgtggttttgatttgcatttctctgatgaccagtgatgatgagcattttttcatgtgtctattggctgcataaatgtcttcttttgagaagtgtctgttcatatcctttgcccacttttcgatggggttgtttttttcttgtaaatttgtttttctttgtggattctggatattagccctttgtcagatgggtagattgcaaaaattttctcccattctgtaggttgcctgttcactctgatgacagtttcttctgctgtgcagaagctctttagtttaattagatcccatttatctattttggcttttgttgccattgcttttggtgttttagtcatgaagtcttgataacagacatagctaatagtggccaaataatttattgtttcctctgggatacttttgagagtaatgttaataattacacctaggcaaagacataaattagggaaatcttgggtagatcacgacatgtggtccctcttgcacgtctcatcatgttcccccttactctaaacattataaatccagtagcatttgcagcagtgctgctcagagtcatgggaatcttgccgcatactgcctccacacccacaggcccttttggcagtctagggaagcccatggactcttgtcagaataatgttttcataaggttactaagaaaatcagtgatactaagatacaattctgaatccacaggttaagaacctatgttctttctataggattatcaagaggtttcattttggggtggttcttttatatatccttctctacaatcagaagatatattattatatatgaaaataccactctcacactttaaaatatccagaaaaataggaaagttgttaacataagctacaacataagttgttatgttattatgtaacatgttattatgtaacataagccttcagattcctttaatttagggctacaatgatgtaaaatgaacgaaaataagtaagtctcgtatctaggatctatgctgtgatacttcatgaaagataagggattttgaaacatcacccttttattaaacctggccctaccacttactatctgtatgactttggcaagttagttaagaccaaatgcttagttattgcctcatctgtcccatgagaacagccatagtgaccattatcatacagctgctgtaaagatttaatgagataatacatgcagagtgcttagcacataatgtgtgctcaatataggccatggcaggtattaatactacattaccataatcttcctcattgattttaaaatgtaaaggctcccctgctcaaaaccttccaatggcttgtcttgccatcagccttgacatagtatctacagtcttcaaaatgctctagaaggccctgcacttaagtcggctccctggctgtttggtggcattacctcctctttcccacaccccttcctttccagcttcgctggcagctgcctctggcttgagcgcactgagcgtgcacattggaggatctttgcacttgctgttcctcctctctgggacaccctgaccacagtctgcacgatgggctccctcactgcattgaggtctcagcagaagtatctccttctccagcttccgtaaataaaagaccatcccttgccactcatcatcttcctactacccctccacacacaccctctacccctaccttccttccatagccttcccacagcctctatctacctaacagactattcctttcctcatgtgtttatcatgcaacaactgaatgtaagctctaggagggcagcagcttcacctggcttgctttctgctgtagccttaattgtagaaaactggctatatgttaaagcaatcattttagcttaaaaatgcatatattggataaagcttgcttaaaaagagatatactggctttcctgaaaaaactttatatttagaatatgaacataagctaaagaagattgagaggctaatgttgtataccattatctctaaatgtagtatatttcaactagtaaaacttattttgttttatattaaaatgattcagctttcataagtgcatcattttaggcagacggaagccatggccagggccatcttttgctgtctgatgtccccccatactcttggcaggaatttctgtgaattagtctggtacttagccaatcagatactgagaaatgacctgtgtctctcctaggttatcaagttccccaaaatgtgaaacaaactagtgatctgttcttctccagtgattttaagttatgtgcatagccaaacaggaggaaaaattcctctgaggcccgagtgatcttcttggaccagctctgctctctcagcagatggtttctaactggctacttccaagctgtgtgtgctaagcagagtgtggccaagccataactgtatatgaatttagtgacaagaaataccctattcaaactgaattgagcatcaggtaagattttgcaatacctctgtgaatatggtgatttggagaaacagagtctaaatgtaaaaagaggtattattaagagccaatgcacactgcagaaaactctgagggtttagggaaaagggccttcaggaaaatgagaagaaattagagatttaaatgttccctaattttgcccttgtacagatacaaaaggcatctacctttatggtgtgacttggaagctctaacagcatgaaatatttctcctacttgaatgtgtaaaattttaaaccaggccattacacattttaagtcttcaagatgctctaagcaaaacacaaatacatgacctggaagaaccatgtttaaagactggagtcacaaactcaaattctaataccatcaacaaataaggtcactgtgggccaagtataagaatcccggtgttccaacgttctagttctagcttttcaatacgggaactatatatcatacaattgctccacaagaacaattctgaagttcatagttccacagcctaccaagtgaagcagaaatggctttctattccatggctatgggcccaaggaatgcaaatcagaactcatgataactaactgccaagctttaaccctagctgtgtcacctgagtgtcatgagccaatcacagtgtcctgtgtttcagtctcctgctctgtcaaatggagatgatgatacctaccctcccacatagttgcagccagtctttgcagtcaggtctttgacagttcaacgtcatgccatggctgctgggggttcaagcttccagtgggttggctgttttgccagagttaaatgaagtgtagcatagaggaaagagcttgggttttgcaccaggtggacctgggtttaatttctgctctgatacttattaactgggtgatcgtcagaaaatcacttaactccactgagccttatccgtaaaatgggaataataagatctaccttgcaaagtgcttgtgactatgagatatactgaacgtgtgagattaatctagtgactgacatatgatgggcattccagaatggcagccatttattgtctattggctagaagcaaatgctagtagtcactactctagctttctgactttttggcatggttatcacaaaattgcacacaacatgctttctttagaatgttcataactgctttcagtagacaagaattttggttgttatcatttatgctcaaaactttagtgtttttttttttttcatttcactcactgagctgatgtccttagcatggcctgtaaaaggcttttctacaaaagggtggttccctatgtctgacctaaagtcattttatttgctgtttcagctcattttgttttatttcatcctcaggagaaagagaaaaacttatttataatttaacaaataactgggagtcatgggggtggatgtgaggggagaggtacttaatgattactctcacctgttttttccccttaatgaccatggagttctgtaatctttgacctgattaactggatcacttccccaataccaaataaaagacaatgatacaggagtctttttttgagaggttaagttttctgagagctaagattccttccttaacctctaggctctatatggtgacctgtaacaggttcccctcattgcacagtaaattcaattctctttgttgccaccaaaactgccattttagaaggcaaagtgaactatgccccttttctgcttaatgttctcactggttccccctctgaagacaaagtgcatttgcagttcacagtgtgcccctcacacctgcctcctgccatccccatactatcatccccagagctcctgctgcgtgggactcatggctggtctctggacttaacttgctgcatggtgtctttatttttgggcactttgctccttctgtttctaatgccttctcttccttgcccttctcccttctcctacccttctgtttgaatgtcttctctttctttgaaaaccaagcttgaaaatctcctctgaggggccctccatgcctctcccccataatgtggtgagccgttctttctgtggagatccaaacacactatctccccacaattccttatcacagcacacagaatgctatgtcaaggtcactggcttgcagctggcttttcccactggactctgtgctcctttcagagttgcaaccaaaatctgttttcagagtttttctctcaactattacctagcaggtactcaaatacttatttttttttttcttttgagacagggtcttgttctttcacccaggctggagtgccgtgatgcaatctcagctcactgcaacctccatctcccgggttcaagtgattctccagcctcagcctcccaagtagctgggattataggcacgcaccatggctggctaatttttgtatctttagtagagacagggtttcaccatgttggccaggctggtctcaaactcctgacctcaagtgatccatctgcctcagcctcccaaagtgctgggattacaggcgtgagccaccgtgcccagccttgtgtacttatttgacagatggaaaagtacacaacagaagaacccatgttagcagaacacagtccctactcattaagtgcctgttttttggcacagaaatttctaatcttccatcttttgtttgcaacaaaatagtgaagagtagagtagaactgaaaagcaagagattactatgcccatcctatgtcctgcttttagactgatacattaacacaggcacaaacagcactaacactatagggaggcacaaatagcattaaccctccagtttcgtctgtatcagattgagtctttaaaatatactattttccacagttaactttgaaaaagagaaagtttttataaataaaatgatatttccataaaatattcagactaagaacattcaccatttaaatgtacccaaataaccgaagtttttattctcaagagggtggcattcatacaatgagagtggctgaaggaggaggccactctttaaagaaagtggggcttttatgccaaacgcaattaagtcctatttatggatgcccatctgggaggcagtaaattgtgaaataaggggaagggataagggttggagtatcttcctagtattctttacacagtctattacactttaatataccatggtttatggacctgacatggttggtataaaccaacaggacgcacagttaagaagttgtttttattacagctctacaaatatgggagccgggtgatgctaacgaggaaacaaagggactgcgctctgcttcacgtgggatccgtctgatgtgagtgtggcaatcgttttccatttcttagaaaatccccgttgtgcactttccaggagaaacaaatgctttacaccaacagaggcacagcacgctgacatcggaaagggatggccttttaacatttgagagaagaaaacaacagatatttggaaccagtttgtgatgcagagttcttacccttacatttttccttctggtatgcttgcccatggaggacgatatccttgctggtcttcctaagttattagttttcctggttgtggtgaaattagaagagtgatcatttctggtctgtcagagcaagtgtctaagctggatggtaaagttgaagagtagagggccacctgtgagattttctgtgtaaagtgttatgaggttgtataaagacatgctgtcaaggttcctagtgtagggtgtaggatttccaggtcacttgcctaaggctaaagtggactaggaaactaggcttttggtgaaagtaccaagtaaaggacattgtgtcactacactctgaagaggtcttcagagtcataaaataaaaaaaaaaaatccagttaaaaggagtcttcaaatggtcatctagtctacctcccaggctgatgtgctatcctggatcctcttatttccagtcagactttgcagaccttgtctttttcatcattttatttgctttttttttttttgagacggagtctcgctctgtcactcaggctggagtgcagtggtgcgatctcggctcactgcaacctccgcctcctgggttcaagcgattctcctgcctcagccttctgagtagctgggattacaggcacatgccaccatgcctggctaatttttgtagtttcgccatgttggccaggctggtctgaaactcctgacctcaagtgatccacccacctcagcctctcaaaagtgctgggattacaagcatgagccaccacacccagcctttttcaccattttaatctgccatttctagttgccccttaagtgaattggagtattttatggacactaaacaaacaaacaaacaaacaaacaaacaaacaaaaccacgaaatggtatcacctaacttgggcacctggggctgttctcaaccagggtccttcatctgaactgcagaacacagaaaaggatttgagaagctattttctcagtttccccatatacacatcaccgggaacattctaaatgtctaggacaatgccaactcattacacacaatggcagagatagggcagtacgacttaattcccttacacatagttgaaaatgtgagtcctgaggcaatcaaacttacaagtgacttataatattaagtcatttacacttttatacaggctgagtactccttatctgaaatgcctgaggccagaattgtttccaatttcaatttttgtcccccacattttgggatacttgcatatacataatgtaatacattggggatgggacccaagtctaaagatgaaattcatttatgtttcatatatactttatacatagagcttgaaggtaattttattcttccctcaaggacactgaaaaaactgtctattgtgctcctgcattttggccgagaccgtcacataaagtcaagtgatgggtcttgtcaaaacgcaggtgcgcaacagacagtttattcatgtcatgtcagtgctcaaaaagtttcagattttggagcattttgcattttggattttcagattagagattctcagcctgtatctctaaatctagtacgatgatattcgtaaaatatcttattggtataacaacatgaattacaaagtgctgtttgcatacaatagaaagggtcagaccttctacaatagaaatatttcaggtgtcatgtattcatttatattctctggtgactgtaataataatttgtataggtgacaggtacaatttcagagatcacaatatacagttggccctctgtatctgtgggttatggattccaccaactgcagactgaaaacatttggggaaaaaatggatggttgtgtctgtgctgaacatatacacgctttttttttccttgtcattccctaaacaacacagtctaacaactagttatatagcatttacattgtattaggtatcataagtaatctagagatgatttaaagaatgggtgtaggttatagcaattacgacaccattctatatgagagacttgagcatctgtagagtttaatatccataagggtcctggaaccaatcctccacggatactgagggatgaccataatctcaaacacttaaccacattatacatctagtctgtgatcaatagtaactactgcaaaagtaaacattttatcaagtcacagttctaggaggtaatcggacacaagtataattgggatctaaatgaagtatatttacccacactttttcagaagtaaactcactttttttttcccaatatattttcactagagatgagatgctttgccccaaggtaagtctttcaaccatttacaatactgacaaaacacttggccttcagactttatgaaggattttgttcattcttcttaaaggcaatcatttgatttgtggctgatattctactacttttgttcctctgcttctgtgtagtccagtgaagtccctcaatgctgcacaactacctgtatgcagaaacatcttggcttcgagtgatacagatgcaattccttgatgaagttgataagacagtataaccttaaccttgctataacttagcccaactatttaatctcaacgtggagaaaatggatacccaagtagatgaagcgactatttggattacactaatagtcacagaatccaggccttttgactaataatttaataattttggctaataatgtgactaataatctacattttccaacgctccctgctgcttcccaaggggcagcatttttctccaggattcccaaacaccgaggtggtattttgaagctgcactgtactacacatcttccataggaatagatacatcagagagaaagttccaagatggaatttcagctttcacgctaaatttcctgactcttgatgctttaaaacagaccgtgggggtacaatttcagaatgatctggtgagagactcattaacattaatgggagtcaggtggtcacattctcaaacagggcctgaaattctccaagttataccatcttctagacccatatatgtctttaacttatcaccattaatagaagtgacagatgtcttttgtaaaatgcttttccttagttatttttcacagatatttctaaacaagcatatttataaaatataattttcacttaagggataattatacataaatctatttccttgtaattaaaaaataattatacataaatcctgtttccttgtaatgtctaccttgtctcccagccatctcatttccaacgggaagggtctgaccttatacaatactttagaagtatttcaggtgtcatgtagggaaactaaactctatagcctcatcattcagacagcagacaccatttaggaaatattaggaattgcaaagaagctaaatttttaaaagaaggcttcttgcattttgtttcatcaagaaccttagtgaaatttcaaaagcaatggggtttacaatcacaaggctctggataaccatttggtgataaattgcaggtattctaatttggaggaagctcttctttcccagacaactctgtctcatcttaacattagcactagtctgaaggtgtatagtttctgaaaggcatggactacggcctttttctttcaaactttgtattcaaatgcttagcacttgagactataaacctagtatttataaatcggtaacttgttgctttattaattggtgagaatgtccacaaaagtgtgaatttgtagcaggttcatgagcaaagtggtaataggctgcatgtttattttattttattattattattattatttttgagacagagtctcgctctgtcgcccagactggagtgcagtggtgcgatctcggctcactgcaagctccgcctcccgggttcatcccattctcccgcctcagcctcccgagtagctgggactacaggtgcccgccaccacgcccggctaattttttgtatttttagtagagatggggtttccccgtgttagccaggatggtctcgatctcctgacctcgtgatctgcccgcctcagcctcccaaagtgctgggattacaggcgtgagccatcgcgcccggcctgcatgtttatttttatttcttctttaaagtagtgttcttcaaaagcaactctcatttttttaacctcatagcattttagtactagatattcagcaaatctaaagaaagaaagcacctcatgttaattttttttaatggaagaaaaagttctccaactagcttctttgggtttcccataactgcctctgatgattatctatgatatttagggccaatacttcattcttcagactttaacttgtccatatgtacactagataaaatgaaaccttacacttgaaaactatggagctatacaaaacttaagaaattacctcatataaacccctcatgctatagtttaaaaacaagctaagttaaacaataataggagactgaatagatagtggattttccaataacggaatcacgtactggagtgtgtccccttcccttcaccagccatagctacaactaagatccaaggacagtcaacctaatgcttataaagtagtctaatacaatggcctagcacagtcagattggtggtggtggtggtaatgatggtgatgaacattcactgaatactcagtatgccaggtgctatgatactaaattcttaggttctacactgtggattaacagtggagccgaagcttccaagtgctccattactttctaactattgacactgggtcagttgtttaatgtggctaagactcagttttctcatctataaatgaaagtaatgatagagcctacattcgacagctgtagtaattaaaagagatgtttgtaaggtgctcggccatggcacctggcacattagttaagtaaataccgattatgataatgactaccatcactataattctttgtaatccagtgacatttgcttgtgcagcctttcttgggttcctgtgaaacttctctggggaatttcagcaccctgtttctccttagtaatacgtgtatccctacagtaagctcccaaggattaaagcacacttcctagacccacataccacaaaacgtgcttgcaaaaaatatcacgggaaaatgctatgacaaaattataaataaagaatataaagcagtggcatgatgtgcctaaagttacgtcaaaaggtatatcacacacattatatatatagttatcaaaatattgaatccataaaagagtcagaaggtaacataccaaaatattatggttgctatttctgcctctctggttaagaggatttttgtttttcatttgtttttagttgctttttgaagaaaggggctcatttaatataatcagaaaaagaaacaacagatgctgtttggaggcagctgcagagcactttgaaagcgagtgacctgcctaaggtcatacaaatagttttgggcaaaaaagaaagaagctgtcccctgactcccgactagttttcactaggccacactgtgattctttataggttcctgctgaaaaactgtaaaactgtcatattactacagtggaacaatagagaaataagtcgtaacagaaaaacaaccattgtcacggataagttaaatttcattgggcagtcacccacattaaagtcctttattcacaccttatactcacaggcaacatgaaattctacaatctctataaagtaaccattctacatattttttacaaattgttcagaaggacatccaatattaagaatagtttcaatcacattataaagagtaaaattcagataaaaagctattaggcatggtcagagattttaatggcttaagactgacgttaactaaagaaaaactaagagaagaaagaagccatacttatacatgatttacaatatacagcatcataccttgacaaaggaaatttcttgttctagatctatttacacgaaacctctgacatctgtgtagcttaacacatttgttaaatagctgaagctctccctctagaaaaataattgttcagatgtttagtcataaaaatgaatagactaccagaacgtcctgtaaataatcatgaaatagccattgctatccttaaatcaatcttcttttaaaaccctggcaaaggctaaatgtacttaggaaactgaatttacatggccacagaacccgacaaaagtctaatttccctaatattggctattgcttacaacatcaaattactttttaacccatttttatttcacttggtcaagggtttgtcatagctggaggtttaaaacgggtccactagaaatggtacccaagaattaacacgatgacttcaagagctctgatgttaccaagtatctaggtgtgatgaaggtcataatctgtctcttgggtgatatttgcaggaaaagaaaatgctgagagaactgggattcccaaagaagatgctgcagaagatattttccacattaaagaacatttgatctgttccaccagtagatgaaccattagcagaagcaatcattatcagagccagtaaaaggaaataaagaaatgaggcttggtttttaaagtgaccacactgcttctaagtcaaggtgaaagtgctgacagtgaatttatcagaattccaggtggaatcctccagagtcacctttcaatcataactgtcatcctcagagaaaaagcttttgttgaagaaaaatttgtacaaacattgaataatcacattgatatggtaacaatttaacaatacattcaataagaatgaatgttacagtgggtcactttttccctgctttttatcaaacctttgtattttccccagattttacaagtaataaatcctcattgtagaacatttgagaaagatataaataagaaaataaaagcagtgcataagactttctctgagcaatggccactattaatatgctgattcatttcataaatgtatatatttataatcacacactcatttgtgctttagttatatagttgaaattatattgaatgtaatgtcctttcttgctttttcattttttcccttgcattttatttaacataaaggtataggtataggtcaacttctaaatgaatacttttataatgaatttatatttaaatttacaattattaaaaataattgttgaaaaattagcctttatttcaaagtgagtatggaacctattcaaacaaaacattttctagaaactcatgaaagcatttcagaataattttttgacagttcttcctaaacgagatcttgtaggaaagaagtgtttatgaaggattattaaaatattaccaaatagaattaaggcagatttttatcttttgatttaacttggaaatcatccattgcttcaccctttagtcttcctatttttgcgccttagagaaatgttttacatggctaccagtgcattttaaaatagtgtctaatactgcaaagtaagttgagatttctttatcctgtgcttaaacctaatatatactacttattctgtatttgaaaaatatagtataaagaaaatacccttaatgcaaaaaatattgaggatcagtatattcttggaagcaaatgtgaagcctctgtgtatatgacaagccacacacacaagcacgcattcagtaggaaacagatctccctcgaaatctgagagggtaaaatgttcaaatattatgcaaactggagaagtgccaccatctcctgtacgcaggagcctgaagctaattgtacaagtggcacgaagctgatttcagaaagtaaaaaaaaaaaaaaaggctcatgaaaccagaggcttgaaatgttttactggagaaaaaccatagcattacctcctcctgtgggatgataacaatgatttatgaagctgaagtcattccttgtgattgcacttcagggagattggtttcacatgatctgcgaaggcaggcaaggcgagctgaagaagaaccccacatgttcaactgaggctgagctctgcctcttcaaggggattccagagctccgaggagggggaggaaaacctactgctttctgatccatgcaacccccttccccccaaccaacaagcttattaggtggacatacggctctcttattttctctctccttttaaaaagtattactacttctgctgtgtgggagtagaagcttgttgtaaatgcccagcaggatagtagcaaagccaagattaattccctatggatttatatgggtcgttctcacccacgatgacttgtaccgtttcaaaggtgcttatgctgctgtttttatggctggtcactaactttattctggcatatggtggttggcgccatgacatggagtgaacattttatacctgaattaaagtggatatttgacagtttctgtcagaaagttcagagcaaagaatttgtgggacaagatttattgcatattttatatgggacacatctgtttctttgctagctttgttccttcccacaaaaaaatttaaagacgtttcctaaagaaatataatgactgataggaaaaaaattccaaagcagaagaaaaatatggtcaaaagttgggcatttaggatctaactttataaaaaagaaagaaaaaaaaccacttctcattttgacgaggaaaaatgactcacagtcatgtatagaagctcagtgaaacaatgctgttattattggcaattattttatggttagtttaatgtcatttatataatgaaattaaaaatgtaaatgtattacctaccatttttcgcatacttgaaacaggactggcaagaataatctgcctttgatgtatttttaagattttgccatctcaaatggtggactgaataataagtccagctacatcagtgttaaacaaaataattacagatatttaaacatttaaaactgatatgcctaaagataaacgcagacgacttccaaccaaaatccatcaatacaacctgaagggtgtatataaacttctcatctaaaaactccctgtattgtaaaaagtcaactgagtaacaaagattcatgattacaacgtgaagggtgtatataaacttctcatctaaaaactccctctactataaaaagtgaactgagtaacagagattcatgattacataaaaagcgggctcaacctgaaactttgcgttaacagacaggccactttttcttttaactgcaaagagagaggctttaattctattatgaaactgaaaataaaacttccactcttaaatattttgcaaaattaatccttaactaatttaggttatatgcattctccttataaaaatataaaacattacagataaagtccccctgatagccctctgcatcacaccctctgtctcccccaacacatatatatatatagttatcttctacaactcaagtactgttatcattttgggagtatccttccagaacttctgagtgtccctgtgcaaacatgcaaggtttctctaagacagacatagagaagtagatttgttagtgttatcaggtagacatagttttaatttatttgagactgtcagtcctccacaatgatagtataatttaatactacgaagggctgataattgttttgtcaaacttttaaaattctgcaaattacatagattttggtaccaacccttggttaaatattttgcaaatatattttcccatgcttttgcttgtctattaactttgtttacaacgtttatcatttttaaatttaaatctgaaacagtcaaattcataaatactcttcatgtcttttgctgattaaatcatttgcaagaaggtctcgtctactcccaaggtaataaagaggtctcgtattttaatactgtctatatttttggttttgcttttgtcctttagattattatttgaaattgtgtgaggcagttttgttgttgttgttggagatggataaacactgttcaaatgtcacagattttctaagatacaattttctaagagataatcagattttctaagagataatcagagtatccaaataatggcagattgtcttgtcctctctcaggtttaaatgagtcatttctttttcctttcagctgcctgggtaaagttggtccattcgtgtttattttgattatgaatatatttagattaatcctcatatttattttgtacttttcttcaccaagcttgctggctatttactttttcaccttttcctaacttttgttggattcaccaaactgtctttgcttcatttttcctttactggtttgaacatgataaattctaactttttgactaataaatatttaaatcttttttttttttttttttttgagatggagtcttgctctgtcaccccaggctggagggcagtggcacaatctcggctcactgcaacctctacctcccgggttcaagcaattctctgccccagcctcccaagtagctgggactacaggcgcccgccaccatgcccagctaatttttgtatttttagtagagatggggtttcaccatcttggccaggctgttcttgaactcctgacctcatgatccacctgcctcagcctcccaaagtgctgggattacaggcatgagccaccacatccggctaatacttaaatcttaacacccattatacctgtgattttaaggttatctacagcttattatatctcaataccctaacctggaacaatataagggaggcttgcttttcctttcattctcctcctaaattctacggtcacatccaatgcctcatcccattttgatatcacctgcaattttatttccacattatcaaacacaaatgctttacattttattagtaatgctttaaccattattttataaatgtctttgctcattataccttttgctactccacttcttcctagattcattttcaacttgaagaagtacaacttcaagagaagatctgtgagatacctgtaatcccagcactttgggaggccaaggcaggtgaatcacctgagatcaggagttcgagaccagcctggccaacatggtgaaaccccgcctctactaaaaatacaaaaattagccaggtgtggtggcatgcacctgtaattgcagctactcaggaagctgaggcaggagaatcacgtgaacccaggaggtggaggttgcagtgagccgagattgcagcactgcactccaggcctgggtgacagagtgagagtctgtcacaaacaaacaaacaaacaaaaaagatgatctacgattagtaatctttctaggctctgcgtttctcaaaagaatttacttttctcatttactttaatgacagtttggttaaatttagaattctaggttctgatatttttcccctcagaactttacacttattactccatttttttttcctgcatccagtgttgctgctcagaagcttcttgtctctcagcatttttctaaagccttgatttctcaaggttcattataaagaattaagggtgcacatatgtgtacatttatttttcattgcctctgttggctctttcaataagagatgcaatgtattttcatttctgggaagtaatgttgcattatttgagtatttcttactctcttttaaaaatatttcatcaactcaaattttaatttctatattctctactggattcttttttatgaaggtgtctgtatcttatagttctctgagattataaaacacacatgttctgaatatctgttctgcctacaagcatgttttttcaggtgtaaattctcctgtttgttgagtttcttggctttcctctgttgttgattctggacacggaaccaatcttgctagttgagtctcaccattgggtacaagagtaggacaatatgctgcagctactctatcttggggagaacagaggagggcagaatgttccatggggcagggtactcactcatatcctgagctacccaaggcactgcgccctttctctcctacccacgagcccccattcatggtctgtctcaaagacagagagtttctactgtttttttttttttttttttttttttttgagacagagtcttgctctatcacccaggctggagtgcagtggctcaatctcggctcactgcaagctctgcctcctgggttcacaccattctcctgcttcagcctcccgagtagctgggactacaggcacccaccaccatgcccagttaatttctttttgtatttttagtagagacagggtttcacggtgttagccaggaaggtctcgatctcctgacctcgtgatccgcccaccttggcctcccaaagtgctgggattacaggtgtgagccactgcgcccggccgagagtttctatcgttattgcctacaccaaggtgggcccaaagaggtcatctctgcagaatgagaaaattctcacaaatgccgttattccaagaaaactgcttaaatttcaaaactcaaagttttaagtttcctctcacatacattctatgacagttcttacatgttttgagcatttttaaagatttgtaaaccaacaaaatgctaaagtagcaattttactattatcataaataaggacatggtggtacaatcataaccatttttaaaataccaattttaaaggcactatgtggaaacaaagcccctgaaagctactattccaactcatgctggaggtttagtcacacccctggtccagaatgcttcgtgggtaactttcatattcgaaaagtattcttcacagaacaggcttctgcgaactcacaaggtggaaggcatggagcctggagctgtaacatcctactgcaaacatagggaagaccacattggaacagtgtgcccctgccaaaagccatgtgctcccttctttacaggtctataaaatggcatgtgtgattaaataagatttcactgaagtgctggaagccacacacagttgaaacatggacttggggatggcagcaatgccaccagcaacagatagtgtaatgtaccccccgtgagaggggaaaggtgggaaaggaatttttaaaaatctttggtcacgttattattaatcatgttatttaataactgtgagtactatttaaaaagcaacacgtcccatttccttcataccatgaaagccaagtctgcctgggctggagcgtggagcccaacactggttttcagaggctcagattcttacatggtcctcttagtgcgtgcttacctcacagagtggatagatatccacatgaatttgacagattacacataggtaatgctttagagttttttgaacattttcagaaacagtatttttaaattttatttgcaaggaaaaaatgcttatcagtggcaagtcaggtagggtcatgttcaacattggtcaattatctcacccattctgatcacttgctctgttcccgccactggctcttcttctccctcttaaatatattcaggctccaaggcccgctctctagactcttttctatcttttaagagacaaggtctcactctgtcacctaggctggagcacagtggtgcaatcaaggctcactggagcctccaattcctaggctcaagtgatcctcccacctcagcctcctgagtagctgggactacaggtgtgagccaccgtgccccagccctctgttttataattagctataaattcagctactctcgttctgccgatgaatctcaaatctctatcatcaactccaaactacattctcaacatcagatttgcatttcccctgctctgctgaacatcctgacatgaatagctgtccaggaattccaattattccctgaattgtctaccataacacaaatttgttcctttccttgtctgagtcacctcagtaaatagcatcgacattcactaagatgatcaaaacctgggatttggctcctccttttgtacaactcctacgtttaaatccaattcctgtcttttctacttcgaaaacatagtcttgaattcatccatacttttccatctcaatttccaccagcctggtccaagatgctcatttttcacctgagctacttcagtaacttccttatctacttttgcctctgtgcatttatttgtctacacagcaaccagaataatcttttaaaacatgaatgtagtcaggttactttcattttacaaattcttttaaggcttcctgtagaataaaatccaaattccgtctcatgatcttcagggccctgcctaggtggtctgccctagttctagttgtattcgcccatcttaatctctcagtatgccaagctctcagctgcctcagggctgccaatcatggtgttctttctgcgtacgatgtgtttttcttctatgcttcctataactggctccttcccagacttaaatgtcatcactgttctactctccctactcttttaaagtaggtttcttaataccagccctcttcagccaaacctaaactttccacaatttgtaattatacaatgggttacttatttgctcttttgtctcttgcgcttgctaattataagtttatctgtcctgttcatgactatataaactatgcctggcacagtacctgacacactgctgactctcaaaaatgggctgaagaaattttctctattacccttttcattgccattcccctattatacagttgtctgtttaggattggctctcctgactacgttgtgagatctttaagccgggagaccgtctcttatctttgctcggcacaatatctgacacactgtgggcctattcataaagaatgaatggttaagattaggtactcagtaaccttttccccaaattgtattagacctgacatataaaatcagtgtgcgagatgttgtttagaataagtagttttgagaggtcaaacaacaatgacactggtagtaataacagcacattttggataaggctgtttggataacaaaactcgaatgatggaaatagtagttagaaatcactcaaagtgagactcaagggagctgaccctccctctggatgtcaaaatctatcactgacttagcagtggggtccctagagtgtttctcagaatagtgcttcccacacatgtcaagagggcctaatggctgcttctttcacaagggtggtggggagacacgtgaggtcaagtgtcccacagcccatagagaagcagctctccagggagagtggaagactctccagggccctgcttagcgcagcctgagaggctacaggccaacagtgaaggtgttgaaagacactgagatcgaattccctgggggaaaaacgctgccctgagatttaaggagaaagaggaaacaagccaaaagggtatgctcagaaactgatggaaagggctaatgtcatcagatcaaaccaaaggaaattaaaggaagatttagtgaaaagagggcaaaaacagaatcaaaggaccccagggaagcgcagaccaatttaatgagaaaccaggaaagtagtgagaacaacaagggagtctctcttcatctatgtttaatccagacttcttgccatttaatgctaatgctttgctccattcttaagtcatacccacctaggagtttgctttggagtttgtatgtaggaacgaagagagacccaccttctattagaacactacatgatctcacactatcattacaatattccaggcggcttccagatagcatcttagctgtggaaatgctattctcttatgtccttcccagttttcctagcgctggctctttccaaagctactcattcttatctccttcaactactttctaaataaacaagctgagaaaacacacacaactgatgtttgcctacaactgatgcattcatcttgttctgaaactaagtagaactacaggagaatcagaggaggggattcagggatggcatgtcctcaggcctgttgccacgtctccattaggctctgaatatgcgtttatttttatagctccctttcatgaacaggttgtgtgagacagaagtcttatttccaaggttcactttactgagtggcctccagtcactctttccaagaagaaagatggaaaattatggtccaagcagctttaccgtccatctaggaaccaaggagaatgctggacctcagccactcaccagcttaaactgtcatttatgagcaacaaaatgattgtctttgggtctcggcagcattatcttgagcagagtttgtggcggtaaggcccagctaatcacatttgtctaattttacattcccatcactttcacaaatggattattacctactattcacttaaataaaacaaagaatgatcaaggaatcttgtcgttctagatgaaaatcataacatataagaaaatagcattagttttcatgtttgtaccactttctaacaaaagagttataatcatttcacattattgtcttgttcatctttttaacgacccaatgaagaaaggacatacaggccggacgcggtggctcatgcctgtaatcccagcactctgggaggccgagacaggtggatcatcaggtcaggagatcgagaccatcctggctaacatccgtcgctactaaaaatacaaaaagaaattagcctggcgtggtggcgggcacctgtagtcccagctactcgggaggctgaggcaggagaatggcgtgagtccaggaggtggagcttgcagtgagcggagattgcgccactgcactccagcctgggtgacagagcaagactccgtctcaagaaaaaaaaaaaaaggacatacagattgctggctctcctttatagcagaggtccagaatgatgtgactaacttaagaacatgaagtgaaagaggtatggataaagaaaaacatggtttattcacacaactgaataatgtatagtggttaaaaggaatcggacccaggctgggtgtggtggctcatgcctgtaatcccagcactttggaaggccaaggcaggtggatcacttgaggttgggagtttgaaaccagcctgaccaacatggtgaaatacaaaaattagccggcatggtagcaggtacctgtaatcccagctacgtgggaggctgaagcaggagaatcgtttgaactcaggaggcggaggttgcagtgagcccagattgcaccactgcactccagcctgggcaacagagcaagactctgtttcaaaaagagacaaagtaattagatccatatgtatcaacatcaatagatattaaaaattaggatgcagaatggtaagcccaatatggttcatcctttctgtagtgcagaatgtcagaatttcttcttaatttggtaaattttgattactccaagtcgtacaaagggaaattccattttccaaattaatggagctaattgaaatgtgattttgtaattctttatcatttagcatgttttttttttttctcactgggtttttgtaacagtgaatagactctagcttggctgtaagagctaacaatttggataatagtactgctttgcatctactgcactctgcagaggatgattcaaaaaagaggctactcatctcccctgaggatgaaagataaacatttgcggttaaaatattgtcacgactcagacagaagaagggatttagccctaccacttggctcatgttccctcttaaccaaatcatatttttttagtaacctaataaaattactgggaatagaaagcatacattccgactactagaaatattgatacaacaaaggaacacgttagtagtttcaacgtcttttacttaaggatttcagaattcctcccagtgaacagggagataggtaggtaaaatataatatttcctggtagatgacctaaggcaaaactctttatctgctggcacctatgtatatttgctacacatcgaatgttttgtcatcccctagaggaaagacactggtggatggcaagaatgtcagtatttgtttacttggagcaagaggcaggtcatttggtcacagactcaaaatgcaatgtgcaagaactcagaaactggatagcaaaactccagcccaaatgaagcaaaatttccttctctgctttctcaaggtctactctagttaatattgatgtaactagacaaatacccaataacaaaaatttgccatgcaatatataatctaagatggcacaacagtttatgagaccaagctattattcctactaagttaaaaacatgcgctccggcgaaagttctgtcaaccttacagctctttaaatgcatgcatccaggaggactagacaagccatcttctgcttccagctgctagtgtttctagctggtgaataacacaggcccccaggagaggggggtgaaagatagttttcaaagattggaaaatttcctccaacttacattaaaattaatattaagggctctatatgtggctgctggagtagaatggtgggaatctaatcaagagcccgtgccttcctttgaggccagtttcctaaaattggttctctgtgcctatattgcatgagctgaaagcatatggatgcaatcacattccaagataccttatttggtgttggtatggactgggcatattgtctcagcttacaaaagcaataaggattctctgactcctgccaatccatgtaaatcactcttttacctgtttaaagggtaagattcgtgagtgaggaaaatagttacaactattttgttaccagcatatataaccatgttctatatctagatagaactcttcaagttgtgagacctcagtagtgggaagggagacaagatttagacaaatacccacacagaaatgaggggggacacatttctcccacgtggcagagttaggaggtactgaatccaaattttgtccttatgtagagaccttatgctggttgagaaagcaaaataactaaataaggattacttatatctgcaactcattttaatgtcttctttatttttaaaagcaaatggactagtgaagggaaattcacttctctgaatacaggatcatcccacattcaggctatccaaaatttgggggatctggaaggccaaagaccaaaaataaagtaaaaaaaaaaaagtaaatgaagttattggatatgaaataacaaatgacaggagattaaaatcttctaattcttgtgtctggccatataactgagtgccactgaccattagataaagacagatttttaaaaataatcacccctattgtaagggatagtcactcctgactcattgtcttctcttcttcattagtttgattgtttttccctccagatcacatttttggagttgttcttttggtgagatagtggttgaaatagtttaattttcctttttgagtcctgttttcacctctagatgaatttgcttttatgaaggaattccattccatttatgatctaaatgaggaggaactcctttaaattctttccttttttggacagcttcaacctgtatttcactgagtaccactgcatggtaagtaaagaggatactataaataaagtgtgaaatagacatcttccctctcgtatcagctaagtaatttctcaaatatttaaaaattgaaagaagtgccacagaggtaacagaaagaggggcagttatattattgagtagaaacctaattttcccaggagtatatgtaagaaaagccctccctgtccgaggagacgtcatcatgtgaactcacatatgaagaaaggtggaaatcaattaggggtaggagcagcgagggccctggggagtgttcaagtagtgcaaatgacatctaaagacgggatgaaatgtaacctttcagatcgggagggcaggatccaagccaccaaaaagtctagtggtttgtatcctccaaacaccccccaccactataatctcccgccacttactcaaccactctagtccaaggcaccaaacccccatgctggattcttaacctgtcctgattgaggtcctcctttaagtcacatagatccagcccatctgagttcaatttcctcctttgtaaaatggagataataatagtgctttcctcaagggtttttttattcaatgagaaatgagatattacttagtatcaaacttggctgagagtattaaataaatgttagctaatattatttttactttttttttttgagacagggtttcgctgtgtcaaccaggctggagtgcagtggtatgatctcggctactgcaacctccacctcctggattcaagtgattctcctgcttcagcctcccgagtagctgggaatacaggcacctggctaataccgttgctaataatataacgcacatatcatggaagcttgggaagtttttataaaacaggtggggcttgatggcagttttgaagggtatttgctgcttgcctagaacacgggaagtggagctggcagtccaagctcaaggagccccaggagccagggctttgcagaggctgcaggggaggaaagtgtgtgtggggtggggaggttggtattgcataggtccagggaggcaatcatgagactccctagaccacaggaaaaatcttttgtgggaatagtaagcttggacaagtagactagagactatgaagataatctctcagagactgacacaaataatccactcatgcaaataatctcaaagaatgcagcctttttttttttttttctaacttctgattcttaaggatgaagaatgtgggtggggatgcctgttcccggtgtcagtaagtaaaatcttctggtggggaagtattttgaatatttgcaaagaaagttcaatgctctccaaagtggaggtagaaactggcaccagggatttctgtgtacctgcctagaaatacagggctttaatctacagccaatgtgaacttttgtaactctttaaaacatcatcatttctgagggacttcagactctgttctgtaggtcagcaccagaccaacaatatagagttcctgtgatcacttatgatttgaaacataaactcaggctttgaatgttttaaaaacacccgtataactatgggttgtttaaaaatagctataccccaaagagtttatttccaacatctgacatgaatgcattttgcagcgatttgttatgcaaataatggtagcagggaagacatatgaaaaaacattgacccttctcaaagcccgatggatttaatgcttttgttaattctgaattccaagtctaggggttgtctgtttgtggtgtataaaataaaatactatatgcctgcctcaactttccttctgatgaagctgtaatttgcaaaggagctattgttcctctatggcttccctaatttttcttcacagacaactgtgcttcagtgtggagaggggtttcagtgtattggctgttgagatgatgctgtgagtattttcaaggcagagggggctgggtgcggtggctcacacctgtaatcccagcactttgggaggccgaggcgggcagatcatgaagtcaggagatcaagatcatcttggccaacatggtgaaaccctgtctctactaaaatacaaaaaattagccagacatggtggtgagtgcctgtaatcccagctacttgggagactgaggcaggggaatcgcttgaacccgggaggtggaggttgcagtgagctgagatcgcgccactgcactccagccagcagaaggaagagctttttgagatggagactcaggtagtgcttggaattgctgataatccaaggcctgatgatacgggggttatttgctgaagcttctatttcaactctcctttatgaccccgggttacctaaatatgttgccttctaatgttgttttgtgagaggtaggaagtagggtagacatcatcagtcttagatttgtcaatgggagaaaaccaagggacagacttttttgccgccattttgtccttctaaagtgttagctcctttttcccactttacaactcctcctttctcccctcctcctctgctctgctcttctccaccgccaccactcccagcagctgtttattaaatgcccactgcatgctagctttctaatttcttcttgtctctaatggtcatattttaggatgtcattcctctactgacagctaccacttctagagtaatcctaacctgtaattcttttcttagaggataagtagaaaatacgtaatgggaggtggggggaaatggttttgatcttcaattagtgtaactgatagggaggaaagggcttgggttaagggaatgtcttatgaagcagcagctgttttataagggactcatctggagaagtggggtgtatcctctactgataagggagaagacccacagaaagccaactagcatcaaaacagccccagcatccaagcacagaggaagtgagccttctgacccccatgatctaataagccccaatattagtccatacaggagatgagcaacatcccagggtgagtgagtcagtcactcaagtccccggcccaaaagtgtaatggactttgttttatggtttaatggacatttagctgagttaaaagggttaacaagtctgaacacttctctgaaacctgatgagatatccaagcatcttttttctgaaggtctccattgaaaataccacttatgagtaacttctgtaaagaaaacccatctgaaaataccagagatgaaccagctgcttttttccccctgaactcttagcaaatgatctaagggcttaaacacattaaaggccacaatttcaacttctggaatcaatagggcaaaggaatgtgggcatattcatttaaatatgaatttgctgactccattcttactctcttgggttcctccataagcccagaccttacactaaaaggcagctacttctcacactgcagcaggattttgagaaccatcgccctttgtcatcttcaccctgacccttctcatcattttttctgattctcagaacctcctggcatttatttccaattcagttctgtttcctttcaccaactcaggttagttgaggctggaccctagcatgcctgttttgtcatactctgatgaaaagcaaattaaattcttggatggtaaactcttttcttaaacttctgtctggttctttggaaaaaaattaaaaattatatttctgttaatatcaaccaaaatattgaatccatctcaggatcctacatcccttgaccaacaagctgataaaactgcctagctcatcttagtcaacctcttcctctcacatggtgtgtggaacagaacttggtctcccttgggcttcagtagtagcaaattgaggaagtaagaccttaattacatataaccatgtttccaccctacgttagctctgttcccttgccctttcacatttcaagctgcctcaaggaggaaaaaatcagacagataaaacacaaacaaaagacagaaaacaggagctcaagggctaaatcaagactattaatagttcctccaaacaaagaaaccgactgccatcatccaagctctgttcatctaattcttcctttctccaaatgtggctgaaactcatctcccttttagccttctcttactcccaccgttattattttcagcaatttttccctaagacaaggcagcagcagcaagaagtgagaaaataaaggtaatctaggtagtacctttctttgaacaaatagttttccatctttttcttatttccactgatcttgaaaacagaatcactgtttaaaggggagaagccctagttccctctgatcaccttggttaattttagaatgggtgcttcatattcaccacacagagaaatctaaggcttttattcaggtgaacccttcaaaatgataacattatgacaccaaagcttttaaaagtcttgctgttctgaaactgccattgcagtttggctttgtggctttggatactctcagagggaaggcatcacctttgttagagtttgtgaatttaaattagtttgggtttgtttggaagcagagcaacatcagaaaatccagtccctttctacctaaaagcacaaggctgctagtgagcaggcccatgaggaagagctggaggagagggcaggacacagggatgtcacccagcctagctgggatacgtgtcaggcctgaccacgtaatcacagatactcatgaacaagggaaagcagactattcagatacaatgaaaactgattttaaataagaggcatctcttattttattattttttctaaatcgtggctctaaaaaaataaacttagaattattttcctcttccaaagtgaaatatctttttcttcctggcttagaccaccaaccaggtttctgctgccggaagccgggaaaatactggatattctttgaggaagcctgatcagatgccctattatcccaatttccaaaccaaagatgcttggagatgaagacacacttttttggtgtgtgttctaagttgcaacctcaaaaacttggcagttttctcaccatggactgtgatttccatgatgtgatggtttggaagggtttgttttcaaatagatgttatggggtgattccaagggaattctatttcaatcctcctgagttgacaacctttccttcttaagtgtaactttggtgttcagataaccttgggacacagacaaggaagattcccagtggtaaatgtctgtgtggtacaaaatgggaaggcagaaagtgaagcttgtaaagtcatgaaaataagaaagaaagagcttttcatgcattatctttcacactgttcttctttttctgtttttattttattattattatttttttgagacaggttctcactctgttacccaggccggagtgcagtggcatgatcatggctcgctgcagcctcaatcttctgggctcaagtgttcctcccacctcagcctctctgtacctgggactacagatgcatgctatcatggcccagccagtttttaaaattttttgtaggatgtggcctccctatgttgcccaggctcgtcttgaactcctggcctcaggtgatcctcccactttagcctcccaaagtcctgagattacaggtgtgagcgactgctcacagctgggattacaaggctgctcactagcagccttgtgcttttaggaagaaagggactagatttctgatgtagctctgcttccaaacaaacccaaactcattcaaattcacaaactctaaaaggtgatgccttccctctgagaatgtccaaagtcacaaagccaactgcatggcggtttgggaatggcaaaacttttaaaagcttttggtatcataatttacttttatttaggaggatagtatagttcacattttctcctttttcacaggttctatttagtgtcatttatagtagcaataattcatattctaacttagctttacctcagcaactctttctccccttacttttagtctcagtactacaaatgcccgcatgctttctccccagaaccgaggccttcatatttttctccctaagctgtatatgtcttacaaacttgtaaaatgaatgtaaatgaatgtaaaactttccccttgtttggtgaagaacaagaggatacacccattgcttgagcatacatctccctcagtctctctctttttttttagaatgcaaagtattttctttttaaacttttaaaatctgaaaacaagctagcctatgttaaataacatagtttccaaagctgaacgtgctcacttggagcccagttttctgcttcaaatacaaacacaacttcctgacactcctaggtgggaacactactgtttgacgatctgtgattagatgaactgatcgatctcagtgggtaacattcctttattttttccttggtaaaggtttaaaaattctaaaatagatgcattttttttttttcagttttacactgacaatttcattccaattgtctcctgggagacacagaccatgtacaggaatccatcttcatccttctcactctgctacaatgctgtgtctgttcaccgccaggaggaaggcttgattagcactgagctggaaggaccttctaatgatcttgatgagctcactcaggttgatgtggtccagtacaaggaacattgctttatccaggacgggaagctgcttctcagccttgtatcgttctgttactaccaagattttgggtggatgctgctctcggagaagtcaaacttctactctttgttcaaaggtgtggtgtggcctgaaggtcttctctgatgtcatggtgcagggatctgggtggtggtggcgacataagggttctggcggctcctgggggtggcggtggcagtgaatctaactctggcgacagtgacttctcttgtctccctcagtctctttattatatgcttgatccatcagaaagtctcaaggttctatgcacctcagcaaccccagtgataaggcaaggggttcatggactgagtcctgaagccctcttgtgtttagagattgggaagatgaagaaccagcttaggagattgaggaatgcccatgaagtagagagaagacaaaagagggttaggacctaaagcaagaaggagttttcaatccatcatttgatcagctatatctaatgctcctgaaaggtggagtaagattttgcgtcagatatatagggtcttttagactggaatagtgtctgattcttctttttttcctcagagtctcacatatagtagataacttataaatgctgaatgaacaactgaaaaagaatagtagtgattggtcacagagaatgggatgtgctctctgttaattccttgcccatcaacagatgcccatcctagggcaaaatgggagaaagactatcatttccacagtcctcatgctgaatggatcccaagtgctattgcctcatttatgtagcatgatccagagacacttccagtctgaagaacttcaaaggttttaggaggctgaggtggagggctcggggagcaatgaaggcaagagggaaagggatgaacaaccacaataaaaggccggcacgttcacaacaatgttgggcaaagacagtgattcctgaatatgaaggaatctggagagcgagtcacaagaaactgaaaacataagggggtggaggagatgctgagagaaaacagaaagctatgaaagaaggcagacgctcaaaccgaggtaagagagaaaaaattaaaagcggaaggggagaaagaaaaaaaatcggagaggtgaggccaatgtatggaaaaagagcaaaggaaacacagggccattgtctgatgctgagaacagtctggagactgagcaactggtgcccgatttctgtgcatctcaagaggagataaatggcagattgaagggaccctcttggcattctggatccaagaggaaaacatagcaggcgcagtgaatgctcaagtaaacacaaacagcagcagccgtggggttacgagtgacctgactgcaggctctgtcctctcctggcctccagcctgtgtgtacaacacacatgcccgcttaaagccccgcttaaagcgggagggcaaaaatctcctgcaactgggtgacctctgttgtcagcatttggctaattaaggaaagatattaccctacagatctctatgccttggtcctacttcctgctcattaaaaaatggtttaatgagaaaaaaatcaaggcaacagaatccaaattattattttttctcccaaatgagctgaatgacagtggctgttgccagaacgcttgaacaataggattgtgacacgaagactgaaatctaaacaacatgaagaaatctcgagagcccagcagtccccattatctcatgcttgcacgacgatagtccaaaagatgagtgatgagtctccatttgtgcaagcacagcagcagtccaaggccctgacacagccactaattgcccatctgcttgtttacacagcccagagatggtgactggacaaacagttcatttcccttgaaacgggaccaaactgggaggagcctgtcacatgggacagaggaggactaggaagaactctcatgagaaagtgcccccagatcaaagccaaggaccagcaagccaagcaaagatgggttccagcggctggcttctcacaggcagcttcgggtctaccgctttctgcaccctgcccacccactcccagcagaactggaacccctctccctgaggacaggacattttgaaccattcacgtaaaagtctcaaccacggagcgtcagcaccaacccacccttcaggcgttggcagcaaggacaactgtgttcaggtgaacttctagccctttcagacttcactggatgcttggcatttgctacactagttcccattttagtgttctgcttgtctcgtagactggactgtaaacaacttgagcaccagggacctgaagcccccggattccacagcagggcactttacatgtgaagagccattagccaggaaatgcttatggttgttaatgatgataagctactccaaacatagtttcttttatctgcctacatcagaagcttggcttcttgagacaagagactcagacttctcatttatactcttgacagactgtggaaatcaataatggcttgcacccatcagtgtcctggaagtaggattgagagagaagattctcttgagaaccgatttctcctcaaaataagattaggcttgaaaaaaaaaaaatcaacctccccactgcttagctcacaggtatggtgctaatggcagcaacttagtcatgaaatggggaacaacaatgtaaaaaatccttgttaatttgcttataattatccagaactaactacaggtacactgaagaactgtatacttgatgggagggagatctacaccgctaagtcaataagaccaatttccgatttttccctgtgagcatttatttgcagagccacatattggcaacataagaaactagcgttgaacaaacctaagaagtgatgaatcctccccgggaggagagctgcagccctgaaatccaaagcagaatgggctgggggcagcttgaggtctgtgggcgaaactcagcactcccagtctagggtgctgctcacccattaacttggcctcctcttgccactgttgttttagcccttagtgagcatctgtgtggctcagatttaaccagaccaaaggggctgtggtggtgagagggcagagaaagctggaggaagaaatggctttttttctggagaggagtgaggactaagtcacttcaaggatgatcatattcccaggaggagccatgatatgatattatttgaatatctagctccacgcagctctatttttcccttctcactactagaagattgtaatcacccggtatcagcacattcaagatactaccgaggacctaacagcatgcccaaaacctctcatctctgcacataactgcgtacaaatgactaaaatcactttgcttcaaaaacagagtagctgtgtgaaaggcattttagagcatgtgggattccacacacaggcaagttccagggatctcagaagcttggctatttcgttcagtgccaaggaggcaaagatgaggacaggcagtcgtgtgggtgggaggcagtccttggatgattagcacaggtgtccaggagggaggggagggtatggaaatggtacaaacatgagaggaagctgtgccagtgggtcatcatgccccatttgtacagaacattgagtggactgtaactgtggacaactgaaataccgaaaagaaaatgtgcacacactgtttaaattctaaacagtgggagaatcgttgtttaaagaagaacagataattgctcattccaccctccccagtctttgaaagatagacacaggagtgtcacacagtacaagagtttgtattacacagaaagagggacttacagacagaaacaaaatttaaaaacaaacaaaccaccagcatttatcaccgtttatccagccagtggttttctttatccccttggctattactttagatatttttgcttggaacttctcccccactttttctgacagctcattgatcttgggttggatcatcacagttcgtgggaaacaatacaggctacttttctagcttattccttcttagatgcctcttggatattgtccatttaatatgtttgagaaatatagagagacaaaacacacagtgttttaatctcagagtatatgtagtgtgtccctggagaagaagtctcatatatccaagggaatcattccattattttaaagtaaggcttgtatttcagattgatccacctggaacatgtaatcaaaactcatgaactttaatataaattccagattctggtttcttatctatatttttgggaacataacattggtagataaactaattgaaaaaaatattttcaatgttgatttagaaatggcttttaactatttctacacattccatcactccatctcagaagaagcggagtagaaaactgcagcaaatgggactttatattaaagtcctaggaaatatattctggctgatgtgatggttcttgtgtgtttcagtaggcatgtaacatgtgaatcgctttgtggaactgggttcgtgaggctagtatttatgaagctgtatatttccttctgtgtagtaacacagagagtgattcaggagaatgagaaaatcctgtttcctggaaataccatccatcctgaaggagttacgagaaccagaacagatatgtattttgctatttatctcacacttaaagattatacaatccattttcctagggcaagcacaaatggtcagttttataaatcttgatggactaagtcaagtaaaaaagcccactagttaagagtccagatatcgagagacacaaatctgaggaacgatcaattaggacaccgtggtagcttgtctccaagatgtccatcatcagctctttccttccctgcatgtttgtgctgttctctagttgaacggtggcgtctattcactcccttaaaactggactggactgtgacttctctgaacaacagtgacgtgatgtttcattcccagtgtttgagaggataggaaatttctaatttcttttccttggaacatttgctcaggaaaaagccagtaactatgtaagaaggctaactactgcgagaccaccatgctatgagaaagcgcaagccatgtggagtgactgcacgggctctcagagatgcccagccaagccccaccctccatccacccgagccgaggctctgcagcctacagatgatttcaattccagccataatctaactccaacttcacaggagacctgaagcaagaactagccagttaagtctaatcaactcattaaactgtgagagataggcatacattgttgtagcctactaagttttgagatggttggttatgcactgtggattcctattaccaatcggctataattataaaatatccactggcaaatataagttccagaggcaaagactgtgttccttttgctcatcattgtattcataacatgcagcacagtgcctagaacacagaaagccctaaactaataatacgtaaaagtttgaaaaagtttatctgtactagtatgaaagaaagacccatagtcaaacggctgacattttttagcaagtttgatgggcacaataaccttatggtggtggtattactacctctgtctttgagatgagggaacctcagcttttttttttttttttgaggaagtaagcttcccaagctcagaaaggtaggggagagggccaggcatggtggctcacacctgtaatcctaacactttgggaggccaaggcgggcagatcacctgaggtcgggagatcggggccatcctggccaacatggagaaaccctgtctctactaaaaatacaagaaattagccgggcatggtggcacatgcctgtaatcccagctacttgggaggctgagccaggagaatcgcttgaactcaggaagcagaggttgtggtgagccgagatcacaccattgcactctagcctgggcaacaagagcgaaactctgtctcaaaaagagaaaaaaaaaaaaagaaagaaaggtaggggagagatttgaactcagatttgtgcaattctaaagccagcctgtttattatagtctcccaggagactacaacagaaacaatgagaaaacaatttgaaagagatgcaaaacccaccccttgaatcttacccaggactatggagctccattaattgctgtcaacacgctggaacctatttcacatgaagctcagaccaattacaattaatgccacagtcatgactacaaactagaaaccaatgccagaggaagcttaagttaaagaaagcaacgatcacgcacatatattatgttagcaattaggcttaatcctagaatcgtgaagccaaagagaatatattaaagagagaacagtgccctcctgggaagaagagcaatttcaaatagactttttagtggctttctacattacttacttgaatatattatgctcccctagaattactatattacaattactcacgccacattttatttatttcagcaaggaaatgggatggtgcaatgagctcagtgggcagacggtttggttatttcaatgaataatttgaatgtcaacaagttggtggatgctaagatgaaaggggaagtagtaaatagcaaaggtctcaatgcctgactctgagatggagtaaggatgagctatcaggactggcacttcacttctaaatgttgagcactcaggttttgctaaatttataaaagcacatgaactaactaacatcgcatatttccttaacgagaagaccagtttatctctgtttaaaacagttctgatctactcaaatacacatttttaattttcactgaaaaatgttataaataaatcaaaatttaaataaaaaaactgggagggaaaggtagatctacttctcaattcagaagattaataaaaggattaaggaattaaataatcacattctctagcctcagctcacgactttttcaaggctcagtttctcaataaatggaaaagcaaattctcattattctcccaatctgtttgaaagcagagctggggtgttacagtgattaacagttatcaaggcccattaaagttgttaattatagtggcgttcactatctttttccatcatttttagctattgagacagggtctttgtggatcccaaggatcatgtgtttgcagttcaattcagcagccactaggtggtaatattgttgattttggtagccatgaagtgtgatctatcagacctgccctcttaaatggaattatgtacatcccttatatcatcaagatgtaattatagaaataattatactttaaaatatgtaaaatattttaattgtgaaaaatataatcccttataaaagttccatgcatatctggtaccttttaaacttatgctaattctacttaccttttattctaattatacacatgactatcttcaaattatacatataacaaaaataaagtgtctggtcttaacagaaatccagcttatattcattgcttctggcttatttttagaagagatgaaaaagatgcacataactttccttctaaaattatggccgtcctctgtagtaaataattatttgccacttgaacttggaaccactgctattcgcaccattgggtaagtaaaatttctgtgattaactttctgagacccactgtctgaagcatctgataagatttgacaaaatcacgtaacaacagcagcggctgatatacatagtgccaggttctgagctaactgctccacatacattagtcctgcgttcctactagagctgccacaactcatttaaggccaaatgaactcagcagaagaaacatacccgtattatttgaaggaatgaaaagatctttccagaattggacattgtctgcgaaactatgtattatataacatgtattatgcacaataactcccagaaggcaatacaggtgttaagctctttcattatgaagaagacaataactgtataaatcaaagagaagtcttgtgatagcatctttgatcaatcactgatgaaaaccttgccatagttgtcaagaatccaaagagaaagtggtggctaggccaataattacgtgaggcaatttatcatgagaacaaccattatgcaagatgcagagctcaatactgattccataaaatacttaaatacttgtcactgcaattctttactaattacaatggaaactttgttgttattgttgggaaaggtaaaagaggacctctattaagacctcagaaaaggaatctttgaggttaagctgttacccaaggttaaggcaaatctactattctgatacttttctcctttagatgatgaaacaaatatgcttatttctatttacccctagggtcctgggactcaaaagaaaccaagtggttctctaagttagtaggatggcacagtaacaacgctgggattgagctcaccctgaccctgagtaagttaccaagaccctcagactcagttttcttatctggaaagttaggaatgaaaaaaatcagtttcaaaggattgctgcaaaattaaatgaagtgctatgcacctgttgaagtcaagtatagcatgctccccaatcaccccccaacacacacaccagaactaacaattcaggaaggaaattttcagtatattggtgtttctcacagagggtcaaagtgggacaataagaatgccttaaatgtaacacattgtatttattaaagctttatagtttatatggtggtttcccatgtatgttatctaatttcatcttcataatgacactgtgtactagatattactattcccattttacagacaagaaaaaaaaaaaggccccaagaacttaaaatcctttgcaaaatcacatagaaaggttaagtggtgaacccagtgttcaaacctaggtcttctgacttcaagcacaaagctctctcactacattcagatcacttaaaaacacaacattttattgtgcctatcgttaataagactgtattgcacacttaagaatttgttaaagagggtagaattcatgctaagtattcttactaaaataataaaagttgtatgtatgtagaaaaaagtattgcttaatctaattaaactaaacagcttctgcacaacaaaagaaactagcatcagagtgaacaggcaacctacagaatgggagaaaatttttgcaatctacccatatgacaaaggcctagtatccagaatctataaggaacttaaatttacaagaaacaaccccatcaaaaagtgggcaaaggagatgaacaaacacttctcaagacatttatgcggccaacaaacatgaaaaaaagttcaacatcactgatcattagagaaatgcaaatcaaaaccacaatgagataccatctcccaccagtcagaatggcgattaaaaagtcaagaaacaatagatgctggtgaggctgcagagaaacaggaatgcttttacactgttggtgggaatgtaaattagttcaaccattgtggaagacagtgtggcgattcctcaaggatctagaaccataaatgccatttgacccagcaatcccattactggtatatacccaaaggattataaatcattctgctatagagatgcatgcacacgtatgtttattgcagcactatttacgatagcaaagacttggaaccaacccaaatgcccattgatgatagactggataaagaaaatgtggtacatatataccatggaatactatgcaaccataaaaaaggatgagttcatgtcctcctagtttttccaaaacaaactaatgaaatgtgaaaagggtgaattcacaaggggctatacatagaaagaaagagcctgactgacttggctccatcctctacttctacctggggacatttccaatcatcagaaagaggttaatgcaattgcagctccagagtctcatcaaactatcttggattctgccatgatgaaagggaaatgaggagattacccaataacaccatcatgaggttgtccttagtaatacttcaattcttacatggttgagggcctactcaaagttgtaaaaatcagtttaaggtatagtcccctgttctaccaaagcaagcaaataaactggttccataacgttgaaaagatgtaggggtgtgtgtgtgtgtatgtgtgtgtgtgtgtgtaaatatctgctgctgctctaggaaagaccctgtaagagttaatgatacttatctgacaaataatatcttacctccaaacccaaccactaccatctctcttccactagcatgtagttctgagacagtgtttaaaaacagaagacaaggctgggcgtggtggctcgtgcctgtaatcccagcactttgggaggctggggtgggtggatcacttgaggtcaggagttccagaaaaacaggagacaaactctttaaaaaactaagagttaaggccgggcgtggtggctcatgcctgtaatcccagcactctaggaggccgaggtgggcggatcacaaggtcaggagatcgagaccatcctggctaacgcagtgaaaccccgtctctactaaaaattacaaaaacttagccaggcgtagtggcgggcacctgtagtcccagctactcgggaggctaaggcagaagaatggcatgaacctgggaggcggagcgtgcagtgagctgagatcgcgccactgcactccagcctgggtgacaaagcgagactccatctcaaaaaaacaaacaaacaaaaaaattagagttaaggcctaaaatgcaaatacccacggaagaggtcagatcctgacaatgatctcaagatataaatgactgagatttggttctatgtttgtgattaggtttaaaggatggtctgtgtcggggtaatctgagagaagatctttactctctcattttggcatattcataaaagtgtacattgaagcacctgtgtaatgaagagcccaaatgaaataaagaacaggattatggcaataagaaaaaaaatatgaggaacaggtaaaacaccctacatattagaggcctcttcttgaccataatgtaaattagggttcatgttacatacctaataataacatcacaaaagtgtgacgcctgaaactgaagtgatgatggaagcatgagcaaaataagtgaagtcaatccaagtcaaggagaaagaacggaggggttccagcaggttcatgtgtgtgcacgtgtgtgtgcgtgcacacgtgtgtgtgtattagactgtcttgagctctcaatgcctttaaacatttccttgcattttctcattgactgggaggcttccattagatagagccatctagagcgatgttgaagaaggcagccataggaaacaaaccaaggtactagctcatagatcttgcttgataagggaccttcagatttccttttaagttgtccagttcagcacccaatgaaagtaatgagactgtgagtaagaccatttggtttccaattctaggttcaggtggctaagggaccccagttggtataatgatggagaagcaatgaataggaagcagaatcttagggaaaaatgtgaagtgcgaagtactatagaaaattgtttttcaaaaaaaatttgtttactattttaagaggtactcactggttaaaacacccaaatttataacaaatctgcatacgcctatgaacctcatctgcctattttctacctgctgcagcaatgaacctgtttgattagttttaggagtaatagtctaaatatttaacaataacataggtactaactagcagaacaggcaacctgtatgggtgttatggtgaggaccagctgaatatcagtcttgggttagttctcttttgttttttttttttttttttttttcagagacagagtctcactctgtcacccatgctggagtgcagtggcgcaatctcggctcactgcaagctctgcctcccgggttcatgccattctcctgcctcagcctgttgagtagctgggactacaggcgcttgtcaccacgctcagctaattttttttttttttgtatttttagtagacacggggtttcatcgtgttagccaggatggtctcggtctcctgacctcgtgatctgcccgcctcggcctcccaaagtgctgtgattataggcgtgagccaccgcgcccggccagtcttaggttaattcttatttgttctcactgttaggtagtattcattttttgcttcatttttatctgaatgataaaataatatacctaataataacataactactcttctgacccttgcttttatccacttaaacatatacattagggatcctccaggtcaatacatacagactttttttttaaaaaagatgcttagtattccaatgtatggaaataccataatttcacaactccattactggatagtcattagaaaccgacttcgggggaaaacatacgctctttgcaggaatttctgggaaaaaaaatcccctctagcccttttagataaaagcctacctaatagacctgtgataaaatagctttcttttctttattttttttttggaggagtctcactgtggcccaggctgcagtgcagtggtatgatctcagctcactgcaacctttgcttcctgggttcaagcgattctcctgtctcagcctccagagcagctgggattacaggcgcacaccaccatgtccggctaatttttgtatttttagtagagatggggtttcgccatgttggccaggctggtctcaaactcctgacctcaggtgatccgcctgccttggcctcccaaagtgcagggattacaggcttaagccactgcgcctagccaaatagctttcttcatcttccaaggattactgttctgttacttaagtgatccggaagtcacaagagattatcttaattcttggccatttaatgatctttggaaccacgcctgtcggtattttcttgagtagcagtggagtacacaagaacccattttggctcaggcagagttcatgttctctagccatacttcttctttccacaagctttgtaaaggacgtcagaattatttccctcacaggttacattgttcagattactgacctttcctgatctctgtaaccttagtggttgaatatggtgattcagatagttttgtttctttatttctgggggttgaagtgaagagattatgtaataacctgctcttattttgcaacttagagatttaagtatggcctttgtcaatctaatctgaccaaagtatttactaagaatagattacgtgcatatgcccaacatagaaagatgattctatatccaggaggtctgaccacagaaatgtattatcgaccaaaaatgtacctcttcagattctgggatgattcagcaattctgaaaggatttaaacagaaaacccaaggaggaggaaaaaatagcctctaggtacattacacaattcaagctgtttgttcataaattcaacaaacacttattaacacctatcatgggacaggctgagcctatatgatgttgggacaagtgagtgaacaggacaaaacagacacagtcccagctgtcatggaatacccatctatttatataattccttttgcattcaatgttgaaaatcagaattactgcttttgtttattttaaacctggtaaatttatctattttttactagaaaatagttcttttttttaacttttattttaggtttgggggtacatgtgaaggtttgttacataggtaaactaaaacaatttttgatattaagaatatctctaatctagccaggcgtggtggcaggtgcctgtagtcccagctacttggaggctgaggcaggagaatggcgtgaacccgggaggcagagcttgcagtgagccaagatcgcgccactgcactacagcctgggtgacagagcaagactctgtctcaaaaaacaagacaaaacaaaacaaaacaaaaaaaacagtatctctaatctcagctggtcaaaggaacttagaaaatagtttcatagactagggctagaatggttcatgcagaatcattcagaatttggctccattcatggatgccaagcgaaattaacggagaatgagataaggccaagtgtgggagagtgctgggattagagctagtttaggttccagccctccctgccaaagctataaatacaaatgaccaatttaacagcatgaaaagaccacctacaagatctatacctgggatctaatcagttgctctgtgccttcttttaattataggatccctgccatgtttatgggaacttttaatgtgagcatcacagttttgaaggccatatcattatgaccatgtttgatctgagggtgggaaagcaggagctcacaaaatgcctgcacaaggttattctgaactgagctataaaccagcttcaacaagagcctagtgtggaaaagaaaaaagacacgtaagaaaaaaggcatggatatcatggagtttgcaaccccgccaagtggtgccattaaaattacattcaattcttctcagaaaatgaaattaagaaaaagtaccacagttttgtcaaataacactatataaggacattctgagaagggaagaatgaaaaagacataaggataaacgcatcatctccatctgagtgtggcaacaggatatgatttacagaagaaaaattaaatcatcatgattgttagagctgaattgcagctgatataaaaataatcctgagtcacaacgcacgtgacttctcaggcatacagaacacaattgcttaaaactttataagtgataagactcctaatagagaattagctttcttgcaaaacactctgtataagctgtgctgtagaagtacagaagtatcttttctcagttacatttgttatatgatatcctgtgctcagatactctgatacttcaggtatcgcctcattctacactcttttctttgggctatctcattcattcctatgacttgaacctttgtctcatctagctctctcccatgagcccagcatctctacctgcgcgtctcacatgtacaaagttaacctgtctaaagttgacctcactgtcttccatctcaaatctagtcttatcagtatccaaccagttatccaagcaagaaaaaggagttaccctattctcctctgtttcattttgtacatccaatttattaacctgtcctgtaatgcctaaaacagccctttactgtttacaattatgtcttttccttcttatttttactgccattgctttgtttgtttgtttttgagacagcgtcttgctctgttgctaaggctggagtacggagaatgatagttcactgtagccttgaactcttgggctcaagcaatcctcccacctcagcctcccaagtagctgagactacaggcgccaccactttcaactaatttttggagagatggggtctcactttgttgcccaggctggtttcaaactcctggcctcaagtgatcctcctacctcggctttgccattgcttttgctcaagttcttaattagtctgttacttgtccaatatttttttatattactgttagttataactaacatatttctcagccacaacaaaaagcaaagagatataccccctgcaaaataattgcacaaaccaaaacaatgcaaacaaatccaacatgatcatgtcactcctgtacacattatttttcaatattatctgcggcctgtcagacaaagttcagattctttagcaagtcatattgtgactcttatcaccgttttggtcttgtgttcttctcatttgccttgtgatctagccacaccaagttgcttgccatttcccaaacacatcatgtctttcatccttctgagacttgcagtgttttcctctgcctggaatgccctttgtagcctgtctgctgagaatttctaatcctcaatttcctcatctgtatagcagggcggtaacagtactcacttcaaaggactgtcatggtgactaagtaaaaaggtgatttgttccccatggtatttagcagatagaagcactcagtaaatattaacattatcattgccatcattattattttgttttttcaactctaaacaaaaatatcttctttgctgaaagtcttacctaaaagtgttgggcattcttcctctctgattctatatgcctaattatagtaccacattacaccaactccaaaattgatagaattttcacgttttagagcctctgatattggggtacatcttaagagtctacatgttgtggcttatggcagtaatttttctttttttgtagtacatgtaataatggtatttcttacaataaatagcgtattagatgaaatactataaactgtatgacaattgtcatagaaatttgattatctatggtgaatagtgcctatctgtggcaaatggaaaatcctacattttctacgaatcagtgaaatatctacgcaataaatgaagtactatttggaactctacacagtagagaggagatactccatttgtatatactgcaatttggcaaaaacccagcccctacatcatagcatactgctgtgaactataatgtatttcttaaccacaaaccctaaaccatacatttcagaaatgtagaggtaacagcctgaccaagtagcatgctgtcacctcctttggttacgtagccccacttgagagccaaacaagggccaggcccagagtgggcagggggctagcttgtgaaactctgcattccagtaacttaggattcaagctgagaaggcagggcgacaatgagaagagagtgtaggaatgagctgaggaaagcctacggaacatgcctctagactagcactttctgatagaaatagaatgtgaaccactaatacaatttagattttctagtagccacactcaagaagtagaagaaatataatttagctaatatattttgtcaggttattaacatatttattaacttacctataaatgaatattaatcgttttatttatttaacatatctaaaatgttatcactttaccatgcaatcagtaaaaaaaatcagcaataaaatatttgacatgttttttctgctgagttttcaaaaccccgtgttttaccctcataagacatctcagtttggattagccacatttcagcttctcaaaagccacatgtggctagtgcttgccacatcgaacagcacaattctagactgttttgacaaaatgagttaagtaatgaaataattgtaacaagctatttcaacagtagacttttctaccatacggtattgggaatgtttaagattcctacaatagtatatatatttttatattcttaacttttttaatagaatggtaatgtttccttcaaattcaatctgtgtcatattttggctggttttgtcttaagcatgatttgatgttattcctaatgttacttttacctcatctgtaaagtaggagctgatgagctgattgtcacttttacctcatctgtaagtcaggagctgattggccgggcacagtggctcacgcctgtaatcccagcactttgggaggccgaggcgggtggatcgcctgaggtcaggagttcgagaccagcctggccaacatagtgaaaccccatgtctactaaaaatacaaaaaattggccgggtgtggtggtgggcgcctgtaatcccagctacctgggaggctgaggcagaagaattgcttgaacccgggaggtggaggttgcagtgagccgagatcgcaccactgcactccagcctgggcaatgagggtaaaactccacctcaaaaaaaaaaacaaaaaacaaacaaaaaaaagagctcgttgtattcaattatagatcttttcccattaagatattccttgggacagagtgtaggagtatacaattaatcttagtactcttggtctctaacatagagcctaacctatagcaggctcagaataaatctttgaatacacattaaaaggtgaactaagctagagagtactggctatctgggttccacactggaattacgtggagagtaaaaaaaaaaaaaaaaaaaaaaaaagaaaaaagaaagaaaatctgatgcctggccccaccctgagagatgctgatgatgggtctagagttgggcccgggtatcaagattttaaaaaatctcctaagtgattctagtatgcaagagagttgagaaccactgttttaggactttcttagaacagcttcctatggccatacctttacttccctgtcataagatccagtttccctcatataaattccctttctctgaatagaccagaattgtcttgggagccctagtagagaagaggctaacacattatcccaaatggggatttgcaaattgcttttccaaggtaccaaagaagattctcaaggttttaaatctattcatatttatgtcttttcaacaaaaagaataaaattcacaatataagctggctgctttgcagacgcaggattctaagagcattacagcatgcaggtaaatagtaccctgacatgcacatggcaaaattttctagaaatagaatagcaattaaaaataaagatggaatccaagtacaaatgagcctcatttcaagttaattctgcatatgtaaaaagcagatactattaactggggtcagcaaagggaagtagttcatggttttcttcaggctacttaggttatatttacacagtataattatacagcaatgcattttttgataagtcacttataaaatccatctcctatagtcacatagcacacaagtattggtatctttgctctcaagatggtactttgtctgacagcatttcttccatcatatatgaggttctgtaatggctgagagagaaatctgacttctcctacttcaatacagacaacctttcatcatggagaagggagcaatggtctctgcaccaagggaacagcagctggaatggagttcctctgactcatagactgagaatttccctgctgattctcaagctggtttggccacactttatgcattcaccctgcttaacagtcttttgttgatggtgtggtaacaagtggccttactcagtaatagaaaaagcatgttgagatatcccccaaaggctcctatgtgtgtttcctctagctttccagcagggaaaaaagctgcctgcaacaaccccacacttatttttgttttacatcttaagttaaatttgagaaattagaataggaattatctaaaagacatgatacttccatgttcactaaccctgataaacagaagttccctactcatgccaaaactgtgaaggaaggaaatctgttaagatttcaaagaaagtgtggagtctcatgcataccagcacatcactttcactgactaacccccagagggctgataggtagcaagtgattgatgggtgacattcacttggccctaattttcctatctgaaaaggaatggaaaatataacacaagtttccaagttgctacactcataaaaccaggagggtgatcaccatccacctgtccaggttgaccacaaatgtgaaatgcatgaccacatctgccttacatgtatgtcatttgtcagtaaacacgggctaaggaattccttgagccccatgaagagacaaaaaagtttgtcctcagagaatttacaaaagccagagtaacattcaagaatttaaaatattaaactggatttgaaaggtgatatgaaagctacaggacaactttatctaccgtgagtatgtaaccaccatggaaagatgggctaatgaaatcaccagagctgcctgtggtcagccaggatgccaggggccgtgggcctcagagaaagattcatggaatgaaggatgtttcagggccacgtgtatgtgcggctgacaaagcttcctacctttttggaagaactcctctagtttgtccttgaaaggctggagatactcctttggggactccttgcacaccaccaccatctgtttctcacttgctgtgaagagaaatttagaattagacttaggaacacagatttgctgagctcctgctatgggccaggtactgtgctatgcacttggctatcaattgtgcacactccttgtcaaccactgttggtccaaattccaggattggggggcagggggaacaaaacccagaaataataaacaaaccaacaaaaataattagttcattctacaccactcttgaggaacagggcaatgtacaatccttccatttttcttctagagatccagaaaagtctctgacctgggataggtaaagtattctgcttgtgttctcccaaagataaagagaggcaaaaactacttgaggattagtctcacgaaattaagggcctcagccctcctcagattcacactccaaaagtagagcttgaaaaatatattgcagaaattctcaggcacccaagttgtctagaactaccaacctagtgattggccagggtgacacacgcatcccaacatgagaactaagaccaggtcggggaggaccctgtcagttcttcatgcttcccgttcacctacccttccttttaatcctctactaacacaagggaaataattttacataatttacttcagatagactatctaaaatttgtaatagagtactttttgataatcaggtctgaggtgacttgactttttaaaaatgacctaccttattggatagttacgatttgtctacagggaagccacagtaaatcatagttcaccatcacaaaaggcagttaacccagccaagaggcatctccccaaggttcctatgtgtttgtgccagttacagcatgcactgggaaaagaaaggcttcgtttctacaaagctagagctgagtcaagatcactttcatctgttgaccatggctggaaattagatatgttcttgtccaaaagcctattaataaagcactggatttcaccataaagatatcatgccacctggggttcacaaaatagagaaacatatactacagatcttggagcaatttataaacacacaggtaaggtattttggaagaaggaggttgggaaggagatctttatttacattgggaaattcctatccaataatttggcatatttaaaactagcatctcagaacgtatactgcaggcaaagcaataaacatgtcagttcagaaatagagaaaatgcaaaagacaccacttaaatgttctctgaaattagttatctgacacttttcatttgcaatattgccaactagattgcagaaatcctagacaaccctggggactacaaaacggtgctgaaaatgaaagtacaatttgagggaaccctttgtcattttctgagtcaaggtcagaatcacctacattttcagaggtatctagggatttctcatgatacagggatgctaggtcacaggacaggggtaccgaaattcaagctctatctattgacattgtttcttaaagagtttttatagagctatctagaatatctgctattagctattctgacaaccattccaaggctatctaggaaatcctgtccgttgggaggcaaagactaattttttaaatgacttatcttattgaaaaaatacaaatcttaccttgaaacaactagaacaaattctataaatccagtcaaataatcatttaaaacattcattttttccacatttttttcctttctttgtaagcctttttgtcctctctacaataactactttatagcttctctgctattatgagattacccttcacctcttttgaaatagatggatctgtggccaaatggtaagtatatccttcccactaccattcttttctcaaaataggacactttgcgctagagtagtgtccaaggagcgagagagtagatagagctgggatatattttgcaggtgtaacaaataggtcttgctgattcagtcaaggtagggttgaagcagatggaagggtaaaggagtgggcaatgggttgctggaagtgccatttgctgagatagagaatagtggggaagtatcttgttggattatgtttttttaagagacagaggagatcaagagttaaatttgatgcttaagttttctctagtctctataaattgtaaggcaatcttgtcccctgaaaacaaagggggaaaggtacaaaagaagataaaactattaatgggttctcatcacaaattcaactaaattcaaacttcggggacttggattatttaaggccttttccattatggcatatttcagctctatttcccacatgtatttgactaaccaaaccaaagctgttcaatgttttccagttacattattcggcattcccagttccatgtcttcattcatgtggttctctgctctgctctcatgccatacattctttcaacaatatctgacaaagtcctgttcatcctaaaaagcttctctgagatgccaacattgccacaaagcatttttcaatccaatgtttttgcatctttcaaacatatctatcaccgtctgcacagtgtttatgttttacctttaatatttatgtaaaagtccatacattaatccctgagaagtcatcatgcaggattcatttacttctccccaaacttctctagagagctccatgtatctggcgaaagcatcagatttccttatcttggctgaatgtcgtggttcgcacctgtaatcccagtgctttgagaggccttggtgggaggatcacttgaggccaggagttcaagaccagtctggcaacacagtgagaccttgtctctcaaaaaaaattttttaagttatccaggcatgatggtgcatgcctgtagacccagctacatgggaggctgatctgggagggttttttctgcccaggagttcgaggctgcagtgtcataccattgtactctggcctgggtgatagagtgagacagacagacaagaaaggaaagaaagaatgaaagaatgaaaggaggaaagaaaggcaaaggcaaaggcaaggcaaggcaggagggagggaggaaagaaggaagagagagacaaagagagaaagaaaaagaggaaggaaggaaggaaaaggaaaaaagaaaagggaggaaggaaggaaggaaggaaagaaaggagagaggaagaggtaggaagggagggaggaaggaaagaaggaaggaaggggaaaggaaagaaagaaaggaagaaagggaaaagtagatgaagaaaaaaggtttcttcatcttaactagattctcacgtgtaggaaagtttaaataaaattagcaatgttggcttggcacagtggctcgtgcctctaataccagcactttgggaggccaaggcaggtggatcacttgagcccaggaatttgagacaagcttggccaaagtggtgaaaccctgtttctacaaaaaatacaaatactggctgggcatgggggtgtgcacctgtggtcccaggtattcagaaggcagaggtgagaggatcacctgaacccagggaggtcgacactgcaataagccatgaccacacctctgcactccagcctagtctcacagggtgagaccctgtctcctgtctaaaaaatatatatacatacatattagcaatgttgacccagactccaagtgggctttccagagatgcaatgtgacttgcttgcccttcccctgcaccaaggggtcaccgtctctgtgtctctgtactcctcaaacatggtgaggtgtcccaagatgatctaaggtttgagtgtattttaaagacccccagaaatgtccaccacctcatcccatgagtcataagcaaggtaacaaaggtaacaaagatgattatcctgattgggtagttctcaaggtaggcagggaagcaggaaagacatctgttttaaggaatcagcatttctcaatgaacatttgtggccacataaactttcctgattatttccagctatgattctgagaatacagttaaagaaaagctaggatttcccacaatataaattgggaggagttccttaaattatttaattaaccctctactatattcaaattccaacaatttcatttatatagaattgtttttcatgaacgtagtataaaacatgcctgcaatttactaataggatataatcgaacgcctgacaataactccttcaaggttacttctccctggtgaaagcaaagctgaaggcagagcttgtttccccaattacaaaagcaatactttctcttttgcctgaattcacagggttgatcgctgcagctctccctttgtgctagatgtggtgacagagcccatgcggtgcccatcaaattgctccaattttatgaggccatatcatgggggtggtaaagagcttgtgcttggattgagacccactaggactcaggtgggctgtggcttgtttttctcatctgcaaaatggggacctcccgcaacacaggcatgatatgatatttaagataatacatacatagtgatttgcagaatgcctggcactcacaagcaggctcataaatattatttgttatttttatgtttgactaaaattggttgggaaacatgtcaaggtcagaacagcaagagagtcatggctggggattatttgctacagatgctgggcactgtatttacggaaatatgccacggtgcaaatctcctgtttagaacatagggataatgattttcattcccgtgctgaagttccaccacccattgtgagaattcactgaagaatgcaggcgaagtcttggggaaagacgaagcaaaatgggaaacaattcccctaggcctctgagcttcgcggttttgaaattagaaactgaaaccagtacaaacgagagcagctccactgctgtgctccaaggccctctctgcagccccacgggctgggattcccacgtggcctgtaagaattaaacttccccacatgatcaaaggagagggctgccctccgacggtccccacagagccacgcgccccggaggccaggcagcttgcctgctccaatttattgacttggcttatccgagatgctttctagcagacaaatgggagacctgaaggctaattaatgatgacaccggagactggcagtgcataaaggagagaggtcatggacagatccacaaatgtccttcactgttcaaccggaagactcgcatacgatattgctagaccaccaaggttgcctcaggcgtgggctgtgccaggagctccagttaaaagccaaagtcaccccaggttctctttctgttatttttctctttacacaattttttggcaattaaaaatatattaatttccgaagttagttactactaagtgatcactgtgagacagagatgaaatattaaaaaccaatacatagtgaaataactgagactacatggagaatattttcacttacaggttaaacactggtggagtattttagtgaaaggaaagatatggcctagactattttaatatttcagatattaggctgttaaggtcagaattatctgttttttgtttttcacccctaagaacaagggaataaagcttattaagccacttaaaaagcctaggcaggttagaaaaatgtagcagtaagacccagatataattcatcaaaatcaaatacgtttaattgctttgtaaatcaaatgtatgtgggcaattggtatgaagatatgaaacttgtttctttttgtatgagctgaaggacctgtgggcttagttaagtcagaatacagttttagaggaaaggaaaggtttatcaggctatctgcttttccagagttctctcttcttccctgtctggttacctaagtcttaccccacccttccacagtcctgcgccagttctgcctcttcctcacttttacaagatccatgtcctgttcacaagctccctgctcaaaggaccgccatagaaaatggctgcagcaacatatggaatttttttactaaagcaaattcttgtattatatcaatggggcttagatgagagacataaagtgaagccagagatcaaaagcctagaatgcttggttaaggagtttatcatacaggaatccattcaataaatacatcagttcggctaggcgcggtggctcacgcctgtaatcccagcactttgggaggccgaggcgggcggatcacgaggtcaggagaccatcctgcctaacacggtgaaaccccatctctactaaaaatacaaaaaattagctgggcgtggtggcgggcacctgtagtcccaactcgggaggctgaggcaggagaatggcgtgaacccgggaggcggagcttgcagtgagccgagattgtgccactgcactccagcctgggcgacagagcgagactccatctcaaaataaataaataaataaaataaaataaataaacacatcaattcaacacatgtctactgagcacctactacgtgccataaattgtgtcagatattggggttccatcagcaaaagaaacagactaaattctctgccctcagacattatagtgaatgggtcaccaactaagatttcttaatgggtatggcacgcagtaattattgtttctagtaacttgaactgcaggcaaacctacgagttatttccttccatgttcatcttttctactttaatccctttagtaagaacaggaccgtctagtgcacttcctggtggtggggtgggaggacgtggttagaaaaagtgaatgtccttttagcttcctgcccccaaacacacttttatcaaaacaaatgtaaaaacaaattcagaactcagaatctcaatattagcttaacttgcacaattttcttcttatggcattggccttaaactgactaaggaattacatgaaatgcaatgtaataaaatactaaagttagaacagtaatattttattttggctagcagcaatgcatggacttctatgaaaggggaaaatcatacttacaattaataaaatattagatattttttcatttgcttattaaagcttggcacaaatgagaaggtactattttgtggctatctactgtacacacttttttataaggccatatagaaaaggccacacaaagggaggtttcaagttgatttaagccaaaaacaaatgacagaagcctgcaataaaaagtacctatttcatgttcttgaggtctgatgctacacagcaggagtattttaaatcttggcagggttaagagtagggagtggtattactggaaatcacagggtgaggataactaggagagggcaaaggggaaatctattcaaggagacaccgacataagttagattttgaaagggactgctacacccattttctactaaatagcccttcaaagcccacatttctcagctcaaatcagacaactgtgcattaatgacccatatgtggaaaatctatatgtaaccaaaggtgttttccttctttaaccttggtttggggattcacctgacatcatatgcaaatttttcctcctaatgactctattcatccaaaggcaagacactatatttaaagtggtcaaaaaactccgaattcccagttgtccattcaagttaaaacacaggctttagacacatggaacccaggtcaaaatattatctcagaataatgtagctacatacatggacttagacaaacaagtgcctttttatagacaaacaagtgcctttttatatctacacatacatagtgtctatgcctcaaaagctaattagaacattgtacttagtgaatagagctttagtatactccaagaagtagaaacaatccaaatgcccatccatcgtctgataaatggataaataaaatatactttatacacagaatgaaatatttggccattaaaacaaatgaagtacaagtacatactactacatagaagaacgttgaaaacattatgctaagtaagaaaagccaatcacaagagaccacatatcctatgattctactcacatgaaatgtcccagtaggcaaatctatagagacaaagcggattagtagtggctgaggactaggagagaaagagggagagagagagaggtgacagctaagggggtaagggagaaaagttttccttttggagtaataaaaatttcaaaaaattgattgtggcaatggttgtacaactttgtgaatacaccaaaagtcatcagattgtacactttaaatgggtgaattatgtggaatgtgatttcatcttaataaagctgcctaaagctaattagaaagtcagccttaaactggaactataatgaacagataaatgaagaatgcctcatctgtacttctttatataaggtaaataattttaaaaatcttaggtgcaactatgtcttcattataatacttacaatattactaaactaggaatcaaaagtgggaaatgagtttgagatgcacatgtaattgagaaattaaacatattagtcaatcttcaaaaagtagcaacaaacgttattaaaataaaagacctggccgggcaaggtggctcacgcctgtgatcccagcactttgggaggacaaggcgggcagatcacctgaggttgggagttcgagaccagcctaatcaacatggagaaaccctgtctctactaaaaatacaaaattagccaggcgtggtggcgcatgcctgtaatcccagctactcaggaggctgaggcaggagaatcacctgaacctgggaggcggaagttgtggtaagctgagatcatgccattgcactccagcctgggcaacaagagtgaaactccacctcaaaaaaaaaaaaaaaaataaaataaaataaaatacctactaaaaataactgaactcaataatagaaatacaagtaaagcatttaaattaaaagtgctaacttttggaaaattaaaacaatagctttcgcacattcttaattgtggcatacagctatgtatatatatttacacatatacaccaacaattggtacattagaaaaatttcccctttgaggaacatcacacaacggggcctgttgtggggtggcgggagtggggagggatagcattaggagatatacctaatgtaaatgacgagttaatgggtacagcacaccaacatgacaaatctatacatatgtaacaaacctgcacgttgtgcacatgtaccctagaacttaaagtataataaaaaaaaagaaaaaagaaaaaaaatttcccctttgaactactcttgatttaaagatgcatttattcttagtttttcatacactctatttggctggaaaagttatttaatatctgactcttagtttcttgatacataaaatcttgtgaggactaaataaacatgtgaaaaaaaagcattttgtatgctgaatagtaaaacgctagccaaaatattcttcagctattttaaataatcaaacagtagaaaggctggctagataacatactgtacgcggctttattctttgtttccaagaagagctaaacaataacagcaacctcacaaactctttgaataactgacattcctaatgtttgtgtgtttaataaacaaatcatgttacagtctaatcattttcccagtccaactgtcttttaaaatttgcaatactcactttttcctatttcttgtttcatgacccactgaaatttacttcctccccattgtgacactgagaaagcactctgaagtcactaattaacccatcctgtgggcagtgtcctcattttgtatctccttcgctgacaacccagcaggattctgcatcttgactacttctcctttgtaaaacactttgtcccttagcgtctgtgttccccattgtgggctttcctcctacttctgcctgccctgtttcctatgcagcctcatcttcctatacagagtcattaaacgttaaagttctctagggtttggcataaggctgctcctcctcccatgctatgctctctgtctagacaatgtcatccaggtaaacatttcagtaaccatatctgggatgtgtctcccaagtttacacagctagcccacagtttcacctcctacggaactcctgaattcattactcttcaccaggctgctatagtctcagcctaactgttcttcccatatccaccctgcctctctctgatttgttctccatacctgagtcaaagtgacctttataaaatctcattatgccagtcccctgcttaaacctgcaggcacctctattactctgagaggttgtcttcaatccctcaagctggcctgcaaggccctccatgcgctacgtcttgcctgccttcccagcctcaccctgctctccctgccacagtggcccttctttccattcctcaaacatgctcacttcttcccattatggtgttctcctgctatgccactctccttcacttcctagtaaccaggacctagtcagtgcttagtcatcattacgacctcagctcagaagtctcatcaggttttttttttttgagacggagtctcgctctttcacccaggctggagtgcagtcgtgtgatctcctcggctcactgcaagctccgcctcatgggttcacgccattctcctgcctcagccccctgccccccgctccctgtgcaaaggctaattttttgtatttttagtagagacggggtttcaccatgttagccgggatggtctcaatctcctgacctcgtgatctgcccgcctcggcctcccaaagtgctgggattacaggcgtgagccaccgcgcccggccatcaggatttcttttccaccttccattctgtgatgagagaccctctgttacaaagtcatagcactgtatacctttccccttttcatgattattggattgtctccctcattaggcagaaactgtatttttcttactgttaaatctccagcatctactgtaatgtctatctagtgaaagctgttccatgggtatttgctaaataaatgaataaactaccagttaaaggggagaaacttacacatgtgcagtatggatattagtgtcttgacagaatttggctgtagtacatgtacactcatgtacctcagaatgatgcttctgtcaataatggaccacatataaaacaatggtgccataaaattataatgaagctgaaaaattctgatagtccggtgatgatgtagcctttgtaacactgtagagcaaggcattacctttcctttgtttagatacacaaatgcttaccattgtgttataattgcctacagtattcagcagaatactgaatacagttacagtatagtacagccagtagtactgtaatatactgttaactatattcagtattctactgaataatgttggggactgtaacagtatagaaacctgtgcagatttgtagcgtagacgccataggctataccatctagcttaggtgtgaagtaggctacaccatctatgtttgtgtaagtacactctatgatgtttgcacaatgatgatattgcctaacgacacatttctcagaacatatcccagttgttaagtgacacatgactgtatgtatgtatatgtagacacagacatatgcacatacaccgacacgtgaaaaacatctctcttcatttgtataatacatgtagatggaggcaggggctggagaagacacaagtacactgacattcactcattcacccactttcactcacattcactcattcagatacgagatacacatttttttttaaatccctgtccgggttccataaacattcatacattcaaaatacttaccaagtatctgctgtatgccactgagctaaatgttggggacaaatatttaatgagacctactggtcatttctcctctaaaaaacattcacagtctagcaacaatgagaaacaaggaaatgaacaaattgtgatatagtgtggtgtgatggaacgctgggtataggcctctatttcagactgggccaggagttagtagccaggaaaggctctccaggagagaaaacttatgagttgaactgcaaaggtcaaggaggagctagccctcaaccacagtgaggaaagagaattaaggtgaaatgtcatgaataaaagtaatacatgatgagaacgcacgggccatttgaatgagttaagtggtgtagcatgtctggagctgtgggaccttctctcctcagatcactggtgttctgcattcagattttggtgtaaaggaaagagtgtgcgtaggggagaaaagcttctgggccccaaaggtatcccaggttacacactcaggtgaacggtgaaaaggctggtgaccagcctggttaggaaaagtgtcacagacataaggggcttgcaattttacttaaagtagttaggaaaagtctcactgtgaagctatttgactagagatttaatcagagtaagggagggagtcatgagcaagctcgaggtggaaaatcaaaggtgttatttagagcacattaagtttgaaatgtgaattagacactcaagtatatataaaagtctgcagtctgggactcatggctggagtagacacacatgccaggaagtcattggtataaaattggtatttaaagtgatagcaaaatatgaattgccatggggagaatacagccaaggaagagaaggtgttgcaggacaaaccctggggcatgtgcacagtggaggagaggccagcaatgaacagagaagagctggtcagtaggaaagtgaaggtctggagttacatgacctgagaagaaaacagaattgcaggaaagaaagagcagtcagctctgtgcagaaggatcaagtgagatgaagacagagaaataacactgattctagtgacacagaggtcacttgtaatctcaaaagcagttccagggaagttgggggtgcggggaaaaagccagcttggagaggcgtgaggtaaatggagaaagattctgtagccacttgtttaagaagttaagctacagaaagaacgccaaaatggggaagtcgttggaattaagcctaaaagatagctctagttttcctggtcaagtgctaaagatcaaatgaggccatggaagtgttgttttcttggtgactttaaaactgatttagttcttatctgcctgggatgtttttgatagtttcctttcatggtagtaggactccttagaaagattcttcctttaatttttcaagaaaactcccaaagccatcatgtcataaaaatcattccatacaagaagatattctctagggctactttgatcacgtgcagaagaggtctagccctttacagagcggctgcctctttctccagaggaatgttccataaaaataaacccaccaggaagctggagtccaggggaatcccatgattctgattcactccactgagggaggctgcccaagatcaaattcaccttaatgtaccatgattgggagtgagtattctccatgaaaaaatttaagcagaggtgacagggccaagtgaggacatgctagtgcgctttaggacttttggaaagacttgcaaagctgggccactgactacagcctttgcacggaattgtctaaagcaccattcaaaggtcccgcctaccaaacgtcacagctgagtcagaatttccactgtgatgattatgtggttacggacgcagcctcggtctgcgagacattagcatgaaacatattcattaatcacctacccatgacgaggcctaaatatagatggattgggcatgatttgatttatagggtgttaagcgattcaaacatttattcaaaaacatccctttcactggtccccacaaaaatcgccaccatgagaagccttcccttgaattaaagatggtaactccagaaatttcattagaaatgcatatgtattcgttgaaaaagaaaacattgtcaagaataatttaatgctttagtagaaatgtatttctaagattggtttaggaggtaggggatttcaaaaacaataggtaggaaagttgtgttaacatggaagaaaaaggcacatactgcaagctctggcatcgaggtggactgtgtggcaggggtcctaggcaggcagcccaggcatggaggtaccgggcctctgaaggggaagggaactcatcttcgggaggagagcagcgactaacttctaaaaagtattaggaaggtaacatatacacacaaagacatttgaaaaacatttttaaaacagcagaaaaaacaaatcggtcatgacaccatgaccaaaacacagtcaccatctaagacttgcatactttctctttcagggtctgggcctcggtatcgcgctccttgcccctccatcattttatgggggttgccttacttatatttgataaagaatttttttgtattttgattctttctattaacatatcatgcacacattctcctgttatttcacaaactccacaagcatgtttaacagccatataaaatttcatcaggtaggcatgccatagctcacttaattctcctgtagttggatagtgaaatcctttctaccttattctcatggggagtcaggcttgagccacatctgtgtccatacaaacttattctaggttgagggtcatttctttaggaaatgacctaaagatacaagatacaaagataaaagatacaagaaatgaaattataggtaaaaaggaaaaacctttgtagaattcttgatattagtggtcaaactgtttttggtacaaaatgggttgtaccacaatgggagagatgaaggggagagattttggaaataaaaccattttctgtaccactctgcagaggtggctggctccatgcaagctagaacggtgcctgtcactgtcatgtagggactacggtcatcacattggaagtgcaaaactctggaatggaaaacagtaagaggaccatccatccactgaagtaatttactcaaacacaagaccataactggtgatatatgagagttgatatagaaattggggattaatcacagcataaaactaggtttgaggcctgtgcatgaaagtagctcttttttttttttttgaaaggccctaatgtgtcacgtttaattggaatgtaaattatgctactgtcagcactagcaaagctgtctgaacttgggggaagtgtacagcaaacttacatcaaacactcagagttttgtaatatacatttatataattatgagcacacaaaattttaaatgctcagactttccaatcaacaatatcaagtaatcatttggacatacgattgcaattcaagtcatttgtgaagaacatatagagcctatattttggggcactcccattgaatagtacttcaagaagcatacaggtatcattagtgcaagacaatggttaaaagtcagcaaaggcagagcaaagttgttagctagaacgcctcactcctcccaaaattatagcaacacatcttatccactgctctaatcaggaaaatagtactcctataggaatgcttaaatactaaatatgtcctctgaagtcaaaatgcatattttgtggcaatttttactagaattgaggattctctcacacatacacgtcttgaaggccacaggcctgagcctctttatgaatcaaggaaatcagtaagaggaagaggtattacagcaatgctggtcttaggactagtccccttccagcagtgcaacagctggctacaaagaggccagtgattaagatacacaaggcctattagtaaaaagcaacctgtccccacattgctccaccaggacagctgcaagtcttccacggtttctctgacctctgagcccatgttcccgtttcagccctcgctggttagtcacattaactgtaattttctactctggaaagtgtttacatctaaatgaaccatgagggaataaaggagaaatgacagaaaggcataaagagaagagagggaaaaaaaaaaggatggaaagttatttttaaaacacacaacctaatctggtggatgaattctggtatctagtcttggctccagaatcactggcaaagcatggagctggcagccactgctaatcagtttgccactgtcttcagatttaatgcaatatttggctcagacatttaaaaaaatcctattccagctaaaatatttacacagtcctatgtgtctcacttaatgcctgttaagcaatcgtcttttaaaactccacagacacttgtaaatctgtcgggagaattgtggcctataaacaaggtttcatataaagaaggctgcattgtcaattttgggggagtagggatttcttaggatgtgtttgaaaatagagttgaatatcagaaacagtttagagtgggtaacaaagtggccaatagtctcgcttgctggacgccgttagtggtattaacgggaagcctccagacactgatctcagctatttaaaactgtgctctcctgtaaatctgtcattgatcctacctctctcttgagttatggcgcagggacagtttctggtccagcagcccctggtagtctgcatcctagggcctgtcaggctagagatgatgagctgctggagcctttaacaggaggctattacgtggttatacgtaaagtgagtgtgtgtaagcatctgaggaaggatgggggactgctagaggagagggggagttctgggcagggctgatgttgagaagaacaagacggctgaaatgacaaataaatagtatccactgagaggctaggtgtcacagattctgaaatgcctattaaactctctaacatcttcagccctgatgttaataagactaggtgataaaacttaaagtcatggaggcccctccaagctatctcctgttggcctggggagcgcaaggaatttgtctctgtctttgggatgagtcaggtatatgtaatatgactcagcaaaaccgctccatcattcaattattcctagattagccgcctttttatttttactccatttcattaatgaatacgccattggttatgattcacaattttattttagttgtttttttttttttttttttgatacagagtcttgcactgtcagtcaccaggctgcagtgcaatggcgcgatctcggctcactgtgacctctgcctcctgggttcaagcgattctcctgccttagcctcctgagtagcttggattacaggtgcctgccaccacgcccagctaattttttgtacttttagtagagacgggatttcgctatgttggtcaggctggtctcaaactcctgacctcgtgatctgcctgcctcggcctcccaaagtgctgggattacaggtgtgagccaccaagcccggcctatattagctatatatagcgaatatcaagcccagcttaaacactcaactttgggatttggtggagttaggaaaaggtatgtcatggattgaaaaaaaaattagatgtttgtaattccaaggtatataatgccttgaaaccaaggtggcaagtattagttgattctcttcaggatcacagtcaggaagggctttgcagatgtttttatgaatcttcagaacagctggagggaaaattctatataccttccctctgtttaccctctaacagactgacaagtattatctctgttctcaggtacagtcagattcctgttcctgagcagaagagaaatcagaagtaggaataaatctctcccctagaaaatggggataaaacttacccttaaaatgtgtttataaaggacttgatctttcagtgagtttatttaaaattcgcagtgaactcagtgctaagaataaatatttgctgaacaaattaattgattgaaaaggtcaaacaagatctgtctcgtattctgtagttttttctttgatacccggagatttgatgacactttttaaagaccatcaaaatggtccagaaaaggtttaaaaacacaaccaaattagcactgttagtacattagccattataaatgttccttgggcgtttcccctttctgtttactatggcagaggaaaagtttctggtccagcgggtcctggtcctccatgctgacttggacatattgccatttatctctcactcagtaattccttgaaaacaacaacaaattttcaaactgtataatcaaaagcaaatggcccttaaatggccaagggtgtcttagccctcagcctgctttatgtgttatctcatcttaccctatgaaagttttcctgctattgtcccctttttggtgagtattagtaaagtcacacagacagtaagtagctgagtcaggatctgaatccaggggtaacagaccccctgcccttataatatgccacctcctactttcaccatctacaggaaagttctagaaaaaactatgggacacctatgtgaatgctttgtcaactgtaaggaattaataaaagctaaaaaaatcaccaagtgccaccactgggatcctgtcatttcaaatggggaaaaggcctaccaggtggttaggttagtaagtggcatggcagagactggaaccagggctgtcaatttcctggtaggtctgtgatctttccaggagtattaaaaggtagagtcacagttcatggcccctatccacctaggagccacgctgaggttgagctatctgggaaagaatctacgagagataaggatattggcaaaaactccagtcccctttgcaggggctaaggaggtctccctctaacttcactcatttggttgactgacatgagaagaatctctctgtggattgtgaatcttccacagagtcaaagatatacaacttacttaggcagaaaaagtattttgatattcacaaaactatccactactctatttctgtaaagaaaatgttttgacccaatacaagctcatggtatggtagcttgggcgctggcttggcagtcaaggacctgagttctgtgcctggctgggtgatcccggccatgctgcttcctatctcgaagactctgttttccaagctgcatatgcctgccctactcacttgggaggatgaagcaccataggcaggtaaagtatcaccattataattacaagagtacctttaaaaaaccaaaaaaacaggaaatatcaaggatactttgttaatgaacttgccaaattaatgctattttccagtcctcatacttgattcagtcttccagctatcgagcagaatcctgatcaaaagcacttgtgttgtttctaaacctgtttattcctgttgttctttttattgaaattatgtaatttaatgacttgatggtaaaccagatatatgactgtcaaaaggtactatttctataagttttaatgaaagaagctaaaatattgctgttaaatgtaggtatagaaggccaggggaaactggggaaacatggcaactaaatgcaatgtggtagtcaggattaggtcctggaacagaaaggggacaaaaatggaaaaaccagtgaaatccatataaaaactagcattcagtcaatctaaatgtatcattgccagtttctcagttttaacaaatggatcacagcagtgtgagatgccaagaatggggaaagtaactgagaagagctatatgagaactctctactctttgcaacttttctgcaatttaaaaattattccaaaataaaaattaaagtgtattgtttaaaaagtgtgggaaacacagttttaaaagattgagaacaattataaatatctagaaagattctatggtgatatttgcaagagtctttactgaactttaaaaatacagtagggaaattacagatgctgtcattatggagtatgtagggaagacctataggactgcattcgacagattcataattcaagtaaaagcttcatccctgcatcagaatacagacaaaggatacaacatttaatttgttgtaagttaaagtgttaagggatacaagtgtcattttccatgattcccaattttggccaatttttttccattaacctaccacactggataagcgctctgctctataaagacagatggtatcggctgggcatggtggctcatgcctgtaatcccagcactttgggatgccaaggcaggtggatcacctgaagtcaggagtctgaaaccagcttggccaatatgatgaaaaccagtatctactaaaaatacaaaaaattagctgggcatgctggcgggtgcctgtagtcccagctactttgcaggctgaggcaggagaatcgtttgaacccgggaggcggaagttgcagtgagccgagattgtgccactgcactccagcctgggtggcagaacaatattctgtctcaggaaaaaaaaaaaaaaggatagatggtatcaacacaagaatttttgaggcatgaattaattcaagagattgttcagagtcatttacaaagagaatacctgagatgcaagcctgatataatttgaaagttgactttttaaaaaaaagtcttgcaaatggtcagaattcctaggatttttcagttgttctaattaagtcagtctagggaggaattcaatacagtaacccttcatgaacaaggagaattatagaatgcactgaaatagcatagtaagaataatcatctcagaaattcaggagttggaatataccttcaaaatcatctagcaaactacttgtctaatggtacctcctctacccacccacataatacaatcttccagcaagcagtgggtgaggaacccactactgctcaaggccatcagttttctcttcagacagctttaaaatctgtccctctaaaagattctactcacggatgcttatctgacatctttggccataaggaagtgatctaatttctcactaatagcagagtcagcgattatctgaagttgagtcatttcttccattgttcatttgctcattcattcacccatttaccaaatattgacaacaaatacgtggaaagtgctgaccagcacagtaaatataaacataaaaaaggtcatatatctgccttcatgaagctggtggaggaagagaaaatttacaaacaaataaatagaaaataatatgaaatatgaatatgtgaaagtaatatgaaaaacgaaggctgtaatagacagtgcctattcaaagtgcctcctgaagagtgggtgggcaaggaaggctcagagcatgggcctatctggcagaagggctttctaggagagggacccactactgcaatgatcctagagcaggaacaagtacatcgtgttggaacacaaagaaggcccgtgtggctggagtttagtgggcaggaggggtgagtggtgtgagagaagactggaaaggcagaagtggttaaatcagtttgtacggcatgagtatgaggttggatttgattccaagaggaatgaagatgaaataacagagtgctgtgacctatgcggcaggtggagacaaaggaagaccaagagtggaagcagagaaacctgcttgatatgggccaggtgagaaggtggtagcttggattacaaaagcagtaggtgtggagatggagagcaatgaattgattccagacactttttgaagttaagagtcaacaggactagctgtcagacatgagagcacaaaaggaatcaaggaaaagtatgacacatttggcatatgctatgaaaagggatttcctttgtgggatcccagtaaatcctcttaaacaatcagtggagcaggtagccttacactcatttttatatgaggatactgaaatgtcagggatgaaatgatttgccaagggttacaaagcttgtgaagcaaggatttgaattcaggacttctgacccagacttttctatgattgcagcttttatttcaatattttatgtttcttgtcaaagaaaaaaactcaacaaaacacattctattaaccacgtgtttttataaaatagagggtagaaatagagggtgcaaactgagaggaggaaaccaggacaacataactcatccttcccacctagaaatgtcacaatcacagcttcaaaggaaaacacaaacttcttccattaattaaacggatgaatcaagtttcagtttcctctctcctttctgtacaacttgtctttgaaggcatttcatttgggaaatgtgtgacctttagtcaccatgctcaattaattgaatgctttgcatcaaaagtcaccatgccgatccacattttacacccactgcttttctgaaatacttatcccagttccttaggtctgttttgttgaaatcattttacaaaaataaatcatatcaaagttttttttattatttctaaaactttgcttgcaaaactaaatatttttaacaccatggcaacatggtcaggactctggctaatgtatccagtctcgtaccagagctcagacttagtaaactactgctgtggacaaatgggctgtgaaggaggaaagagctaataaattagacatggtcaataatcattcaagtcatgtcttctggagcttcccaaaaggtgataaattagccagacctgtcctaatgatcaataccctgctctcccttctagaacacaccagcatccattgagtaaagtgcagactgcaaggcctctcaggaatttaagtactacctcacacctcctgaggtacttcctcaggcatcgcctcatctgaccctttcaatatccctttgtgttgggcagaatccagaagtatgatcggctccattttttttttcagttgagagtcacagaggctaagtgatgtggcaaagtgcatggtttatcatgtgataagaggcagaattaactttaaacttacatctcctaaatctcagttcagtactattttcaacacaccagcctctgtcattgaaacttaacaaattcacaaatgctttgtttcattgtgggattttttgtttttatgtatttgtcaaagttatacgtgcacgcagtttaaagaatcagtacattctatgcactttaagaacagcagtcccccatctccaccccaccatttcctcaattcttcctcctcagaggctacctcttttaccaattttatgtgattatttggtgcttagtagtatgtctctaacaagcttctattgttttttttttatttttctctttatcaactataaatgatgtagttctttccttcactcccgcctcttcacttccatcaccccaatatagcacacggtaccatgacttggttagactagcgtttggtgttgacattattatgactttgcaaaaacaactcgcagtcccagctgatatatggaaactctgattattccacatttcccgcacatttcctctttctctcacacttgctctcagaatttttttttctgatttagtttgttttctatgagcttaacgttaaatgaacctcacacttgttactagttgtataaaatctcttgtccaaacgttcagatatattagatgtattaattgtgtattccttaagaaccttctccatgatgcttttgacttaatcaaatctgaaatgttttctttcaatgtctggctgccatcctgggctttttctctgtgctggaggctccattcaccttccttctccactgaatttttatttcctgtgacctatgtcttcctctttaatgggacagcactttctttagtagcatcctgaagataactgtatgggagataagtattttgagaaattgcatgtctcaaaatgtttttaatctgtcctcatatttgactaatagtttggtggatataaggttctggactgggaataatttttcttcagaatcctgatgcatttgtagcttttagtaatgctactgaaaagtctgaagtcattctgtttcctgactgtgtgtgtaatccatccccacatcccacctactcctagaagggggtgagcttttctttttgtcctaagtattctgaaatgttctagtaatagtataaatctgttttacttcccccatattagtcaaatatcacatggtaagtggcagaattaactttaaacttttgtctcctaaatcctagttcagtgctattgtcaacaccccagcctatgccattgaaacttaactgccattcacaaagcttcatttcattgtggggttttttgtttttgcatattttttgtatattttgtatattaatcaaatacgggggagtaaaacagatttatactattattaaaacattaaaactttttaggccttttaaaattaggaactcatccaacatttttagacattttaaatgactgtattaatttatgtacaaatatgtatgactttctgcatgtttgtataaatatgcacaaacttgtggtacatgtaagtcttatagtaaaagttggattgcttctcacctcctatcactcctggattagaattcagctttcttgtttgattaattcatttatcatgtatacatctgtttttgagtttccaaaattttgtggttctctctatgctttaaaattgatgcttttaaagaattctactatcgttctagaaattttcaaaaggaactgaaattccatgagtgttcagtccttgatgagtgttcaatcaatgacgtttccaccaaagtcctccaaaaggtttccaaagtgacttttcccccttactagaaccatattgttgtttatgggccatgttttaattagtaattaaagaaaattttcaccctcatgacaagatctaatttttgtcttttttcctcttacaagaagcatttaaactctcatggagggaaagccacttgaagacaccaggtggcagaggtcattcgttttgcagggtcagggctggtcttgagcacaggaagcatagctcaccctcttatgtgacttgacaagttctggaaaattcccttaccttctcatctacatcaggagcccaatacatctaacttccacacatggaagagataacaaaaccttgcaggttgcccagggatggccctttagtcctctgctattagttcagttagccacatcagactagtatgctttcttttgggtcacgaaggaataaaacagaggctaggtcaatgtcagagagacagagagggagtcagagaaactgaaaaatattgacaggcaggaggtggaaggagagagactacaataggcagactggttgagtggttgtatgtagagacaagagaaagcctgaattcaatccaatttttatctgtagtccctttagaagatgagccacagaacgaagtggggcttattcttcaaactttatcattctggatcacattttttgtgcttttagggtgagcctgcaaactgtaaaggaacaaagtacggcacagataaacctgtttcaaatttcagctttgccagtagtagcaaagtaacttccacttccttactgtaacaacacaggtaataacacttactttgaaggagttttaagaaatagaaatgatgtaagcaaatttgctggtattaagtgctcattaaatggtaagtgttgtcattagtgatggtggaaatggacacacgccacacccttaaccacatttatagaccctttgtccactgtctacactggtagggaggagaattttattgctgccattgtttagaattgctagtgcataatgataataaaaaacgaactgacttctagttgactttattattgcttttagattctctacagacatgccagataaaaaacagtacaccaagttaaattagaatttcagataagaaaaaattttttagtgtaagtgtgtaccatgcaatatttgagatacacttacatttaaaaaaaaaccctgaaagaaaagtattgggcctcctgaattttatttaataaatttgacaaccctaagagtaaggaagaaccattttgcttcctaagataatatcaacaggaaacactttcttaaattctctttggggcccaatagcactgactgactcaggcaagggccacactttcatcggagtggacagatacattgattcctgacagaacaagagccagcatggctgtaagaagccagaatcaaagaggatggtgacgaggcaaacttgcattaaaagctgctgaagagcagggacagaggaaccgtttcccctcccacagtaacacaaagttgaatatccattagattagcaaccagttcttagcattcctccctcctactcatagtcaactcttgatcaactgcagtaataggaagagaaaaggacatcacacataaccccaaatgaaaatgaaaacaaaactgatcaagggtaagatcaggtccagtggtggctcatgcctgtaatcctggcactatgggaggccaaggccggaggatcgcttgagcccaggaaatttgagactagcctaggcaacacagtgagaccctgtctgtacaaaaaatacaatttacaaaattagctgggcgtggtggtatacatctgtagtcccagctgcttaggaggctgaggtaggaggattgctggagctcagaatattgaggtttcagtgagccatgattgtgctgttactctcaagcctgggcaatagagcaagaacctatctcaaaaaaaaaaaaaaaaaaaaaaaaaaaaaaaaagaatgagatcaagcggtaagtaatgacatgtggccttgtttctgctaagtcagacctgccctcccctacgttactagagatcctgactcctgcaggcaggacccagtaatatcatttcaccaacaaccgtgttgctagtacaatcaatatcctttcttcttaaagtaccttttacacaacttatgctctgtaaaaatattactaagtagacaatgaaagggaaaagaaagcaagccaatgtttcatgctttaagttaggaaatgctgttttaaacagcattaaacttttttttaactacagaacttcccagaggctttaataagctcatgtgctttgaatccctaggatatgattttcgtacagagcatgtccaggtttatttgatcatagactctttcagagaacaacagttccagttcacatttcaggtaatatttttaggtgctactatttgacgaatcctacatctatagtttcagcaatgctgcacgcgcatgtgtgtgtttgtgtatgtgtgtgtgtctgtctctggtattaactggtgcaatcagaaagaagagtccactccttggtgtattagtttctgattgctactataataaattagcacaaacttaggaggcttaaaacaccagaaatatatcaccttttagttctatatgttagaagtctgacatgggactcacaggctaaactcaaggtgctgacagggctgtactcccttttagaggctctagggagaatctgttccttgccttttccacttctagaggcttcccacattccttggctcacggcccacttcctccatcttcaaagccagcgacattacatctctctgatcattcttacgtcgttatatctccctctgatcatagccagggaaagtcctcagcgtttaaagactgactttaaagattcatgtgattagattaggcccacttggacggtccaggataatctccccatgtcaacatcagcaaagtccctttttgccatgtaaggcaacatgttcacagattctagggattagggtttggacatccttggggggcattattctgcctaccacatatgggtgggtaagaacaccctgagagttccagccagcaaggacaaagagggagaatgaaagtaactattgccattgtttgtgttttctcaattattgcttacaacttcacagtatcagggaaattgaaattattgtcttgttaagggatgtagaacaataaacaaaatatggaacatgttcccaagcaccaagaacttggttctctctttacaatgtagagaagcaagcacaagtgctctgtgaattagatactccacaaacatagccagctggcctctcagcaacaccggctgattatacaggctgtgcactttccagtgaaaggtacatgcccttaatcagctttattgaagctgccctcactaagaaactgtgcagacattatttcctatgatgcaggtcctataactgtcccattttacaggtgagaaagtgaatactttctacgattatgctacttgacaagctgttactttcactgaaccagtaaaacatacacatctgaactcaaagcctgatcttagtcctatgtaatgtgcctatttgtatgtctatttgacaatccatctacctggacttcttcccctttccaattccaacccaaagcaagttccttcctgtgactctatctgatctgacagtctacatgtgtggttttgggagtgtgtgcacacgtgtgcatgcttgtgtatatatgttcagtaactctaatttttttcttcatgaggcttcacattttgaatgccaaaactttctgtctgatctccaatcagatgtggtgacttctgggtcacaggcgtgatatgtattgaacacatgccttagaagtcgtatctagtttcaaaacttgactagatcatcacctctgaaacactggcaaattacttgagcaccacaaacttcagctttcttatcttgtgagaagtcaaaaatagtatctgcctcacaaggtcactgcagaattaaaagaggtgatatagataaagcacttgatagataataatgacacaataagttgcagttgatactattatcaattccatgctacgtttacctgcataaaaatgccattcaaagttcttgcctctctgaaagatgcttaatgacaacttctacttaaatcagtgacattagtatgaccaataaccataggttaattcacattaggttaaggtgtgttaatactatttttttttttttttaaaagactctgcctgcctggagatctagggcctgatacttcttgaaatttgctaatcacatctggtttagctttagacattttctgggattttgccagcagctacgacactttaatggctacaataaacctcaaagcctcatcaaatctttgctgtatgtgtgaaaattatgtcctcttcaattaaacattcaatctcagctcacaccaaggccttatggaaaaggaggtgaaacctgaatggaaacgttaagatgaaacggaccgccacgattctggccatcttgccagatggtatttagaagaaaaagaaattcattagagaacctacggtgtgtattttctttaaatatttactgggtacctttcatgtgttgaaaacactggcatctctaaagattagcagggcatttttgtttaaatattccatgtgtgtgaggtggggggagtcatttcctcatttgcctttgtggtacttcatgtgttttggtgaagcctggtacaaagaagaaaagtaactgagacaatgttcagttttctttcctaaggccgctctacctgcttcaaaagctcttgtattttcctaaaatcggctgaggaaagtgtcagttgagtactgagagatccggaacgacaattcagagcctccctagacaaaagaaggtgtaccaaagtgaggcgctatgggggaacccttgtctctctgctcgcctcccagttcactcctcttatcctcttgctatttatcatcaaacgtacagggacgtcaaagtgaggcagcccctggaaggagaagggaaaagatcaaacagggatcaggtttcggctcaaagactataggagaggtcaggccaagggtttcacaaggggccaagagacaagagggaatgggcattcaggaacagccgtggagcaaacaagctcccctgccattgctaactcttgctgccacactgaggaccagcctgggccctaattctaccagtggagagggacagacaaaaatgctagctggtagcttactacgctttattacaatattaatcaagctcctcaacttcaacaaggatacaaccgccaattcttcaggagacagaaaataacgaccgcaagttcacatatcgcatttctaaaggaagcatccatttgtttgaattcattcaaccacatcaatgggagaaaaaaaacccacgttcctttaaaaataatatacaagataaaaatattcacctgtaaccattatcctttccatgtaagttttatgcccaaagtaaaaataaatggctctctttgccaccgggagcagatctttcccactttacttccatttccaagctgttctcagcctcagacttaggtttctgagtactctttcacaataaacattttaaaaatgtttactttatgtcttggtcttaaaatattcctggttgaagcccttcatttcctcaagctctgcttctggcactctgggctccatttccacattaacacgctctctaaatcctccgcagagctcttcaattggagttatacaagctccaaggcaagtatttatattcttggacaaggagatgtctccacagtaaaaacacgagactctagaaatgccaaaggaaaattcctgcccaagtgagacatattttcaccttttaaaaaagccaaaaaggggctttcagcattttcttttgactaattaaaaatgtaaattaaactaaaatggaatgtttactgtgggccttaccatcattattagactcatatataaaccaaacatacaggaacatgtgtgtatgtgtacgatatgtatgatatacatatatatttaaagcagcagagtaaactagctaatgtgtaagttctagaaactagaaactagaaaatgtgagttctaattagacagacttgattagacttgattagagctcagtaaatctgtctattactggctgtgtgaacttaacttctctaagcctcatttttctcatctgtaaaatgggtttagtgtagttccagcttattaagattgttatatgagacaacagtaagcatctagtaaatggttactgctattatcattaataatgttataactactaaatgttagaaaatgtagatataacgagatatggatataagaaacaaatgatcaacactaataaaagagaagaatttgaaaatacagtgcctctacacactgtgtagagaaggaaagtttcctgaaagctgtagtgtaccattgctgaactctgcaccaatcccactctatgaaccagacctaaataatcctcttaaaacattttttaaaagtaatcttagctattatcataatagcagaacagttcctattaccttctagttgcctcttcagttttctcaaatcttttatgaggtcttcaaacttgacttgggaggccagaaagaaatcctgtggttccggcaaggggaaaacactcttttctgttccagcttcctaagagatatggtaaacaaaagtacattatacttcccaattgtcactttcagttgaaattccaaagcatcaatgagaaaaaaaaaagcttttttattggatgtctgagtaagaatcatagcaatgctcctctgctattcctaaatttggacttgtgactttgaagtgctttcttgtctttcacaatctctttttggacttattggcaatgaggtcggctatggcatgggccaggttctattttgcctcatgaatcaaagagaaaattgtcaggtcgtcctgatcttggacactccactcccatgaaaaatggaagaggggaacacatgaaagtacttacatttgaagtccccatttgatttacacatgctagcaattagacaagtcatctttggggcataccaatgggtgtgaatcagaaggtgctggataagaaggcactgcaatggaagatacaatcaccctcccatcacctttcctcacctttctctgtggcttaaagctcttctgtgtgcatgcatgatcagattctttgtatatgggtgtatctacacatatacacaggttttttttttttttttttggagatagggccttgctttgtcacccaggcttgagtgcactgacacaatcacggttcactgcagccttgaccttccaggtccaagcgatccttctagttcagcctattagctgggaccacaggtacgtgccaccatacccagctaatttttaattttttgtagagacgggggtctcaccatgttgcctaggctggtctctaactcctgggctcaagcgatcctccagccttggcttccccaaaattcttcatatatttgaaaagcttttgcaaatgttgtctggcttatcttaggagaccgagggcagggtgaagtatagttttaacaagctccactgctatagctaatggagaattctcagctgagaaacatcttgaaggacaaaagcttcaggcacatgagcctcaaatatcttttccagtctagctagctttctccctgagttgtttaacgtaagctttgtatcttgcatgtcttaggccgtcttcaattattcctctctctgcacaggctactttgccagctttccttcacattccatcttccctactgccattaggactaattccaaactctaaaactgctttacaaggcactttatgatctggcctctgtctacatctctggcctcatttttaccttccccctatctccaactccctctagaccttcatgaaataacagaccacaatctcttgcttctaggcctttgtctataaaatggtccctttccgacccttccctagtgcctccttacacttccttgttcatactcatcctttaagtcttaaaacaaacgtccttccttaaagatttcccctaacctccagcacgtgggtgtttctcccctgttctccaaaggcctatgacgcttacattatcacagcatttatcaccattaatttttttcccataagttattggggtagaggtggtatttggttacatgagtaagttctttagtggtgatttgtgaaattttggttcccctatcgcccaagaaatatacactgcaccctctttgtagtattttatccctcatccccctcccactcttatccccaagttcccacagtccattgtatcattcctatgcctttgcatcctcatagcttagctaccacatatcagtgagaacatacgatgtttggttttccattcctgagttactccacttagaataatattctccaatctcatccgggtcgccgaaaatgctgttaattcattcctttttatggctgagtagtattcgattgtatatatatatatcagtttctttaatcactctttgactgatgggcatttgggttggttccatgattttgcaattgtgaactgtgctgctataaacatgcacgtgcaagtatctttttcatataatgacttcttttcctctggatagatacccagtagtgggattgctagatcaaatgacagctctactttcagttctttaaggagtctccacactgttttccatactgactgtacaagtttacattcccacctgcagtgtagaactgttccctgatcatggcatccatgccaacatctgttttctgattttttgattatggccattcttgcaggaataaggcagtatcgcattgtggttttgatttgcatttccctgatcattagtgatgttgagcattttttcatgtttgttggccatttgtatatcttcttttgggaactgtccattcatgtacttcgccgactttttgatgagattgttcttttcttactgatttgagttcactgtagattctggatactagtcctttgtcagatgtatagattgtaaagattttcttctactcttaggttgccccttttgaggtaccaaagctctttggtttaactaagtcccaactacttatctttgtttttattgcatttgcttgtgggttcttggtcatgaaatccttgcctaagccaacatctagaagggtttttccaatgttatcttctagaatttttatagtttgaagtcttagatttaagtccttaatccattgagttgatttttgtgtaaggtgagagatgaggatccagtttcattctcctacatgtggctagccaattatcccagcaccatttgttgaaaagggtgtccttttcccactttatatttttgtttgctttgttgaagatcagttggctgtaagtatttgggtttatttctgggttttctgttctgttccattggtctatgtgcctatttttataccagtaccacgttgttttggtgactgactatggccttatagtatagtttgaaatcaggtagtgtgatgcctccaaatttctcttctgcttagtcttggctcccgccacgtgggttcttttatggttccgtatgagttttagagttctttttcttgagacggagtctcgctctgtcgcccaggctggagtgcagtgatgcgatgttggctcattgcaggctctacctcccgggttcacgccattctcctgcctcagcctcccaagcagctgggaccacaggcacccgccaccacgcccagctaatttatttttagtagagacggggtttcaccatgttagccaggatggtctcaatcgcctgacctcttgatctgcctcggcattccaactgggattacaggcgtgagccaccgtgtccagcctagagttgtttttttctaattctgttaagaatgatggtggtattttgatggagactgcactgaatttgtagattgctttgggcagtatggtcattttcacaatattaattctaccttttcacaatattgatactacccatccatgagcatgggataggtttccatttgtttgtgttgtctacggtttctttcagcaatattttgtagttttccttgtggaggtcttttgactccttaggtatattactatacacacatatatatatatgtatatatttgcagctattgtaaaagaggttgagttcttgatttgattctctgcttggtcactgtcggtgtacagaagagctactaatttgtgtacattaatcttgtatcctgaaactttgctaattattttatcagttataggcgctttctggaggagtctttagggttttcaaggtaaacaatcatatcatcagcaaacagtgacagtttgaactcctctttactgatttggatgcccttcctttctttctcttgtctgattgctctggctaggacttccagtactatgttgaagaggagtggcgagagtgggcatccttgtcttgttccagttctcagagggaatgccttcaacttttccccattcaatattatgttggctgggggtttgtcatagatggcttttattacattgagatatgtcccctgtatgcaaattttgctgagagttttaatcataaaggaatgctggattttgttgaattctttttctgcatctattgatatgatcatgtgatttctgttcttaattctgtttatgtggtgttatcacatttattaacttgcgtatgttaaaaccatccctgcatccctggtatgaaacccacttgatcctggtggattatctttttgatatgttgttggatgcagttagctagtattttgttaaggattttaccatctatgttcaacaaggatatcggtctgtagttttcgtttttggttatgtcctttcctgattttggtattagggtgacgcttgcttcataaaataaattagggaggcttccctctttctctatcttgtggaatagtgtcaaaaggattgttatcaattctcctttgaatgtctggtagaattctgctgtaaatccatctggtcctggacctttttttttgttggtaattttaaaattatcatttaattcttgctgcttgttactggtctgttcacggtatctaattcttcctgatttaagctaggaggattgtatttttccagcaatttatccatctcttctaggttttctagtttatgtatcaccattaatttttaaattgccatgttatcttgtacatcttccccactagactctaaacacctcagaggcagaaactgtgtcttgttcttggtatggtaaacaacatctggcatatcaataagctttatttttggttgatgggcactactacagagggcttgtaaaacatggttctgagatgtatgtacctttagcaggagacatctaatttatcactatgttttcttgtagtttcaggaatcctcttgacccttcctctttaaggccattagctttgttagggatactaggatacagtagttttcttcattttatcagacacaatgtacttttttcccccatcttcatatacttattttactactttaaaatggaagcagtactctcatctgagtgccaagatggaacaacatctaagatcctcactacaaagctccatgctaatctatgctggaagaactcaggcatagtatctctttccattttccaaaactttatcagattcagtcctggttttgattgcgtgtgtgtgtgtgcgcgctcgtgcgcgcgctagaaaaaaggaaatgttgctgagtgtatcaggctggtagcagctcttatgaaagctgcttaattagagttaaaaaggcatgactctacatgggtttctttaaatttcacagaccaagacttggaccaaaaaccaggcatgagaataaggaagcagggagcaggagtcatctttctttagctaattgctcatcaccactaaccaaaaaagtcatcacttaggctcctagaggaaagggccagtttcataaatcacataattctaccctcttgttgagtgaaatgcattttgcacagtaaaagccagaagagcaccacactactgtgggcttatttttcctagactgggccatcccatgtttgaaactgttctcattgtaagattttcctctgtgaagttgattccactgggttcagctcttttcaaccacaactatattccacaggcatatttcagccttcccacacaatgcatttgacttggttggggtaggtactaccaataaatctgcccatgccaacctagggttagaaatgtcaccctcaaagattcttcaggataattcttctgccacactagtacctgctgtcaaaacctagggtatgtgcttatgtgcccgctgctgcttcttaatttcctgaagctaaacatgccttcctcactccaccagaaaacagctctcatctcctcatatctagttctttacagatgccacttattacacgtttgtgaatattaacattatatccagttcagcaagttttatcagacacctgtattacaggcagtaaaaaagagacaatggccaggtatggtggctcatgcctgtaatctcagcactttgggaggccaaggcgggtggatcacttgaggtcaggagttcgagaccagcctggccaacatagtgaaaccccgtttctgctaaaaatacaaaaaaaattaggtgtggtggtgcacacctgtagtcccagctacttggaaggctgaggcacgagaattgcttgaacctgggtggcggaggttgcagtgagccaagattgcaccactgcactgcagcctgggtgacagagcgagactccatctcaattaaaaaaaaaaaaaaagagagacaacaatgaattctgaacctcaaaaaccaatgccaagataataggtaattcctcatatatacatacaaggcagaataagatgcatcttgagaaagattcaaacaaagtacttctcaggcttcaaagccttccttcaaagatcaggatgttaataacgacctcaaaaaagggccatgtaagattagactaagttatttttcactacatcttttttcctgtttacaaaagtgatacatgttcattatgtttagtaatggaaagagagaagacagttaaaaaaaaaaaaacgcttacaatcctaatattcagaaacattttaatgtatttttttcaggttattctgtgtatttatatttatctactacatatttggtattatactatatgttattttgaaacactgcttgtaaattaaaagcagatcaaaattattttctaataccactatattctctcctatacactctccataagagtatattattccagtgtgtgactctagtataatttatttgaccttggtctccatcattgtacacctaccaaaatttttccaatattttgctatcataagctattataagtaaatagtcattaaatccttagttgttttcttagggtagaaatttcttaaaaggttacacgtatttctagggctgttgatacagaaaggttgaaaaccttgcttatgatcctgagattcatgagtgtgatggattgggtgttcgtatgcatgtgtgagatgcgccaccattgaaccttgttaagatatggacacattacctgtctgacatgaagaaaaaaggaaaaaatgaaaaaatgtgggaaaaaagggaaacaaaaagaggaaggaaaaaaaaaaacaaaaacacaaccttgcttgcccataaagcatacatgtataaattaggaaaatgtgttcctgtaggtaggaacagctttatgggcaaacagcttgacaagcacatggcatctttatgtgaattttttaaagtgtgccctttataggatgtataatttggtgaatcaacggcaggctaaatatgagtcccatttgacttagagaccttaaacagagaatatattgatttaccatacatgacagtcctgagaaaggtttgatcaatttacagtgctaattctatatatctagttggcaatttatgtcttctatatgtcttttgtaaattgcctgtgatatattttgccattttttaaaaataaggaagaaagttttttttcttgttaattctcgagttcattgtctattatgttgtaaacattttaccagtacattattttgaatttagttttaagtcatttttgagatactacagtattttaaaattttaattaggaattgaagttttttagttttatgcattgaaagtcatcattctcaccttttatggtttgtgtcttagactgaacacttcgaaaggattttgctacttcaaaatcagtaaactatttacctacacttttgtcatgtcttattgattttatttttcatttatttctacatttatctcttctgttctttaaaactttgctctggtctctggtatgagatctaggagataattcaatttcttcctcttaccaattacttgaaatttctcttttatcacatacttgacacatatttatttagatccatttctgagatttccttttcatgttcttaagttttgtgatgttagtctatcattctacacttttaattattatagctctataatatattagaatatataaatgaatgattctctcttcatttttaaatcctggtcaaatttttgtctaattatttttatacataatatttaaaattattttgtaaacttctaagattgattagaattttgactggtacttccaacagaggacataatgccactccttactgtggtaaaaaacaaacaaaaaaaaccccctataacatgatatctgttctcttaaatttttaagtgtacagtatagtattgttagccatgtgtattattgtacagatctctagaacttcttcatcttacgtgactgaaacgccgtatcctcaattctccatttccccattcccgcatcattcattctactttctgttcctttcagtttgactactttagatacttatttaagtggaatcatgcagtatttgcccttctgtgactggattatattgacttagcataataccttcaaggctgaccccatgttgcagcatacgacagaatttatttcttctttatggttgaataatattccctagtacatatacgcattttctttacctattcatctattgacagacatttagatttgtttccaaatcttagcgattgtgaacaatgtttcaatgaatatgagagggaaaatgtctctttgagatcctggtttcaattcttttggataaatacccagaagtgagattgtctgatcatatggtagttctatttttaattttttgaagaaactccctactgttttccatagcagctccaccattttatattcccactgatggtgctaactggttccattttttctacatccttgtcaacacttgctattttccatgtggtagggttttggttttagtttttattaacagccatcctaaaaggcatgatgggctatctcactgtggttttgatttgcatttccctggatgattagtgatgttggcacctgttggctatttgtttgtcttatttggagaaatgtctattcaagcccattacccaatttttaaaattgggtttttcttttcttcagtctgtttttaaatttttatggctttcagtaaaattacgtgaatgtattcacaaaggtctgtacttgtctggttaagtctgtaacacatatattggtaatgttactgggagactttttcccaaaaaatctttaaatttattatttccagagaggagtaatgagaaaaaaaggaagttttataaaaaggctagagacaaagatactttcagtgagggagaacatcagaagtaaaaacacattagtaagaaagcacagggtgtgtgtggaaaacatcaggtcttgagttggatcacagaatacgtgtagagggaaagtaataaaagcaaggttgtaaaagattggaattaaattcgtagagtcctaattcacttgaaaatggggagccacttctgttttgagtagaaaagcaataggatcagagctgtgtaaagagggtgtgggatggcttagagtggtagaacctcgaaatagagagctgagctggaaagcaagtgaaattctccaagtgagtggtcttaaaacctgggtaagctggggtcggcaggaaaacaaaacaaaaaacaaaacagggaaggacatcagaaacaactcagtggaaggacagagagtagccagagaaggacaaggtttcatgccttaatagccaaaaactatcaaaaactacgatattcttaacagaaatcagggaaaagtttggggggcggggaaacgatgagcctggctgtaggtatattgaaaatagttagataagcccaccaggagggtagaagaaagtattatggagttcatcagtgcctcacttgtcttctggatgaaactgcaggcctattgaaaggccctgagatctctactattcttccctcgatgcttaggaacaattatgcttacatggatggttaagcagaagtcctgacagcatttactttgagacttttactattcatatcgattgctatatttcttaacatcttacaacaatacctttttcttctcaaaattacaactccttgttctcaatttaacaagaaggaataaaatagaaaattctgctcagatggactcacacagaaatgtttatttctaattgcaaatgccctctaagcagaaaagatggatttttcaaattctacatcttcagtctgttcatagattcattactgataaaatattgggtattactgagtcttactttcctaaattttgctttgcatcatcagaatacagtttcaattataaccaattactgagcggatctagatttcacagagaacctcacaatctggccataaagcactgaggcagctaggggtctctctgaagctgtgttatagtcgattgagactcagtagatttacaccactgaataatgcttctcttcataagtcaactaaactctcttggtttcagtgtgctcatctgtaaaccacgctggagagctctcatattctatgttgggcttgcagttcgttcatccatctatccatcatccaacttatgaatgtcaacaatgagtaagaggtgaaacttttccacgtaataccatttcttacctgatcatagtaacgcaggtaatacttaacaacgtagtccaccagattaatcccattatcctaggtttaaaagagaaatgtacatgaaaatcattcccatgagactgtcatgttacacggttgagaggtgaaatctcagttgagaaatttctaattcgtgaaaactggctttctcttcgatgctggcaaggttttccttcctctgctttatcccatccatttattatgctggctacataaagaaatgacactgtactatcctttgtggggaaaaacaaacagataatccataaaacttctgaaataatggctaaaacaaacaaaaaagttgtgtccttgtattttctggcacacagccaagacaggaggtgcggggaatgctaaagggaaccagggcctagaacagaaaagcaccctccctgcccgtctttcaaaaaatgtgcgttcttaatggtgtgaaaaacaatccaggccagcttaaaaggagcaccacaccactttatgaccccgggaggccagtggggagcaggccctcccacaaggcagcctttgtgtcctgctcactggggcctaattctaatttgcctgtgtgtttcccctccctgcacccccctgccccccatgggacgcctagctatgggctgattgtttctaaagaggtagcgccacaggggtgtggagccaagtgataatcaggctcagagagcttgacagtagaccccagcccaattgttgtggcaaaaaattggtgattcaacattgctctgccattcaggaatgagtaaactactagtagccaacactaaactcaaacagcctccagcctttgcaggatcctggtactgtatgctatctgttttgttctctcactgagtagcagttcaatacctgattgtgtatgtcagagcacacgaagatgggaattgagtaattgaaaataaagtctaacgtgaaaaaaaaaaaccaaacaaaactctttattcgaaagtgaaaagaaagcaaacaaaaaaatgcatgctctaatataaatgttgttaaggggaggatagagataaatggaacaatctggaatacgttttttaaaattaaaggtaaagaaagaaaataatggcagatcatgggaacttattatgaaaaataaatacccgacttttgacatccttgagtttgggcagaatttctaagctatatccatcggcttgtccccgagtcctatttcctccattcatataatttccaaaagccaagatgagagctaaaatatccttcacgctcttcacgtgcagcaagtcctgtgatggcaaacaccagttattacggagctgaactccaaatgcacccatgttcattcagtaacaaatatcgactgtgtactcaataggctgtcgggaggcttggtaccaacagaattaacagttgctgaaatgaaaaacacactttactaagccatgagtgtctttacaaacacattaacagccattattttctacccactcaaattaattataaacagtgcatgttttaatacatgaggattaactattggttttatattttcatttgagccagtttaatttttaatacttattttaaagtagaagttgtaaaaagggagttggtatatatagtaaggcttaacctttgatgacttctaggtagaaaggggtttaccttttgaggatgtatttcaggactatttatctagataaccaatacagttaaatgcagagcagatacagaagaagtatgttcttctttatccccggatataattttcagagctaaactacaataatgcattttaaggctgtaggccatctttaataaatttattaaacttactttattaagtgcttgttgtattgtctattaacttttacaatttcaagctgcttaggattttctttgtctccctgtctcatttgtttgtccttttatttattttttacttcaagtacaattttccaattgaaattttttttctttatggtcttaattcacattttatccccctttatttcagggtaaaaaaagtaatggctgggcacggtggctcacgcctgtaatcccagcacgttgggaggccgaggcaggtggattgcctgaggtctggagttcaagaccagcctggccaacatggtaaaaccccatctctactaaaaatacaaaaactagctgggcgtgatggcaggcacctgtaatcccagctacctgggaggctgaggcaggagaatcgcttgagcccttgaggcagaggttgcaatgagccgagatcacgctactgcactccagcctgggcaagaagaatgagactccgtctcaaaaaaaaagaaagaaagaaagaaagaaaaaaaattcagctccaggcagacttctttttctgctcctgcctttcaggtattattagtgcgtgtataattatatttcagtaatatttattctctactgaaatatctcatatcttagaggaaaaaaaatcatttctccaaataaggaacaaagtactacagtatttgtggagaagaataacgtgtccttaagagcatgggtcaactgtgagaaaaaggcaggtgctagaatttaaccttataatgaacaccagtgtagtaaagccaacaaatatttctttgccaatgactcactgtcagtcatttatttcacttatcaagtctctaggatcctcttattaggttgacacatttcagatgatcaaatgtatggatctcaagcaaaatctcttctgcaatccaaattgtaaaataagaaacagaccatgctatttagattggtttttagtggccagtatgtactttggaagatactcagaattttttagaaggaatctgtaaaagtgtcatttttttccctccttctccctcttcatccatctgcatctccttttctctccctctctctcatacacacacacacgggcaagataatcatcaaatttacacttagaaaaacatacaatctgagtccaaaaaggtttctataatggcattaaagtggtctctcccactttcttctttactcttcagagcaaggctatcttttaaattagacagtaaacataccttagaagctcgcgtgatgatctctacctttctgtgcaaggaggtgataccctcagaaaagacagatctgaagattatgcactgggcacgttcagcaaaattaggaatctgggctaactcatgtaaaaatctgtaaaaaagaaaatgtgtcatctaccttcacatataatcacaaggaaaataaaaagacagctgaaaaagacccactttgggaacattccttacctaacaatctcaacaattataaaaggtgtcacataggtagactcaaggaattccaagggcatggtttccattgttgacaacagggctgttttttaaaggagttctagcatgatgaataaatgcatggtatagaaattccttcgggaacagaaagttaacacaagtatactaaacaagttatctatctcctgctgcccaaacaagagactaaacccaaatggaaagccccagtctttaacacacgagaaaaattatgcaataaactccctcataatgcagcattctctaaaggtgtatttatacaggctaagcaaactgaagacttgaggcaaatgtctacagacaagtgatttaaaaaaaaatctcttactaaagtgatattgctactatttttgctcagtgagttacataatggtctataatgatcacattctccagatatttgtttactttttcacattaacttacacacatagacatagtttacaactcagtatttagaacaaagcaggcactcattaagtagacaacctaaagtttccttaaaaatgtggcaagacagatcttaaaagctaaaggtgagtactgacctacacacagtagctcactgtctgagtggttgggcacttgttccctttgcaaaactaagttggaaagagcgacatactctccaggccaaccaccagaggaaggggtataaatgaaaatgggtggaaacagttggacatgaattcagaaaaggagaaaatctactaacagccatttatttcattttggtgttgagatgatgattaactgatatttctgaaagtcttggtcaactcataacgtcattaccaaggaattttgccatctctcaccaaaaatggttttacataggaacaaagctgaagcctacttctttctataccgaaagatattttctttgcttatacaccctgtgctgcctctacctttagggagatttgggttttaattaatttctaacatcaattgatttcgtatttattccacgactaggtcataatccacaatctttttttagatgacatttaatgaaagcaaggaatatccataagagaaaacacaatcttgttttaaagttcaataacccattattatgaaaattatctgatgaagtataaaagtagaaattcataggaattctgcattaggacaagatgaaaaagttaaactctgtgtaaattacttcttaatgaatattaaacaatttattcatttatcatgactgaaatcaggggtatcatcagtctttataaatacataagaagcaaaaagctcacaagactgacagcatttgatcctgtaatgagtctggggaagacgtatttattcagatgctgagctattctgaaagaagggccctgcatttctccccttctaaatgtgacccatgaggcgtcattcaggacccaagttcccagagcatgtacacttcctatcacagtgagcgaagcagttacagacaccacctgggaaaatatacagatcaatgcctcggctcaccaaaaaggacttagatgaaaagcagaaaatgctgaatgaatagttacctataactaatctcaaaagaggaagcataggaccaatatgaggcgacaagaccatagtcttatcaatgtatgttacgcaagaaagggtaggatagaattgcaaggctctctaggattaaagcctttctggggttagggcttgcactggaaaagctcttaaagaatcttaaatgttccaatgtcctctttaagcagaagggtctgcaacccatacgaagagttggaggggggagaaaagatcataattttacattacttttggaaagacttgaaaattcatactagaagatcagtcaccaagaatgtcagtctgtcctttaggaatgtatgaggcatttacagtgtgtcagggaccatgcgaagatctgagaacagagcttaatctacagtcccatcttgataatctgagaagtaaaccaacaattactgtggagtgtgaatgagtgctctcggtgatggatccagaagaggagctaggaaagcaaatgcaggacactcaagtgtcatggggggaacattgtcagctagggtccccggagccctgtgatgctcacgcacaacatgtgagaaactgccgggagagcccagataggctgaatggtatctgtgggggaagtgagtagaaggcagatgctaaaattgtgttctgtattctaaaatacagggtttaaacttctgaacgaatgaagggttctaaacaggaaggtgacagtttctgctttttgttgtagaaaatctccatggcagcagctcagctgattggatgggagaggaaatttgaggctgggagacctcctagaccacagctgtaatcttccaagaggaaaggtaagaggggcttgcagtgtgaatggagaggggcaaatggatgaggaagctgctaaggtaacaagacccagagcaacctactcctaagagatgttgtgaagagtccaggatgactttgcagttttggcgtggatattgggtatagcgaaaatacaaaataataaagaagcaaatttggaggaaaaaaatagagttttatgacccttgccatccaaaaacagccatgcaaggagcaccatagctcctctcttatttatctgctaagctaccagaggtatgggttactttgaaggctgtgaagcaagcatctgacaaatagcttctcttcccctgccctgccccattactgttttatcctctacccacaagagcaaacacagtaactctcttaaatattcccaagcatgggatcttggacactgggccttggtacttctgaatatttatggattgagttccttttgggctagtctaactttacattctaggttcagtaagaaagaagactaaatattcccaaaagaagccacaaatgagggatccttcccttctttctccaatgtaggctaatacttctaggaaggactgcaacttcagcttctaatatatgaaagacgttctgtgtctcacattatttgggttacacatctacagcagcaactcagctgacgggtggaatgaagcaatgtggctcatgtttttaagagactaacatttgatttattatccctaaatttctgaatggtatcacctaaggtgtatgtgcacataggcgatacacatagcataactgaatgttgcaacctgcattcttcgatggaggattacactaacagagtctactgtgtgggggccccaaggcagctgtggaccttcatgaaaatcacaatagactgtgtatagtgttctcaccctaggccatgagaagtgtgtaccaggcctaatcaaacccagtagagcctcacctcacaaccattacccggcagcataagagtcaacggccatccctagagggagtggttctcagacagcctggtcccaaacagatgacacctctgtgggcaatggctttctaaatctggcactggagtgtaagagagttgatgaggtgagtgatgaggccagcctctccatgctctgatttataggactgggcaccacagggctcttaggaaactgcaacgttaaaactataaatgattcatattttccagtatgtaaaacatgcttatagtcgactcacttggagttaatggcaaataagttgccagagaatcagagtggcataaatcaaacaaatgctggtttgtgcaggaggttggtagcaaaggtgaaatgcacccaggtctgaaggcccccatctatccgtgcctcaccctcccgcaactgagcccaggcaagtcacctcaccagcacagcatgacagtcctttttgctgggtttgcgtgttcacgaagccattacaatgaccatttataaacattaaaaatgcttttctatctagatcatcagtagagaaaacaagagtaagttgtgtgttaattacctgctaccattatctaagtcccggcaattagaacaataattaggacagtagcagaaacgcatgatctctccctgcctgttcatttcaccggatcagccattcccatagcttagaacaagggctgctcggtggttaaggggttggcaaattgcagcccacaggccaaaaccaggccaccacttgtttttgtatggcccatgaattaaaagaacgatgtttacgtttctaaattgttgaaaaaagagtcaacagaaggacaacattttatgacatgtaaaaatgacatgaaattcaaatttcagtgttcataagtaaaatgtcattggggcacagcgatacccatttgtttatatactgcctgtggttgctttggcacagcaatggctgacttgaatatttgtaacatcccgtaagccacaaagcctaaaagacttactatctagtcctttacaggaaaggtttgccaactccaggcttagaggagaatattactgtgtaacttggtataaccagcactacccaagtgctttgatatgcccactgtgccccaatacaaccaaatggccttttcagtgttgaaacagcccattattaatcactttactttcagtcattagcaccgtaagagggattcatttgttataataggaaatatgacttggaaataaactataggatcagttgagggtagggattggtaaggaaggtgtctcaagtcagtggaacaagacagcaagggaacctcacttgacttgattcacaatattcctaggctttagaaacctactttgaggggggatcctggaccatgctccatgtgagagcaagtcatccaaggttcccagaaccatcatgtaggtttgtcgtcaactgagtaaacccagaattctcttcccaactcccatcctcagccatttaagatgttttcctgagtctaaatgtccaggcatccatggggactgaggtattctagagcagctgtgcccaacctttttagcacagggaccggtttcgaggaagacaatttttccacaggccaggggttggggttggaggtgggatggtttcaagatgattcaagcacattacatttattgtgcactttatttccattattattacattgtaacatacaatgatataattatacaactcaccataatctaggattagtgggagccctgatggtccctctagcttcctgcaactagatggtcccatctgggggtgatgggagacagtgacagataatcattagattctcataaggagcgtgcaacctggatcgctcacatgcgcagttcacaatagggtttgtgctcctatgagaatctgatgctgctgctgatctgacaggaggcggagctcaggtggtaatgccggcttgtctctcactcacctcctgctgtgtggcctggttcctaacaggccatgggctggtaccagtctgtggcccaggggttggggacccgtttctagaggacccaagggacaaggcatggaactccagtgcaagccggagaaccttggaagtttctagggctgactggtaaccctgatctgatagctccatttctgcttcattttctacacttgcctcatctctagattgagagggttggcctgaactggacaaaaaaaattcaaggtagcaacaggcaaaagaggccctctgaacctgtgtcagaggacacaggtcctctgaacccattttacagtctcacagagtcctaagccctggaaagctgggcagggtcgtggggctgcagagccccgggagcttatctatggcttcgagaccccaagagtcactcagttacaccccggagttctgggtcttcaaagcctatggaacggcatcacaaacaacagagcaagcagccatagatagtgactggagagaaaaacaagcatgtacagagtgagggtgagaaaaagccacatttgggcagagcaggtggagaagtttggggaaaagctagcacattcaggctgcacttactggatatgacctttaggaaaataaacttgaattctgtgactctgatatcatctttttaacttcatcaagagaaccttaaacagaacaatgccttcttccttcctcagttacccttttggtcaaattgtttagtctaggaggaattaacaagttgctagaaaaagaaaggggagtctcttggggtgggggaggggggtgagacacactgtatccaacagcacaaatctcagcgctgcttttcccggcagcagggtcatcctgctgcatgcaacaggtcacaggaatgacggtgttgtgatttagctggctgcacatttagatttggttattctgagctgggagacaagaagacagaaattgcagttctccttttggcctaacagaaaaatgttaagtatccttactgctcaggtttatccagcagcttcagttcttcttctttggatgtctcgtaatactttcttattttaaccagctcatcctcttgggctctctgtatcaaaatagaaaacaaaaccaaaaaaaaaaaaaaaaaaaagggaagtgagactctggctatggcagtgggtctcaaagtctcgaagtgtggttcctagactagcagcatcaacaacatcacctgtcacttgtcagaaatgcaaattattggcccaccctagacacaagaacttggggtgtgggtgggggtggggggatgcaagcccactgggtgattctgatgcatgctcaagtttgagattcaatgcaaatggacctaacaagtacacgcagctggacacagaagtacagctatttgagctctacttttgaatcccccatctcttcctctgtaaggaggctgggggaatattgttcttagaatttgtttccttactcttagaacagccctaaattatatgaactcgcagctctttcatttctagtcaacaacgtccctttttccaaatttcgtaagcactcattgtctgtaccacttattttggcattgagtcacttactttctcaatttatccaactatttcagttgaatgaagcttatctctactgtgagctaacaagcggcaaccatgtgcttagtcctgagctcatggtaacaacacaaagcatctggaaggtactgcctttgacaaagttctttaacatgaaccactgtatcctcattttacagattattccactgaggcttgtactaagcaactgttaaagagcttcagacttggaactccctctttctgcctctataccttgctgacctccaagtattcaagtgcataattagctcccaatggcctggtatttgtgtactttctggtttattaacgaaagctttactagtggaaacgtgagaagttccgacccacttgtactaagtagctcctgatacatataaagatgtgaaaatgagcaaggaattggtgatgccaccaagcctagactattagactatggaaatcttctgtaagaaacttaaggtcccaggggacataaatatgaaacgaatcatcttttgaactggtgaccacagtacactatagagccctagacagcttcctgggaaataccattacttaagagaatgtggttcaatctatgtttttgtagcctaacagtcagtgaaccaaaacaatgaacaatcatgggaattctgactctcctgtgttgtcttctcaagagagcctgacaattctgctggttatgtccacttaaaacccaaatcaaaaaccttatatgtgtacagtcctgttgactttcaaaatacattgctactgctacatatattaaatcctcatttgactaaaaaaaaaaaatcagagcctactataatccccgctatactgatgatcacaacgggattaagaagtttaagtaactagcccaaggtcacttagcaggcaatggtagacacagctggacctcaaacctaagactgtctcattctaaatccaaaacacatacctaccattctacacaccttcccacattcaatatcatcaactcatttggactaagagtaatcatccaagctggtattagcagtcccattcttcagaagtagacaccagtgcacgctatcatttcagtaggcagcttaccttcattcacttggccagcaagtgacaggactgggttccagggcacgtaaatggtgtccacctgagatgccctgccttgcaagtgtgcaatgagatctgctagcccagataccacagtgggagtcaggaatctagtgcttctcacatccactcccattcaagcttgtgtttctatgccttaatctcttccaggccacgtcaaaacccttactaccaaagaacatgaacagctcagtcatttctcaggtagaagataaatatggaaatactagctctgtaagtctttgacactcacgttttcatataaggctgccagggtctccagatcaaccacggagtcatccacattgaaaatggctgccaagcacccaaaaagaaaagaggataagggatttgattaggtcccctgcaccaatgtttactccacatccagcttccaagcaattaacagagtattgcgttttcttacacaagctgtgcctctctgctccccttcctttcgcaccaggggtctcaaatgaaagaaaccaaaatggttcctatcattggcctgagccttggctctgccttgtttaattcctcaggctctgagtcctttctgcagtttaatttaggctccacaggagaagtgtttgtgctttaaaactaaatcagtttgtaggtttgaagcacaattttaaatctttcttcccgatggtaattgaagagatttagtacctaatgcaccagaactgactcttgcccattaccagaaagaaagagagaaaaaagacaatgttggcaaattaaatgaattcaggcatgtgatttcaggcacctttccgtggccactgccaacatcttgtttggattaaaaagacaagaaaaaacaataattgcatcaatagcaaattaagattatggaaacctcccatgagccagtcttcaggcaggctctcattcccatggctttattaggattctacttgttctgtattatttaagattaatttagccgttaactaatatgcttatgatttcatctagagaggtaccttcccatagatactgggatgcaaaaattgagacttaaaatccttaatggatttggctatcgaagtgtttgaaataagcaggtccacatctttaaataattattcaaaactaataaggtttgttccctcaaccctacctcccttccctgactttacattgtgaaattaaccagcacgctagtaaattttctccgtggcaggctaattaattttattaaaccaaccagtgatacttagaatgccttaaaattttgctcgtcaactatttattctgttcatttgcattacaccatggtttttgggaaggtggggaccaaggtaaggggcaggttgtttttgaggtattttgcttcttctgtggtttagaatcacatgaaccctttcatacaattttaacaaagctaaaattaactgagctaagatcatggaacctcacagaacagcaagaaatgtacttaaaattcctttgcaggccaccttctcaaacttaggggttaatcagcaagctattcctagatacatggaacagagagaaaagaggaggttaatatgctagagtcaaagtaagtcacctcagattccaccaagacaaaggaacatcacacatccacaaaggccaatgtgaaaccagtaaagaaaaatgcagtttaaggacagaaagaaaggatttgtcctctcaagactgttattttgtgtgtggagatcacataaatccactaatttgtcagacacaacaggcatttttaaatgtctagtgcgttgaaaaccaaaatagccagaaacaatgtctattttatgtaaatctcagtattctctcacaaaaatcaaccaacatgagcgcataagaaaaggtcaaattctaaacaataatctaccaaaaatgtttacatgttaactaatcatgcatcctgggtaactatatattacaagcttagatataatcaaataatcttaactaatgagaaagagaatgacctgtgagtttcttttcctagtaagtaaatactcagtttttaaaagttaatcagtctggggcccaggcacacagttcctcagatggtattgtcagctgtgccccttccagtgtgttcagtagcagaaaaataacacccagagaggttgggactgagaacaaccatgggctctgaagacatggattcattcattcctccatccagcccttgaataagtatttgttggatgtgtacaggatctgttctaaatactgtggatttttaagttagaagtgcaaagtacttaattaatctcatgaaatttatatcccagtctggggacagaaaataaacaagtaaatacataatttcagataacaatttactatgaagaaagtaaaacagagaaatgtacaacattagacagaaggctcaaggaaggcttctttgggaggtgacatttaagagaagacctgcagagatcagttttgtggctatcttggagaataacgtcccagggagaggtaactgcaaagacaagtttctttttctgaaggaacacattcaaggtatagaaaaaaaaaaatcaaggtgactatcatggacagagcaaaatttactcattgtgtgatcctgacatgttaaattttctgagcttcagcatatctataaaacagctctaataccacttagtgaaaatattaagtgaggtaagatatatgcttagcatagcacgtagaacatggtataagcccaaaatggtatatatgagctattactatcatgatttcaaatatatacattgtaaatgtgttttaatgcttgttaatgccttatcccctttaacatctggaaagagttagagaaagaaaactacaactactgagtgatttgtgctgtaaatgcaaccttcccgaattcttaggtgtttctgatcgcggttactaggaaacccttccagtcctttaaaaccccactcaagacccaacttcagaaagcattattaacaggaaaggtctatgacacagaactctaattacaaaaaataatggatcaagtgtcttaagggaaatgccaggtacctccaagtctgtattatcatatttttatctataatttcaatatttctcatcaatccatccttcattgtaccaaggttactttttaaaaacatggatttcaaaattttactgtgatgcttaacatacctccaatatcttcctttaaacactcggcgaagtctaaactccttggcctggttgttaagctcattccctgcctcgcctcaattacacttccaaactcatctcctaccatgttctccatgcaccatgggttccagtcaccctgtgtccttccccattcctgaacatgccatggcttcctccctttcttcatctctccatggcacagaggtcaaagccctggaaggacatcctttgaccctcacatcattaagtcctcaatcttttcctctgccatggtacctctctcatattttacataaggtgaagatggtatactttaagaatctgtggtatgttgcataactgtttccttctcccagtagactgtgaaagccttgcagtcagcagttgatttcttaagcatcttgataactgtctcccagcatggtaccaggggtgtagcatgtataacatagatgtttgtgggtataattataccatacgactcctgaagactgagtcctgctgatgggaggaaaagcttcttgacaaagagaacatagggtcttaaaaagaaaccagagagcctctaaaggggcacagccttataaggcatgtatctgaatcatggttgtttgcttcttcccaatttgaccctgtccaaaaatcaaggtttggccagcagttacataattgtgcccccaactcacacactcggtgtagattataccgcttgcctgaatactccctaacaaaaataattaacttcaaagatgagttttctcattattagggaatgaataaggaaaatatctttccttattcaaaaaagttttaaatagctgtatctccttaggaaaaatgttgagtaaaagttcaactattatattgctttaggcagacactgaaaacactaatctattaatcaccaataattaagctaaattcatccatgcaatgacaatttgtaagtatgcaatacgtgccagtgaacgtaaactggaaggatacaaaacattccagctagaagcagcagataataggctcacaaaatgtttaggcaatggcaggtagttcaattttggtttgaagagagacttaattaaagggactagaaagatacactccaaacatagtttggggtaaaaccttgtagaattttgaatgccacgatgaacctgtaatacacttgttatacaggagagagctgttgagcagttatgaatggaggagtaaattggacaaaattatattacacacacaaaaagtcaaaatttgaaaagactaatttagaatctattgtaatgggcaagaggtagcaaaaacttgaatagtgtggacagaaaggatagggcaaaaaagaaagacactacagagcactattatagtgacattgctaactagctctggggacttagcctgaaaccactctgaggctttgagcctaggtttaggggaagagctttgtaccatccccccagaaacaggcagaggagtctaagaggtgagcatgactactgatctgtcccccagggactgggaaaggaatggagtagagaggaaaggacaggtaaaagaagtagataaacagatgaacttagggccaatgccaagtattccactgaagtttctcctcttccacggaaggatcttaaaaataaaatctaaaaagtaaaagaaaattcagaggtagcagaagcaatatcaagagattgatactgagcctagaacttatggagattaaattagttgtattatttctaataatattggcctgggaaggttagggtatcagccagaagtctgaaaaataaaaaggcctaccaagtcctaggatgcctaagagaactgccttacatgtacataatcccatgtcttagtcaccaaatatagtttaggttcctagagagccagaatccacacctgataattctattctcaaaatactggaacaacgtattagagaatcaatgaatgctctccgattaagtcattcttgcaagcacttaccattaaacttattagccattacataagcccaattaattagttaactaatttgtaatcataatgatcacaatgtggaaagaagtcagtcttcaactaaactattttcggcgtcacccaagatcagatcgctccctccattttatactttgaaaacactcactttctgtctctgtctcttccacgcatgtgtgtgcacacaggcacaccgctcataaactgaaccaacaaatacaagcctatgcaattttacagcaagcctcaaagctctgatacagtaattccaagtaatcctacttttgtttccatctgtataggtctcattatactaacactcctgcagatggtgtcagaaaggtgaagtgtcaagtccacaaaggggagaccccaacagctcattgctactgcaatatcaatcactgctggtggtttttacttttatctccttccctccttagttgtcccactcacactgtcagttcggttagaatatttcacctacacctcacaatatgtcaaaaggaagtagacacacgctgtgaaaagctggtaattttattagattcctttacctttaaaaatctgttacttggtcaagtctggtttctgggcttcttttttgcagggaaattgaggcaaacatttttatgtggtcctctggtgcctgctctgtaccacaagaattatatacacaaggatcattagagtagtgtttcgcccattaagatataataaccgtcagcagggacaaaaagcagatcagtatcacaaattcaaactaacaggcacacataaaaactatgtgcctgctttagggcacatgcaaggggtcagggtctcatacaacagggaaaattccccctccgggtaagagatggcttttcacaagaccagggttaagtagaaagaacatgcaggattctctcagctctccagccatttttcaaccctgaacacttctctctccaagtgtaccatgcccatataaacaaagaatgcacttgctgttcgaagggcttctaatgagtaaaaagacaggcagagttatttaagggagttgttctctttgactgagggagcacctctgagcaagaagcatgggacacggtggtgagaaaggcataccttgtatagtctgttaagattagccaaagtaaatctggtcatccgaagtgtgggagatgccacaggtaggtagggttgggttggctcaccaggtttcggctgacggtggttttgagaatgatttgtacgtagcctgttttattcttctttttatttccttaagtgactgatgtaagcctcttgcacaaagcgggtatgtaataatgttttgcaaatggactagatatagtctggtccagcccaggaaagcaaagtttgataggattacttgactctattagcagaaattattttgtttacaatgttaactctgcaacagccaaaataaaacttagctgctttgcccaaaatactggtatttttcagaactcgacagaaattcaatcagtaagagaaagagaacagagcagggaaagaaatatagaaggacttggttttttgaaactctcatgtcacctatatcccacaaaactctgacaaacctactccgtgacctctacaaaggcaacgataacatggggttcatgggaagaggcagtagtacaatctgagagttgaggaaagggaaggcagaaacatcttcccacagttttccctcccaacaatgaggtcatccttgagagcaaacaccaagtctatgaaaaaaactgcaagaagtggaaagaaggggagccagtagagaggggtgtggagcgtggaaggaccactcggaggcaaggccaggggaccgtacagatctgctcccgctgaagagctctgtaacaagcctcttcaaaatggtcatagttctcctacaacctataccttgtgtttctcctactggacactaggttccacctccaataagcaccaggcctacctgtgcaaacccagatatgcacaaatcctcactctatgcaagtatccaaatgagacgcttaagggcaccaattaagtagcagcttaaaagaatctctgtccactccaccacagggtgaggacagcaggcagactttattggggattaatacttaataactgatagaatttattggcagcttcctctgtaccaggcattgttctaagtgttttgtatttaatcatatgaggcgggtgcgtttgttgtttctagttttacagatgatgaaactaaggcacaaagtcacactgcttggtttcccaagctcaattcgacaaccaccccaactatcctccaaggcagtggtaatttactggacaaagattgtacttcattttcatagatgtcaggctataaataatcattccacttaaaatccttaccatctaaaaaaagtttcaatgaattaaccaattaagaacaaactacccacaaaaggctacaaagaaaccagggtctctaaatggcatcatatgctttttacattgatcagcaatcccagagtgggaagcacatacagcccatgttatgaaaatttcatttatttagtatatacattcatagttccaccattatttaattcatgctaatacatggttcacttctaatacgctattgcaacatatgcaatgaaatgattaagctttaatctttgttacaaactatttgcagttcttcaaaaataatcaatattgcagctaaggcacagcagacagaatttctttaaaaaaaaaagaaacctggaacttgaaaataccttaccttaaataagaagaaaataaaatctctagtaacataaagtctaattttcttgagtatataacaataattgtaattttacactgcatgccaaaactgactaacaaggaaaactaaggcacacagcacacgaagaaacacaaacaaaagttgcatccaaacagataaaaaaaaaatcaagagactatagtatagtttataatcttatctaaattgctaaatgcctgctattgtgtcatgttaacctgggctctgatggagtaagagacaagtataaaacacacagtgaacaggagctgcctgggtggtggaagaaatggacaatcgcaaaagggatacttatctaatctattacaaaacttcaaaatcactcaatctcataaagcaaaaatccaaattgtctcctaagtccaggcatgtactatgcctcaagttgcccaaggtctccttttacaggcgcaattaagattgtccatggttcaaacctcaaagaagggcacagggcatagaattcacaaaacttccccttctatatcccctctattctccagagggcagtggaatgagaaacagtttgggttaagctgcttctgttcgtccattagttctggttcttttaagccaaaattacattccaggcagattggatggtctcagccagttgcctgaaggtaaagtacaaagaaatgccaccctctgctttctggactcagctctgcgagtgaaggaatgcagaatggtttagaaagggtaggtgggagccccgctgcttaggtgttttagacacagcaggaaggaggaaaaggtggaaaaggaaaggaaaatattagagtgactacttatatttatctaacattttaaaaaatttagctctacctatatttaataagttaattgaaactgcccatttatttagtctgtatgtcagcaggtcagggtcacatggcacttttggtggataaactctttcagacgtggcatgctcacttgttcctttgctttcaacatattgtgatggggggggtattaaatgaagttttcttattctaaaatctggttttaactaaacttcacaaaataaacaagttggcttcaaaagcctcctgcagtgaaaccccagatttaagataatccatcaacaataggaaaatggtagagcagacactttggttgctagtacaaactcttcatcagttatggaagtgggtaaaaacaaggatagccaaatggcacccgccaagaagttgatccccataaacagaatttatcactaaggctacttaaaatgtgggtttaacttcattactgttaataatgagactcattgtaatcgcatattgagccttgagatatcaggctcataagaacccaaagccatcaaaattagcaagacatttaaaaatattactaatcttattttaattcatattttttgcatatattttataacatgcatattagttatgtcctacacttatattttagaaaatagaccttgagaaacatgcactcaaactttttactgttggggtgcacgataaaaaaattctgaagaccaaaagccttttgagtagacactcttctaggctagactgagattgttcctcaggaaagtcctagataagttatgttggatttcagatgcctggtcaaattcattacgttttagacaacttgcataaactttgacaaagatttctggcaattattaaggcaaaaggaaacaaggtccagcgggcattctcagacctgggttttagactctgagcacatagctgacatcccttttgtacactttgaactgagattcccaaacagaaagaaagccaatgttgcagctgatctctcaaactgacgttctgaactagtaagaactaaataaaggatgttttatcttgatgttatttaaatattataaatattaattctgcgtgtatgggaaattccaaatgaatgccaggaggtttctggcatctagtctgttgcaatgcatatgaacgtttatatcaagaatagtcaacagcaattttctatctcccctgggacaagaataagaggaactcactaacatggaatgaaaacactaatttgcaatcatgtaggcagtcactgtgaccaaggatgccaaatgcttttaaatataagtcatcctatctagcagatggaaaaccagcagtaagtagattacttattcagagtctctcctggaccaaatgcaagtgcttttggtattatggtcaccctcctgaaaccattcttcctctacaaccaaggcttttcctttagtgattcagtgttttcacttcagccagcatatggatttggctttcttttacaagacatcaaacactatcttgggtagaaataaagggataaaggttacttttgggagtatgttatgtctaacctagccctatccgcttaccactagcacaaaggtagatttttagatgctcaccgaacactttagctgagatgtttccactcatctcacactcaaatcatccaaaacagaatttacctttatgcttcaagccctgcgtctgcacctgtgttttcagtttctggcttggggcaccattatacacattcctgctgaagccagaaacccaaggtacagccaaaagtcttctgtattactccttgcatctgatgtgagcaaccgtagcaattctctctccaaatatccctcatacgtggtctcttctctacatttctatagacatagcttcagttctgacctttgtcatttatcatctgaacaaacacaatcccttctaaaggatttctccaccttcagtcctatttttctttattcattcaacaggcacttcatgatcatcacctgggtgccagacacaggtgcaaggtgctggggatacatcagtgagcagtctccttctcagagcttatattctcgtggtagatgtaaataaaaacataagtagatgaacaaataaaatattagttgctgtgaaggaaataagagtattaaattaggatgacctgtattagggtgggaggacctaggcaggctctcctaggaggtgacatttaagctgaaacctaaagaaaaacacctagctacatagagagtggggtggaaaagcgtttcaaacagagggagcgtgcagaactgttcattcaaaatgtgttgtgcatgcaatgacaaagagtaagaaaagtacttggcctctgtaagaaatcaaagaccactgtagttggctagagtgcagtgagatgagatgcaggtgggacaaagtgaaataagagatctatgttttggccaagcatggaaaacattagaggccagtcttccatgaacagtgtgatagatattgctgcattcaaaatcagatcacaacatggcccttcttagatttcttgtccccattactgatgcaataatataaacatttcttgtgatgctattcatgatcttcctggtctggatgctgcttgtgtttcttgccttctaccttaaaacaacccacattcatatatacaatctatatactccagctgtgtcttttttttctttttttttttttcgagataagagtcttgctctgttgcccaggctggagtacagtggcgtgatctcggcaacctccacctcctacgctcaagcaattctcccacctcagcctcccaagtagctgggattacaagtttgtgccaccaccatgcctggctaatttttgtgttttttgtagagatggggtttcgccatgttggccaggttggtctcgaactcctgggctcaagcaatccacctgccttggcctcccgaagtcagggattacatgtctgtttttcacgttttgtttcatgctctttcctcaattggaaaagctccatctctgtgtgatgaccactatttcatcctctcagacttaatcttaacttttacaggaagagtcaagatactgctctgttatttcatagccaattctactataatgttgggctgctttacatctctcccaccatcctgggtgtgcctgaggatgttagagcctgatcttatgtgctgttgtagtcatgacacctgatgcggagctggcactctatacagttttatggaaggaaagaaggcaggcaagcaggcagttttgtccaagtgcactggaatagaatacatggcattctgatcctatctagtttaagattaagtctgtattttttaaaaattgaattaaattcaacgaacacttgaatatatgacttttatgcatgacacattagcccagttatttgcaaacaatgcttaatcaccatagaaattcctggcaaagaaatgcataaaggaatgaacactagccctgctccttgttacctgtcagatgttaaggtatagagaagcaaaactcttcctgaatggagagtgtaggctgtgttaaggagagcacagagaagtgctcctcttacaaaagaagaagagaagattgctcttcaacagccaaaccagtaaaagccacatgatctatttgtgggagacaattgcagactgaaacacacaaaactgttatcaaggtgacaaagctgcaatctcagaaaaattgaaatgtcattgccatttggaaaattggaatgcctgaagctatccagaaggcctgtaagtacttctattcctatcaacttaatggtagagttttccaagaatcacgtactgtattttgtctctaaacctgtttatgcctgtttctttgcattcaaaaagatatttaccgtgtgcttattatgcatatgccgaaacagagtgatggaaatgacattttaatggggaaaatggcaggtagaggcaaatgatgtggagaaaacaatcaataaatgtgacaattttttttgttgttgttgtaagaaggaatactctcctctaagtgaatatactggcttgctggtttatacatcagcttcttgtgagtttggaaagtatgagttaatccctctgggctttgtgcatggctaaaggtgaatatacgaccacagggctgaagaacaccctctgaattgtcatttcaccagggctggtcggctgtgagatcttgccaggcggccagctggcctcctccagtcatatctaaccatagcccctctcacattaaaataaactttttaggccaacatcagcacagggagtcctttcaccagggtgacaacacaaggccaagtacattccacacacaaattcagaatgaaatataactgatacagcctgggctcctaatgaccttcagatgccagtgtcagtcaatgactccaaaggaaaactaacctccagttatagcgccatattcatctggaatgcattactaaacgaagaaatggaatggagatgattttttagaacttaggagccaactttgtggtggatcacagaggtgcttgaggaaggaaaacgaacaataaagttcccacaaggactagaagtctgtgatgctacagtcaacattcggacgctgaaatgaaagttcacgtacgcttcacagaagcatgttcttatctagagtataacattggaaaaggtctggatcgacaaatatcttttcaaactcacagtaaacattcaatctaataaggctagaatgccatgggaaagtttacagtcctgagctggtaactggactatcacatggctggaatgacttctatccatggggaaatctgacgcactgcagtaggacatgcttaaaacaaacggaatatagtctaaggttatatggacattgtgaaaactcacatccacagcgttacacatcatggtgatgaaatcaagcacacttgagtttcaccaggctcatggagaccactgtcaagaccgttctgtgatacctgaagaatccctaacttcaataactgcttcaaaacagtcagtcctttaccaaaagactataaactcccctgaaaacatttgtttttgtttttctttttttccctctgctctaacatcacattcttctgatgtgaatttttcagaaactcaattcttctggaagatctaacttgagattcttctaaagtccctgaagaatcccattctaatttcaatgacaggcctatttagccaccctctgccaaactcactgtatctgaggtttcatattcacacttatgtattcagctctgttaatgagcttaaatacgatacagcttatctgaatgctctgtgattatcatttaagatgttttagttttttgtggaatttttaatttttgtaatgtagcgaaattttaagtccctaacaatgctcccttgaatggaaaagtagcaggtgatgtgaaagtaacttaagtgtcttgtaggtcaggacctatgggtattctgctgagtagcaaagtcaaacaactaaacaacatgaactgaaacctaaagggccgtgtggtgtcagatgtttccactgtgaaactcatactaaattctactgaaaccatctaagagattgtattatcactcagcaaatataagtgaaatgtcaatataaagatttacatttgctgggcatagtggctcacgcctgtaatcccagcactttgggaggccaaggcgggtggatgatctgaggtcaggagttcgagaccagtctgaccaacatggagaagccccatctctacttaaaaaattagctgtatgttatggcgtatgcctgtaatcccaggtacttgggaggctgaggcaggagaatcacttgaatccgggaggcagaggttgcggtgagccgagatcacgccactgcactccagcctgggcaataagagcaaaactccgtctcaaaacaaaccaaaccaaaaaccaaaaaaacccccaaagatttacatttaattaattagtgagaaaggggagtattgttttcatgcgagacacagattttgaaaaggtatcatgtgttctggtctacttttctagatactaataaaaaatatgtgcacacaaaatctcttctctttaaatgtcttttatctaaaattgagccaaagataaccaaatagaaataacaacattttgaaaacgaaaggatgaagaaacaatgacgtaaccaaatgaaggaaagtattcctccctagaagtattccagctaataaagaagaaatgatggaattagtacatcattattttgaaaacttctattgaaataataaatccaggcaaagataataagtgctcactaacatcacagataactaaatattatgcacttcttgatagaaaacataatagcatctatgatgtattcttccactcagattaagtctctagatcagacagtttatagaaaacaggggacaggggaacatgataaataaaaacatagcagcatcatcagcaaaacctaaaatgtggggaagtctacaagacaagtgacctggtttcttcaacaagtaaattacaaaaggggaaaaaatggagggtagaaacttctagattaaaataaacttgagagacacgtcaaaggcaatgcatggaatttgtctggatcctcatttaaactaactataaatgaatggatgaattaatgagtatacaaacaacagggacattagaaccacttatgtgatgatactgagtaactacgattaatgtctttgaaggaaggataatggcactgggtggagtattgtttggaaaagtacccctgggccgggcgcagtggctcatgcctgtaatctcagtactttgggaggccaaggtgggcagattgcatgagcccaggagtttgagaccagcctgggcaacatggcaaaaccccacctgtaaaacaaataaataaataaagtatccttattttttagcaatagtactaacatttttaacagatgacttataaagcatctgaaatttgcttcataacctacttggtgagaggggggcattttcagataaaacaagagtgagttgatggttctgtagctgagtattgggtatataggattcattagggcattctaactttgtatgtgtttgacattcttcagaatgaaatgttttttaaaaaatggaaaaagtaaaacaaaagtgatagaaaagacttaccctgttggatatccttcatttctaaatgtaaactagatatcaagattcccacagtttgagatcgttttccatccaacaatttgatgatctaaaattagaaaaaaaaaaaaaagaatacaagctcaaatgaccatgcagtctttcaggacgcacaccaaaaacattaaatttttttagatacactgattgatgaactaaattgatgctgcatgcactctttaaataatacttaattgggaagtaacttatgcacaattatagacatcttacacaatgacagacgttttacaaaacaaacacacaaaattccatcagcctaatacaaacgctaaatctttatatgttactgtgatcattttactcaagtacaaagttataccagcatcaagatgtacagaatgtggtatccatctttttcacttatcactggaatattttcatgttgctactggtgaagtcacttcatagcctccaatctttttagtaatgtcatcttctgagtgatttaggggaaaaagcatgaacagctgagtcagccaccagtgatatggccttggtaaagtgataacctctatgaattgatttcctcatcatgaagggctgactatatttagtctatattttattttgagagaaggtctagctctgtcacctaggctggagtgcagtggtgtgatcagagtttgtctcagccttgacctcctgggtttaagtgattctcctgcctcagccttcagagtagctgggatcacaggcaggcgccaccacacccagctaatttttaaatttttttatagagacaaggtctccataaaaacttcattgcccaggctgatctgatcccaaaccctaaattcaagtgattcttccatttcagccttccaaagtgctggggttacaggcattagtcattgcacctggcctatacatttattttagaaattaaatgactatatgaaaagcacttaatatagttcttgacatatatttatttaaagattttctgtttcagagaggttacttcctatttgttattattaatataaacaatataataccttgcacacaaagctctagttttaaattaatcaattaatttttgagatagtatccagcgccgtcacacaggctggagtagagtgacgcaatcacagctcactgtaattttgaactcctgggctcaagggatccttgcaccctcacgagtagcaagcactataggtgcaggccaccatgcttggctaatttttatttttttgatgttttgtagaggtgaggtctcactatattgccaatgctgctcttacactcctgggcccaagccatcctcccaccttggtctcccaaattattgggattataggtgtgagccaccacacttggccttaaaattattttttataatactatgtatttttacaatcttcatagaaactccacatacctcattgccagttatttcaacctttatgaatattccatggagaagtctacatagttttgtgtttctctacaactagtaaaccaaatcagctccctggtaacatatcacgaagctgccactaagggaaaaaaactctctttcctctcatgtggcagggctacaaaaataaaagagaagcacccacaaaacacaaatcttacaaatgtttttaatgtgctttgctggttaaaatacaaactaggctgaacagctgtgctttccttcccacctaggtacttacagaattgccaaactactgtgaagacaagactaaacagtaacaaacatctacatttgtattattactgtaatagctgagttgcttgctggttgaaaagtaagggacaacaatagtttgttccaataaagatgatctaactgcctaattgtctaactacctgttgattaatcgatcttgaatcaattattgccagatatttttttcctttacctgttcagaatggctactttcatataacgattagacctaaaagatagtaaatactaagtattaatcaagatgtaaaggaaaaaaatctcatttttcagtcaatatgtttaagcatgtcaatattcgccttagaaagattcttgaggcatacagaattttaggagttttaaacagaaatagagaaggtactcagtaattttttatatgaaaggaaaagcaaaaaaaaaaggcaattaagcataatacaatatcttccttaaaaatgcaatttctggctttttcttagagaacccaaatttaaagtcaaatgatttcttcatctaataaaaaaattaagaaaagtcaatttagccatgcacccattcaaaaaatatttactgtacacgttacatgtgcctggcattgctttgtattctggggatgcggaggtgactgagacagatcaagtcgtaagaagtttgctgtagagtcaaaaaggcaaataaaagcatcacctaaactaactggagtgcaaattcaaaaagagaaacgttttgggaattgactagatttattcttaagtgtccaggatggtgactgatacaaccacaaccatggcatacacatcaatgacaaggacacaggaacaggatcaaatttatgacaagatcacagctgggttgcaaaagtttcttcaaatgaacacgcaccaagctatccagttagggctctgaaaactaccagtaatactctgcctacaagaaaggtaatgtacaaatgcacatttctctgttagctaattaaaagaaagcaggagagaaatcacgagagagtaaaagagcaagaaagatattgattctgtctgtccctgagtaaaatgaggcaaatctacccctcaccccattatacaaccagacttaactgtggaaaggatgttatcaccataagccatgcttggaattttgtcgaatgacttggcacaaccaggtatttgctgagtgttacctttactgggactaatgccttaaaacgtttttgtttggaaatctgatgctgatttcctacaaaggggctgggggcagctaagcagtggtgaagttggagcattttgtattctcttccctacctgaaccaaattctctgtctacttttaagtaaattttcaaaaagatccttctatgtttccatgtagccactcttgtgaaataccaccaggtttctcaaaaccaactacaatggtagggacacaatgcgcacagaatgatatgtcctaaatcctcttagtctcttcgtcttttttttctcccatggctttgaaggcttaacactaatttctctttatttttatgaaaagtgcacaacatgaaatgtatcctattaacaaaaatttaaatgtatagtacattattaaccacaagcacaatgttatacagcagatttctagaactttttcaccttgcgtaacagaaattttatacccacagaatagcagatttccaattcgccgttgttccagcccctgggaaccaccattctactttccattcctttgagtttgaccaccacggatacctcatataagtggaatcatgcagcatttatctttttgtgactagattattttcacttagcataatgtcctcaggccaatccatgttgtagcaaatgacaagatttcctttttttttttttgtggtcaagtaatattccactgtatgtacacaccacgttttctttacccatttgcccatcaatggacatttaggttgtctccatctctttgctattgtgaatgctgcaacatgggaatatcttttcaatacagtgacttcaattcttttggataaatatccagaagaaagattaatggatcatatggtagttctatttttaaattttttttttttttttttttttttttgagctggagtctcgttctgtcatctaggctggagtgcagaggcttgatctcgcctcactgcaagctctgcctcccgggttcacaccattctcctgcctcagcctcccaagtagctgggattacaggtgcctgccaccacgcccggctaattttttgcatttttagtagacggggtttcaccgtgttagccagaatggtctctatctcctgacctcatgatctgctcgccttggcctccccaaatgctgggattacaggcgtgagccaccgtccctggtctatttttaaatttttaaagaacttcatactgttttccatagtgactacaccattttacatttccaccaacagtgtacaaaggtcccactttgtctacatcctcaaaaaaacttggtatttttcagtttttttttttttgacagtggccattctgacacgtgtgaggggttatctcattgtgattttgaattgcatttccctggtgattagtgatgttgagcatcttttccttatacatattggccatttgtataccttttttggagaaatgtttggataagtctttagcccatttttatcagacatatggtttgcaaatattttttcccattctgtaagttgtctttttactccgttgattgtttcctttgctgagcagaagctttttcatttaacatagtcccctttgtgcatctgttatttttgctttttttgggggggggcggtctatgcttttcatgctatatccaggaaacaactgccaaaatcaattttagaggacttttccctattttttaaaaaagttttatagtttcaagtctcacatttaagtttctaatctattttgagttgatttttgtatatgttccaagataagggtccaatttcattcttttgtgtgtggatagccagttctcctagcactatctgttggagagactatcctttccacattgtacagtcttggcacccttgtcaaagaacatttgcctgtatatgcttgggtttatttctgggttctctattctgttctattggcctataatgtctgtctttatgccagtaccatactgttttgattactgcagcttggcaatttgttttgaattcagaaagtgtgagttccctagatttgttctttctcatggtggttttggctactcagggtcttctgtggttccatacaaattttaggattgttttttcctatttctgcaaagcagccactgggattttaagaggaactgcactgaatctgtatgttgctttgggggaatacagacattcaataatattaattctttcaatccataaacatgagatgtctttacagttatttgtgtcttcctaaatttttttaagcaatgttttatagttttcaaaactagtctgtactagtcttttaccctcttcagtttattcctaagtatttcatttttttggatgttactttaaatgaaattgttttcttaatttcccttccaggtagttaatatttttgtgttataagaacacaacgaatttttgtttgttgatttggaatcctgtaagtttgctgaatgtttttcatagttcttcacagtttgcttttttgggggaatccttagggttttctacatataagatcatatctgtgaacacagataatcttactatttcatttccaactttgatgccttttatttctctctcttgattaatgtctctatgactttcagcactatgttgaataaagtagcatgaatgagcatccttgtcttgttgctgatcttagtggaaatgcttttggtttttcaaccttgattataatattagctttgaacttttagcatatggtctttatttctttctattccttctaaagaatatttccttctttaggtaatttccttctattcccagtttgatgagtttttatcagaaaacagtgttgagttttttcaaatgctttttctgcatctatcaaaatatttttatcatttgttcttttaatgtaatatatcatattgataaatattcatatgttgaaccttccttgcatttgagagataattgacacttggtgatggtatatgatccttttaatgtgctattaaattatgtttactgggccaggtgcagtggctcatgcctgtaatcccagcactttgggaggccgaggtaggcggatcacttgaggtcaggagttagagaccagcctggccaacatggtgaaaccccgtctctactaaaaatacaaaaaattagctgtgcatggaggcacgtgcctggtagtcccagctacttgggaggctgaggcaggaaaatcacttgaacccgggaggccaaggttgcagtgagctgatattgtgccactgcactccagcctaggaaacagagtgagacaattaagtttactagtactttgttgagaattttaacatctatatttgtaagagctaatgacctgtagttttcttttcttgtaatgtctttggctttggtatcagagtaatgctgttctcataaaatgaatttggaagggtgacctcttcaattttttggaagagtttgagaagcactgcttccctgttaattattctttaaatgtttggtagaattctccactgaagccatctggttctgggcttttctctggaggtttttgatttctaattcaatctccttacttgttacaggtctgttcagattttccacttcatcatgattcagtcctgctaggttgtacatttctaggaattgatctatttctcctaggttatccaattttttggcatgtaattgttcatagtaggttcttataatccttccagttctgtggcatcggttgtaatgtcttctctctcattttgtatatacttgtgttttctttttctccttaatttagctaatgatttgtccattttgtttatcttttcaaaaaaccaactcggttgtgttgactattttcctattgtttttctatactctattttgctttttttctgctgaaatccttatttcatttcttttactaactttgggcttagtttatccttctttttctagttccatgaagtgtagagtcaggttgtttatttgaaatctttttaaacataggtgttcaccctaaaaccttactcttagtactgcttttattgcatcccatatgttttggtatgttgtatttttgtttctgtttgtcacaagatattttccaatttcccttttggtttcttctttgacccactggttgttcaaaagtgtgctgtttaatttccctgtatgtataatgtttccagttttcttcctgctattatttctagtttcatgccattgtggtcagaaaagatacatggtataattccaatttttaaaaatttgttaaggcttgttttctgacataacgtgtgacttatcctggagaatgtgcacttgagaagaatgtgtttcaaaacccaattcctgttgggtggaatggtctatttccattatgtccatttggtatatagtgttgctcaagtcctctgtttccttattgtttatctatcttgttacatcatttatcaaaagtgggttattgaaatctcccattgctgtgttgctgtgtatttctccctttagttctgtaaaaatttgcttcatatatttggcttgtacgttgggtgcacatataactgttatatcttcctggtgaattgacccttttatcattaaatagtgtccttctttttcttttgttagagtttttgacttaaattctaactatggccaccctgctgtcttttggattgtttttagtttagctaaggatgtcagttgttggtttttttaaattaactcttggaatatctttttccatcccttttcactttcagcctgtgtccttgagtctaaaatgactattatagacagcatatagttccatctttttttatccatttagcaattttatgtcttttgactgagaaattttctctatttgcatttaaagtaattactgagaggcaagaacttattattgctaatttgttcattgttttgtagcttttgtagttttgtctttttctatattgatgacttttgtgttttgtttcttacagtgacttgctttgattcttttctttttgttgttgtatctcctataggcattttctttgttgttactatgagacttacataaaacattttataggtataataatctattttaagctaatttcaatcacatatacaaattctactcttacttctccactcccacacttcatgtaattgatataacaaattatattttttctattgtgtatccattaacgtatttttataattatatttgtttttaatatctggcagacataaattctataccagagttaaaagtgatttatccgcatcattatagtattctgtatttatctgtatatatacctttatctacaagctttgcgctttcatatgcttttgtgttgctatgtcatgcccttttcatttcaactttaaaggctttcctgtatcatttcttgtaagtctagtggtcatgaacaccctacacttttatttatctacgaacatctatttctcttttgtttctgaaagacaatttttttccttttttttttttttttttgggtggggaggactgagtctcactctgtcacccaggctggagtgcaatggcgcaatcttggctcactgcaacctccacctcccaggttcaagcgattctcctgcctcagcctcccaagtagctgagattataggcgtcccctgccatgctgggctaatttttgtatttttaatataggtggggtttcaccatgtgggccaggctggtctcaaactcctgacctcaggtgatccacccgcctcggcctctcaaagggctagaattacaggcatgagccactgtatctggccaaaagacaatttttctttttctttttttttttttgagacacagtcttgctctgtcgcccagacagagtgcaatggcatgatctccactcactgcaacctctgcctcctgagttcaagcgattctcctccctcagcctcctgagtacctgagattacaggcacgcaccaccatgcctggctaattttttgtatttttagtagagatggggtttcaccatgttgggaaggctggtctcaaactcctgaccttgtgagtcacctgccttacccttccaaagtgctgggattacaggcgtgagccactgcacccagccgatagacagtttttctagatatagttttcttacttggtaattttctttcattgctttgaatatattaccctatatccttctggtctgcaagttcatgctgagaaatcttctgatagtcttgttggggtgcccttatatgagttgcttttcacctcctgctttcaaaattctcttttttgtctttaacttttgacagtttgattataatgtgctcagtgtggtcttttgagttcttgtaatcgggatccatcgggattcttcaatctgaatgtttatttcttccgccagatatctgaccattatttcttccaatatactttcctcccttcctaccttctccttctgtaactgtcacaatgtgtctattgatctgcttgacggtgttccatacatcccttagactttctttactcttttttttttttgagacggagtcttgctctgtcacccaggctggagtgcaatggcgtgatcttggctcactgtaacctctgcctcccagattcaagcgattcgcctgcctcagcctgctgaatagctgggattacaggcgtgcgccaccccacacagctaatttttgttcttttagtagagatgaggtttcaccacgttgggcatgctggtcttgaactcctgacctcgtgatctgcccacctcagcctcccaaagtgctgggattacaggcgtgagccaccggcacctagcctcctcttcgtttttttctttttgctcctctaaatggatcatttcaaacgacctctctttatctgattcctccttctgcttcattaagtctgctactgaaccccactagtgagcttttaaatttggttattgtattctttagccccaatatttgtttggttcttcataatattttctatttctttgttgatactgtcattttgttcatgtatctttttcctgagctcactgaacatctttatgacatttattttgaattatttgtcaagtaattcatatacatctgtgtctttaggattggtttgatttcttttgttccactggttggtccatgctcccctgtttctttgtgtgctttgttactttgtgttgggatgtgaaaaagaagtcaccattctcattctttacagactgatttcatacagtgaaagacctttgccaatcagcccagctagtgtctctgggggattttcaagcctttttctgtggataaatattctctggacttacgtatgtgaattcccaattagagggattttggtttttcaggagctcataatccctgctctctctagtgtctgtctatggtactgcagtttctctggaggtataagctgtccagctcctttttgttctcatctgcccccaaacatctagagtatgtcaagtcccatgaacacacagagtcaaagaaggaaaaggagaaaggagaaaagaggagggggagtgggaggaagaggagaaggaggaggagaaagaaggaaggaaggagaagaaagaaggaaaggaaggaaggagaagaagaagaaaagaagatgggtgaagatgaagaagagcaagaggaggaggaagcagaggaagaagaaaaaacagttccttggacaacactgtgaaaaggtgaaacactagacacaagctccactcttctttcccctgcagtccatgtgggagaagctgctgagctgtattggcctctgtctactgtactgcaggccacctagctttttgttctcagcagtctccaggcatctagagtatgctgtgtcccatcagcactccaagtcgggcaagacagaaatcagtctcttgggcggccctctgaaaagccagagcattggacggatgctccgactttttccttctccaaggagaagccaggatttggaggtttactctcacttactctgccctgagcaagggtgaggggcaattgcactgaatgcatactaattcatatcatcatctttcttctcagtggttcccaacctggcatctttccctgttagctcttagattcacacacaacagaaaccagtcttcaaagtacctccccaaaagtctgaacattagacataagatccagtcttctctctccctcccaaaggagaagccaggaggtagttttctctaaatcaatgtattgtgccagaaagggagtcagatgagtgagtgccatgaattttcctattagcttcaatacaactggtttcatgctcacctggggtttaggagcctcttaactgatttctgaatttctcacaaagggaactggcccgtgtattattaaattggcatctccatggggcaacaaggatccggtattttctattccaccatcttgatgacattacctccccctttcccacttttagtttctgagaggcaaatgctatgtcatccatggatagagagagaagacaaaagtggctgggttccaccaaatatgctcccagtcacaaagtggctcatatggacatgttggtagtgagagtaagagcagactgatctgagactgagtcaggcttcgctgaaagggggctggcctctccttcataattggaggacagtaccaaacaaactacaaggaaaagaattagaaatgaaggaagagtaacgagaaaaagagtagaagaaacatatattttaaaagatcttccttaagatatgcaaaataactgaaaggaaacaaatggaggacaataacacattagacttgtgaacacacatagaaatggttcagtacaacccaagactttgatatacacttagatctttctgagattggttagaaattgggctagcagggtgtgaggagaatgtattggaagtagacaggaggaaaaaagaaacttgaagactataggagagaaaaagtatacattttgttgcacttttttttttcactgtgtagcgtgtttttttcacgtagaaacacattactgacaacttccttgtcagtgcaggcagagccatttctaaaaacatcacatcatttaagtattcccctactaaaggacaattagaaatcatccaaattttggccaggcaagctgtggctcacacctgtaatcccagcaacttgagaggtcgaggtgggtggatcacttgaggccaggagttcgggaccagcctggtcaacatgatgaaaccccatctctactaaaaatacaaaaattaggtgggtgtggtggcacactcccgtaatcccagctcctcgggaggctgaggcatgagaattgcttgaacccaggaggtggaagttgcagtgagccaagatcaagccactgctcgccagcctgggtgacagagcaaagactctgtctgaagaaatgttccaaattttgtcaattgttaagaatgctacaacgaacaagcaggcagagagatccttagtcatgcaagtttgtattttcataggactcatagaaatcattcaaataatatgcccatttgaaaatttgataaatatttcagaattgtttcttattagacttaccctgccaagtatttgagagcaactgtttttctgttcccacacccactttaggtattaccaattttaaaactgttggctgaaaaacaggtgaaatgtgttttcatgattttattttgcatttttaatgatttttattagtcacatcttatgaattgtctttatattgtttttgctatattttccaattactagatctactaggctggtacaatacaaatacacttaaataagggcttagctaaataagacgaaaaaagatttacaaagagcctgctgtacataaaagtcattttcaaagggaagagggaatagaacgacctgttactacatctccactaagcactggtattgtgttcctctgcacattagccaatccaaatggacagttgtgcactgggggcagtgagtattgcaatactgtaaacctttattcctttagtggccccctgtggactttccagagtgataacaatacttcaggctcaagagtcctgtaaagtatgtatagctatctcactgctggggcattaaagcaagaagcacagctaaccgaatttttacggtaattcattttttatgttcattatcaaatcttacaacctccttacccagatatatacccattaccgaagaatttattgcagagtagtgaggaagaaaatattaaggggaaaaaaagacaagagtgaagaaaactgatgaagagaacaagaaaaagtgataacaaagatgtggaacatgacaaagattttttttttaatttgttatcaaccaatattactacttcgctttctgaatgcttttttagaatcattgttaagtttcaaataaccagaacgtaatttatgttgaaccatctattaactgaaaatttccctagcttttcttttgttggattatattcattattagtaagctaacttttagacagaaaaagtgaatttcaaaaattccccttggaagagaaaaactatatgaagataaactaatattgggtatttagtctcccaaatccattgacatctcttatactgtgcttgaaagaaatcaaattcaacgaatcacaccttccatatctatatatttatttactgaacgctgtggactggtgatcatagtgataatctgggaaatttttagaatcataaattgcctgaaattatcagatacttaatattctgctctttttatggtaggaaatttaatatatatatttacataagcacagatttcaaatacaaaagttataagaaactgataattaactcaaaaacctaattattaagcaccaacccactccttaagcttctgtttgctattagcattctgtgctattttgacaatttttcagttgtttggcctaaggaagaggttcccaacaatatcacaatctaagtagaaatacaaaaactgagaactatagccataaactacaacagtccttccctctagttttcaacctttgcctgctgagctttcatgaatgacctcttggccagctgtggaatgggatcaacatcatgatgtagtaaaccagttattcagagaaaagtcaggagaccagccttcagccttctatttctaggcctgcccttgctcgtcattgtatcaacgctgaaaggcagacagtccaattcaacggtcctcacaatacgcaaattcccatgtctactgcaaacaaaataaaaattgtgtgtgtgtgtgtgtgtgtgtgtgtgtgtgtgtgtgtgtctgttcaatggagttcaaagactagtttaaagagggcaaacatatataaataacggatacaggagctactcataagatcagtaacttaaaagagtttgtaattattctcaggtatacgatccttgaaaatgccaagactcttatttaaaaagggagtttgaaaaaggtggctgtttctagcacaatctttatccacgtaactcaaacacattcccaaaagaatgttacatccagtgcctttttttccgaaacaaaaatccagatctcacttttataaaacctctccatcagagtcttgagagatgataggctctgcagaacatgaaccccaaaagacactgtaactcatggtctgggtgtccaaacagaaaggactcttaccattcttcatggccactagggtaaaggttcttccgggcattaagacccaatagcagcagaggctttcacaaaaccatgaggtcagtttatcacatttgattgttagacgttagtgggattcctgactgtattagcatccagcttcatcatattaaaaggagttagttagcttgccttaggtaaataacaaaggaaaggttccccaaaagccccggcccacaggttagtgccttatccccacgtaacataaaaagcagcctgcgaaaaaaatcaagctgcaggaaccaataatatgaatgtcaaaataattattttccatgtttacgtgaagccagtagatagaatttatgctttaagctcccaacttgattttattccatgtaggttcttggggggaaaagtggctactacaggctgttcaggaaagatagttcagaaaacatttactggagagtgtaagtatttgtaagattttgcttatccaatgttactctggttgaattggattttggagtcatttaacacttagcactgaagaaacctacaaatttcatctaatttatccctctgcctttgggttggcccagaagtccacgtatgtaagtatagaccttactttacaagaatgtgcacacttcattataaaggttacatttagataatgcacacatttatagccattttctctcaaacaatacaacagagcactacttcagctaattgtaaatacaaattaaactgttcattccactcctagtctatgatcccttatcatactcacttttcattcttctttgtcctcatatgcatattacctgatgtgtaataatcctccaagtcattttctagtattaagagacttttggcagtgaactattttacctgatgtttggctcaaattcctcatgctcccattttgaaccatctttttctgctctcagggaaggtaggaaacagctggtcaccatcccctacactaagctccttcagaaacctcaagatcaccatttttttttaaacaagagatgttttatatcagattgttaaaaatcagtttttgagggacgttagcaagccctcactttatctccgccctatctagagtcagctgaacttggcagcacatggctttctcctaggtataattacagtctggaggagaatgcaatttgtgcagcattccactgacctacaagctgaccttgtgcaggggcaaattcacaggttgcgttaaaccctattagacatgcctagtttaaggcaaagcctttccagacccctgccacatgccaggattagggcatgtcacacgtgcgtactattacatcgcctaagggactctcccaatgccttccagagtgggaaaggcaggcccacactgtctaaacctgtacattaagccagtatagacaaattattattattcctcacatatgtgaatttttttaaagcctgcctctgtgaataagaattaagacaaaaatgggaagacagatttgctacactgggaaaatcataccttcaacctcagctagaaaagttctgccagacaggctgagaaagaattcttgtcaggtccagtgggatttttacatctacagaaaatctgtacactgtatatcttcggctttctgcctgagcttggcagacagggccaaaaataaaaataaatggttctgaatagaccacaagtgctggaagtctgctcagccaagtgagtttggcatagctacaaaattaagagaaacacagaagccctcttcttccatggagccttccctgtctgaaaggaagatgattaatttctacatctacacctttgctagacaccaaacacattcatacctataccagatcgagtgcatattttgctctttggcttaagtttcacatttgaacatactcagttccagtcacagggtttccatctccagcacagtcagttttatcctagagcctggcaaataagcagagagttttttcaaatacagccacatgtgctatcaccaatgaatagctgctggcacttcagggaactaagggcatgtgaaagttgctgcttttcctgtctgaatcaactatttcaccccaccaaaaacaaacaaataaatgtagaaaccatatatatatgagtagacatttactttcatgacaatgatatacaggtcgagcatcccaaattcaaaactcaagaactccaaaatacgaagtatttcaaaatccagaactttttcagcgctggtacagtgctcaaggaaaatgctcagtggggtatttcaggtcttggattttcagatttggaatgctcaactggaaaatttgaaatctgaaacgtttctggtctcaaccatttcagataagggatactcgacctgtataccaaatatccacatagggtacacggtcagctatatagaacaagtgtgtaaatgatctggcctttcttggtaagattgaacaacagcgtggagaattcacataaattagacaatctgattctcccaagtacaattctaaaaaatacaacttctatttttgtgccatcaaactagtgttatctcttgcttatgcttcacatcaatactcgctgaattccaccacctggccaaactatggacattaagaggctggttggtaaaaagtagatatgctactgatgacaagtcagcttgtcttagtaacagtcatcccacttctaagtcatgggcttccaaatagataaaggtaccttcataatgactgttatgtttctctttaagacattcttgtggagtgggttggaagacacgtagaatcctatgttagagatgcagaaattgtttcacttattcaagggctacaggctctgatgattgcactgatactttagtttgaatacctccaaattataaattagtatagggtctaaactttagctgcattagagagcagtatctttgtgagatgagagagaatattaagaaggccttaggtttaatttttattctcatttaactgccatccaaatcaaaaaatcttctaagtaatagacatctaattgggaaaacagagtgagagtttcgcaatggaaagaaattccaagaagtgatgcaaaacgatgcaaggcaatgaggtatggtagcctatggatacaggccttatgcacagaaaaaaatcatgggggaaccaactggcagaatccttttatagctgtggctattctagtcccctccctacgatttctaatatggcagtgactacaaatgggacaggtaagcaatgattcctcccagccagtgccagaagggagtgcctggggaaggggaagggcaggaccacagccatcttgctttctctcttacgggagaataaccgcttctttggaaatatgcaattgttacttggcaggtgcccaggagtacaatgctgattcagtttccttggtccccttcttcttccctgctccatcccctgccactctgccatcacacccagaagagctggttggctggctgtgtagtgccatattatgcaatgtcatccgacgtggtgcaaaacagctcttgctgctaatggccagtatggcctggtaggcctctgggaagaagcctctgtcaactggcctgataatgacattaaaataagctttccacatacagctgataatctgtctcattaaatgtttcaaggaaaactaagcttcactgtttagtcaaactgttaggtctgaatctcttccatggccttatttttggggacacataaaattgcttggatgaagtttactttaaggatctaggctcttcaccaagaaatgtgaaaaggcaaattgtcaccctgtcttgagtctgagaacgtatttggcaccccatccccatcctgacgagacagaaaaacccttttcttgtttttcaggctgatgaattccactcagaaggctaatgcggaggccacagcaggtgaaggctatgacagtgtgggggtgtgatgggttggaggggggagggtagggctgtgggcagatttctgattttgtgtaatgtagaagacaaacccccaaacaaaatcacatgctttttcctattgatcatggagtcttgcgggaagaaaagaccaagagacatcagtgcattcactgccttcagacagaaccagagctaccaaagcttggccctgcgaacagctttgattttagacttctagactctagaattatgagacaataaatttttgttgtttcaagtcaacagttggtgacagtttgttaaattagccctaggaaactaatacaggggctgatatttttatatttctaataatcttctaggtgattatgttgctgctggtccatggacattttgaggggtgaagtgactctaaataaatgtattattttgttactgatcattggcacttagcacggtgccaatacatagatatatgtatgtttctataatccctgatttccagaggtttttcccatgagcccctttcagaatatcaatctccacggagtcctttactaaagctattgtactcatttaggaagtattggaagtaactttctcatagaaagccaatcccaagtatacagacagccatagtgccctcctaaaacctctaaataacaaagtttgcatgacctttggacttcctgtcttgtctatataatttctcatctaataataaaaacttcaacccagtctcacacacgtatatctttggtggcttaaatagggctttttctttccaacatgttagagtgttaggcttttggaaagaacacatgctaataattacgccaagctggttagagataatgggcaacagaaaagttattatcttcaatgtcatcatatgtctttgatatgataatcattgcattcaagatatcagaaatgatggatggcctttgatttagagggtatccacgatgcaaattacctggctctttcccactcctgtgtagaggtgaagagccagcaagagtgagcacccctagctgcagtgcctcaagccactggaaggcaaaatctgagacagaactccaagggaaacacttcttcctttaaagatacttagggcacctcacattttccttttgcagacaacttctcgcatagtcttcatttgccgccattgccataatgtacactacttacaacccaagtcactccactctgttaattttctggctaacagctgctgatatgtaagtgccatattgcttccaacaggttcactgagttccttccatgaatataaaataaatattccacgaaatgttggtaaaaagagaaagatgaaatattactgtattttagtagatattttagaactgctgcaagattttgttagggtttgcggtgttatgtcccagcacatttcccccgtaattagtcttatcctccttcttactctcatagcacagctatcacgggaagcaagtgcgtatcatacactatcattcaggctttcaggtgaatggcataacatagtgactgaaaaaacctacccactgccatccatgaagagtgagcgtctacacccatcttgactggaaccatgagcatatgcacccagaggttctcttagatcaacaagggtgtaacacacatggtagatgatttgcccagagatgcctagatgcctgacttctagtcctgtggcctctcccttgaaataattattccagcaaagatgtacattcctaattagtcatattgcaacaagggaatagcctttaagatatgagaatcaaattcacttggaatttggggtggtaaaggcctttcgacttcctcttctcctaaaaaattagcccaaaattatgagacctaatgatttgaaaaataaaatctatcttccataaaactaggggagccctttaagttttaaaacagaaaatgtgaagttggaggactggtaaattcctaggtatagctgtgggaggtagaatgccagacatacacgagtaagaggcatcctgcgttggtggagacaggaatggttaagaagctaaatagaaatgaattgtttcaaagtctgcatatggagcaactaggtgcatgatctgtaattccatctactacaatcaggtagcatagtttctttttattactgattggtaagaattccacaaacattttggataacaattcttattgagctatatgtattacaaatgtcttcaagcatgtggcctatctttttatactcttcaaggtgtcttgatgagcaagagttcatgtcaatgattttattttaatgtagtcacatttcattatttgttttgtgctttccatgtcttttccgtataaggccaaaagataggctcctatattattttcaaaaattattaaatgtttcctttctcattgttacatctggcattgtcttttattcatgaagtgaggtagggatccattttcctttttttgccatatatattcaatttttaaaatacttttattcatagtcaattttgcccactgatctgagataccacatttgtcatgtattagtttccatatatgcatagatttgcttctgagctctcaattcttttcactcattatttatttatttagtttttcctgtgacaattactgccatactatagccactctactagctcttattaccttattttcctttatatgaggtagaatatctcccacttagttttccttttttggagttgttttttgaacatttgttcttgcatgcaaatttttagaataagcttgttaaattccaagtaattcttagattttgattgaaatgactttgaaactagaaatttgggaaaaattaacatctttataatattggctttcccattcatgaagagaattatgtctctctttttatttaggtctattttaatgctttcaataaagttgaataattttctacactgactcgaccatatttgcttagatttattcttattttatgtccctctaatggtatctttattttccaacttaatagtgtataaaaatgcaattgattattgtggtactgatctcatatctactaggtttactctattctctcattttttaaatttgtcaatacagattttctatgctgaaaaatcacaattcatcgtttcatttcttcctttccaatatattttatttgatttctttgccttattacacttgcttagattaaataaaggatgtagaaatgtgtatcatattcctatttcgtactgatctcaaaaagaaagctttcaaattttcaccaaatatgcccttgtcacatgcctgcttcgtggacactctttttgaggctaaagctattcccttacaatcttagttacaaaatttcattataaatcataatcatatttaatcaaatattttgccatcatctttcaattatatagttccccctttaatctattaacattttaattatttataaaaagcatttactaattttgaatcaaatttgccagtctggaataaatcagttaattatcaaacatttttttatatatttctggatttcatttgctaatattctggttaagatcttcatatctatatttatgagagaaattgtcctgtagtttcttttacttctgcccttgtctggttgtgctatcaagattatatatactagtcttgagtttaatattattttctattatctaatattttgtgtaagaaagacatgcttagtgtaataaaataagctggacctcgcattttgtgtgacgattttaaactactaatttaattaaccttaatatttacggaaccattcaggtgatctacttcttgactgttttgatcattcacagtcttctacaaaattatttcatattattttcatttattggcaaaaatttgttcatggtattgtattatacatttctattgcatctgtagttacattcacttttacttccttaatattacttatgcttgttttgctcaatcttgcaaaaagtttttgaatgttattcttttttttcaaagaagaaacttttgtctttaattgatgttctctattaacttaaaaaattccattctcatcttttaaaatgtattaggttaaaccacagaaaattgcaaatatttgacatatttaacctgtaaaaatggctttttcctgctgttcaacctaatatttccttttaatttctttgatttttttgtatttttctagttattgatttaaggcacttaactgatttttgatctatcttttgcttttctaatataaatactcatgactatacatttcagctacatcctatgagtcttatcagtatttttgttttttgctaagtgtttttaaaattccattataattactttcttaactcaatttatttatgggtgtgatcatgtatttttaaaaataaggaagtttttccattttaaaattcatatggtaccaaaaaagagcccgaatagccaaggcaaccctaagcaaaaagaacaaagctggaggcatcacactacctgacttcaaactatactacaaggctacagtaaccaaaagagcatggtactaatacaagaacaaacacatagaccaagtgaacagaacagagaacctattcactgccaccaataagacggcacacctacaactatctgacctttgacaaacttgacaaaaacaagcaatagagaaagaattccctattcaataaatggtcctaggataactggctagccatatggagaagactgaaagtgacccctttttccttacaccatatacaaaaatgaattcaagatggattaaacatttaaatgtaaaacccaaaactataaaaactctagaagacaacctaggcaataccattcaggacacaggcacaggcaaatatttcatgatgaagatgccaaaagcaattacaacaaaagcaaaaattaacaaacgggatgtaattaaactaaagagctcctacacagcaaaagaaactatcaacagagtgaacagacaacctacagaatgggagaaaaactttgcaaactatgcatttgacaaaggttgaatatctagcatctgtaaggaactgaaacaaatgtacaagaaaaaaacaaccccattaaaaagtgggcaaaggacatgaacagacacttttcaaaaaaagacatgcatgaggccaaaaagcatatatatatatatatatatatatacacacatatatatacacacacatatatatacacatacacatatatatatacacatatatatatatatacacatatatatatatatacacatatatatatatatatatatatatattaaaaagctcaacttcactggccattagagaaaaatgcaaatcaaaaccacaatgagataccatcttacaccagtcagaatggctattattaaaaagtcaaaaaataacatgctggcaaagctgtggagaaaaaggaatgcttttacactgttggtgggagagtaaattagttcaactattgtgaaagacaatgtggcaattcctcaaagacctacagacagaactgccattagacccagcaatcctgttactgggtatacacccaaaggagtataagtcattctgttataaagacatatgcacatgtatgttcattaaaacaccattcacaatagcaaagacatggaatcaacctatagatgcccatcaatgacagactggattttaaaaaatgtggtacatatacactatggaataccatgcagccataaaataaaatgagatcatgactttgcaggcacatggatggagctgggggccatactccttagtaaactaacataggaacagaaaaccacatactacattttttcacttgtaagtgggagttaaatgatgagaacacatggacacacagaggagagcaacatacactggggcctattagaaggtggagggtgggaggaggttgagtatcaggaaaaataaccaatgggtactaggcttaatacctgggtgacgaaataatctatgcaacaaacccccatgacacaactttatctatgtaaaaacctgcacgtgtacccctggacttaaaagtttaaaaaatgtagttttcaatactgttagttatctttttgttattgacacgattcctaacttaatttcattttgatcagcagatgtgatctgtatgaaaaattccttgaaattttattgagatttggagaacttttgcttttttttttaaagtcttaatattgcttgactttttaaattctattcatgcattatgttgataaaatttaatcaagtactgtatgaaagttaatgcagtctatttgttaataaagaaaccaacctaaaataacttcatattttaagagcctcacattaccaaaatcggtcattctacatatgtttatttatttatagactatcatgctctccaaagatttaaaaaggtgatattatgttacctgccaatagctggcattcttaaaattgtatcacaaacacaggttaccatgaaagcaaaatacaaatagaactagaaaatggagatacattttaaacttttccttgcattgggtggttttttcttggtacacactgaaggaattcatctctgagaatctggctaaaattcatttgctttaactgcatagctgcgccccagtgggacacacacacacacacacacacacacacacacatccacgcacacacaaataggggaaatggattgtaactagcagcccctggggtccaggaaccataagtgaatgagagatgaggcttctggttaaaattcaacctcttgctttcctttgggatgacactggaggatgtttcattattcttattcccagttctcatggtggcaatgatggtggtaatagcatagtgaaagcaccattgatgtgccaagccccaggccaaacatttcacatactacattttaattttcacaaccacctttgaagcagacattaatattactctttctttacagatgagaaaactgtacgaaggggccttagaaagatgaagggacttgccccatgaatgatgactcagccaggcctgtggggttcaagaagcccctgctgccctaccacactaccaccttccatacttagtctagtggtgactctcaccacactgggcatgctagagaaggcagctggtcagaaactggagctcagccctctgctacagccttgtcactggcttcctatggctctgaggcaaacgcccagatctcagcttgatcttgaattcataggtatgaactctctgtgcaggtctgtgagttctacctccttttccatgcaccttcagcctcagaggctcatcctttcctgcagtggcaactgaatggctgggttttatagggctaagtttttcagatacctccacaccccaagagtatatgtatatacaacaaaaacatcatcatggccaagcctctccaatgtcttactaaagcattctaaacaaagtatgctttaggcgttttactgctacattctgaatcacattcttctccaagcaaccatctcaacgtctcattttttccattagtaagatgattatatacagagtgatctatttataatgagccccagctcaagcagtatagctttcagttggcctcattttatataaatctttctttgttaattaatgtgtcttatcccagtgttgcaaggaacatttatgttcccgaattggacaggaaggaagcaaaccacacccaaggtgaaggctccaaaatctttagagtcaatatgaatgtaataaccgtttgaaaacaaagtttaaagctgggttttgtgcatattttaaactaaggaagttgtacaacagagtccacaagagagtaaaaagtgatgtgataattaggcggccatgaattaaccccctggtacttgcagctctgtactatttttaaagacctccttctcacctcctaagatattttggacatgcaaaatgcctaatgcgactaataaggcacctagcatgaaagttaattaatgaaaatgaaaacacgaaaactcaggttatttagtaataagggcctggagccagatcccaattaaactactcttgtggcgaagggagggatcaaaatgcccaataggttccatctggctgcttctgtgggtcaacgtagagtctcacgtccgtgtcaaattagcttttccaccctcttctttcccttgcagtgagaagctaaaggcagtcctccccacactgtactggggaactcccaggctctcccactcacatgtaaggggcttggcggctaagaaatccagctggaagcgagcgagcatgatttgattcacccgctcttcagagtccaatcccttttgtcattcactccactggaggggccccctaaacctccaatcccgtttgtaccccacctaggagatctgataatggtcctggcagagctgtggcttttcgtaacttctggcaggggcctcgctgacccataacatgacgacacacatgatttcttctcatactgtctttgtaaattgaccatggctaaccttgctgccctaatcagatcaatcagaataacatttttttagctgctgcacacaggaagcctcctgggctgaggcataactcagagtcaggctgggatacagaaggcagatttttgaatttccaatggtctcaggtttcctttgcttttatcacagttggtgagctttgtaaggtccgtgtttacagccatgcaaattagcctcagctggagggaaatcaggtcaggtctaaatgaaatgaagctctgggtcaaaagtattttatcaaaaattggaagtgtggccatagcactggggtccagccagactatcctaggaagtaagtggacagttttgtctggtgtaacctgagctccaggcctctcgaccgtggaaactctgctaggagacggaggaaaaaatggtggagggccaccccagcacaacgggggctggccagttccaccactggctgctgccgccaaatgcatttctgttatgtaaggacaactgcaaagagagaatactgtataccggaaggtgggaacattgtggtttgagtctggtttgcagtatatcccatgccgctcattgactaggtaaaaatctaaattcactgtttcaatcttacacacactcagtttaaaaatgtatgtgggaacgtatccacattcagctaagttctgagattttgcatctggaaagcatatttgcaaattttcactccagatgccatgttaggtatagaagttaaggtcagaggggttacatgactggacatacaacaactacaacaactaatagttaccttcaagacgagatctctggctgctaatttccactgcagttttctctatcatatttccagtacttcaatacccccactacataaaaaacttggtttgtttaaaaataactctccaatatatataccttacatttgggggattattaaaatcagaacaattatttcctgaacccccatgtacctatggctcatacaatatgctactgatggtttgagacagctctatccatctgattaggcctggatctgagcgctaagatattgctcaatgtgtaataccctcatctatctgccttctaaaaataaaatgaaagttggcagatcttgagtgtcttcatctgcaaagaagtcatgaccagatccttggaattcatataattaaagtttatcttttgacagatgagaaacctgagatcggagaatttaaaggacttgttcgggattcgatatttggttagggtcagagtcagaattagaaattatgtttactgacaccaaagctgggcacttttttcactatacaatgaccaaaaaataaaattcagtcttggccaagtgaatttaaagtcagaacttgcagttaaatgcagacgaatgcccatttatcaagtaattaacaacacaaggctgggcacggaggctcacgcctgtaatcccagcactttgggaggtcaaggtgggcggatcacttgaggtcagtagttggagactagcctggccaacatggtgaaaccccatctctactaaaaatacaaaaattagccaggcatggtaggtgtgcctgtagtcccagctactctggaggctgaggcatgagaattgcttgatgaacctgagaggtggaggttgcagtgactaggcaacagagtgagactttttgtctcaaaacaaacaaaaaaataagctgtggggttgttgctggaaacattcctttgctctttagaactatgtggtactacgcaagttgcccaacccctctaaactccagttttctcatgtataaaacaggaacaataataggaaccgtctcactgggtttttgatcaaattagttaatatatgacaggcacttaaccaaaattcctcatttagcagtggcactactagtgatatctttattttttaatctccacttgaatgacatcaaataaatccaaggtcattgagacttctctgttcatattaagcatgtgcctgtgagggcatgtgcaggggctgttctgactatcacatacatgggagatgtgtgtattttgcaaagcacttacaagttcaccttcaaaagcatccatgtgacctggacttgcaaccgaagtatacatatatgatctttccctattcttgttacatcttcacatacttctagcttggaactgaaggccagaggactcactatcaccatcaaggtcccaagcacaggcgctcagcctcatcctgttgtctagctccaaccccgtaacagaatctcagaaaatggcctggattgaggataaatgaatgagatttgggaaaatataggcgagacttcaaaacttccctcaacgagaagataaatattttttaaagcataaatatttagaatggttctctcatagcatatcctgtacttttttgtgttttccaaacagataaccccaaatctatattcaaataaacttttgcttttcactctcttccgatatggaagattttaaagatgtgtgtgcgtgtgcgtgtgtgtgtgtgtgtgcgtgcgcgcacgtgtctgtgtgtgtggtgagaaaggaattccagaatcagtcccaaagacgctaactctaatattccatatatttttatactgcaatcattcattctaagcactggaaccatggctactaatgattttttttctgctaataccttcaagtctttctaatatgcaattgactcccaatactctgtgtgggtaatttgctgtgaaatttggcctcatggtccacaatagagatatgagaagactaaagagagagctgggggcagttactctcttccaggttcctgttctgggggttctaggatccatgcaacttttatctttgtatctcagcattctaaggtgccctcttgtggtgtggggtaggaaaagagcatcctaaatgcagctggctggagacacaaatccagatcaagttactgttgaacagccaacaagagaaacatggttgaactccaagaataatactcagatgcagcattctgaaagaatcattgatattcatatttgacaagtcctaaccactcttttttttttttaaaaaaataagcaaataaaataaacgtacaacttctggggctgtctcatttccaaataaaatttacaaggtggaatttttgtaaactggtgcctgtcatggagctcctgtttcctttcagtaaatgcggccagtcaggagtccttaaactgaagaacaggaaagccctgatcattccagatatcactcaagaaatcgggacagagcgctagtttaggcccccaggtcatatattagtacaatcaacacatgggcaagttatttcactcacttctatagatgataatccctaaccccattgctcagttgtcaacacgtgaaaaacgtaaaggggtagacaaacctatcaccaccctcatataaaaaaactaacgcacattccttacaccgagggagcccagagaaattatctttgtacaccaaagctgaaataatataaacttggaaagcaataggttatgaaaaccctataaatttatgttcaggcttccaaacaatgttcttcttccacccttctcccctccccaataaactgagacataaagtctgggatttgagaattacagctatgatccttgccaaagtgaccaaattacaatcaatgctgaaggcttttggcaccacaaaatttcaacagactagtatctgctgaaccatcacaacccccttcccccaaagtgtttggggaatagccattatctcattaattcttaagaaatatctattaaaaagacagagacagagagggagacggggagagaggaatccttttacatatcttacagaagaggaaacaaacagagatgatttataatttagtcagatcatggcatctcaaaaaaggaggaatattggcagatcatgctgattttcagaatgtcgttgggcaagtttaaaacacaattggaaagtttatcagagcagttctttttttttttttttttttttttttttacaggaaccaggagaaagaatcacagacaatgaaggtggatttctggctccttgtcaaggtgctgacctaccttgctcaggaacaaatgtcacttagagacagtgtaaatatgacatattgacaggggaaactctttatctttcagtgaaaagagactatacaaacacgatatgtactactagatgtccgaatgtatcactaacggaagttgtgggatacttccatgaatatcaacaaacaagaataatctagagattcccatttgcaaatagttttaggaattgacacattaatgctttaagaccttaaaaaccttgggaatcaaagatgtttaagaatttctttccaaagctttcacattagttcataaactaagagattaatgcaaagaatacttaacgtactcttataatttcatattatacttataataaccatattaagggggtgttattcccaatttcgtagagaagaaatcagtgtgagaaggttaaatgactttttctgaatgttacgaaagaaaaaaataagagatagtagcaagtggtggtggttccattgacagctggtatcttgagctctggttcttaatttggttactgccatgtttgtcgtggcagagtggtctagtatcacaaatgagaatggcacctatctaagtatgcaatataaatttgtaataattagtaataaatttattttattatagctaatattttaaatggaattgataaggtcaaagaaaaacaccagctccaaatctatatatgccttttgctggagttacatagaaagcacatctttttactcaaagatttggcttcctattggaagactctgaagaaaaccatggataattacacaatgtaggaaatactttggatatgcagaagtgtggctatattttgttgatgtttttaataatggctactctcattcataaacttcaaataaatcacccgaataaaagttgatactatcaccaaggtggcaagttaccatttaaataaaggggaaatgcagacacatgctgatgaacaagtgttcatcatcatcaatgtcttcccagttaaaagtgtacaaacccctacaagtcactttatctttctcggtcttagtttcttatgtgccatatgagagaaataagatgatgggtaagatttcttctaattcctagactacatgatattacagaacaggatccctgcctagtttgagaagatatacatacatacatacatacatacatacatacatacatacatgcttaaacaagtgccagtgatatgaaatttaaatactattttagtagttgaagctagaaattagtatctgagttccacagactcttgatcattctgtccattacttctgaaatacaaacgtgaaatgtgctgagggatgaagaccagctctatttaagggatattcatggctgggtgcagtggctcacgcctgtaatcccagcactttgggaggccaaggcaggtggatcacctgaggtcaggagtttgagactggcctggacaatgtggtgaaagcccgtctctactaaaaatataaaaattagctgggcgtgatggtgggtgcctgtaatcgtagctacttgggaggctgaggcaggacaatcggcttgaacctgggtggtgggggttgcagtgagccgagatcacaccattgcactccagcctgggcgacaacagtgaaacactgtctcaaaaaaaaaaaaaaaaaaaagacattcatattcacgtttcaatgctggctgaagccctatagccaagattcagaattctggattttgaaatccagtaatgtacccagcactttctcttgttcagtcattataaaaagacctatctggcaagtatcctcctggtcttctcatatgggaaccattccatgatccagctgaaggagttggccttcaatgctgaaactcctcagctgctcaccacctctaaaaccactttcattttcaagaggaaagaaaacaaacatctgactctcagaagagaccaagggatccatcttgatgttggaaatctggccacaggcatggagcaaagattataggaggcaggtttggagttttctggcatcaattcagcttgctattttctttaaaacttaaaacctcagctctaaggtaggacacaaagctcactgaaaactctaagctgcatattaccacaaagctcagtagacccaattttttgcctccacttacagagaaaagcaagcactacacaagtgcacggattccatggggcaatggcaaccaccctgttcagaaaacttaaagagtttaaatgaagtgttattttccccctcagacagagaaacaaaataaatgttatcaagtactaactgccttaaactcctttgttgaacaggcaaactattataagaaaagaaataataaatgaccaaatgctttgatgtttaaaaacaaatattcattcaccaaaacagaagtgaatagttctatgagtaaacaacatgttttcaagcatctggagagaaacaaaaagagtaatagcaatctaagaagcaataaagaacaaaagtaaatttaatacgatcctgcataagaaagcattcagaggagattctggtgagttcaggcaagccttcctgaaagaggcaaactgaagttggctttggaatatacagattttccttttgccattcaggtagaaacaagtcttctgcttctatagatggcatttaaaaagccagcctggctacaaagcaggcttacctccatctcatatgaatctaattgcatgggaatacattctatgtaaatcagctgacctttttttgcccggatttgtctggaacttactatttgtattaatccattttcgcactgctataaagatactaccaacatggcagcaggagagagagggtggggtgagagcggcaccagaaacttatggaacaaccaaatctcgtgagaactcactcactatcaggagaacagaaagggaaatccacccccatgatttaatcgcctcccaccaggtccctcctagacacgtgggtacaatttgacatgatatttgggtggggtcacagagccaatttattagaaaaattcaaattgttccatgcaatatagccttttaaaattttcctttaatacttctttggatatttttctcaagacaacacaattacagtgaccttgagaaacattttgatcatgatttttatccgtaattgaagtcagtgggaaaatctgatttgattaacagaaaactgaattcagacattttccttttttcccctgtaatttgcagctaatttcataatcattacattacttgagaaatgaactgatgatgaaccccatgatgtaatttaacaaggaaacgtagcctggcacggtggctcacgcctgtaatcccagcattttgggagggtgaggtgggcagatcacctgaggtcagaagttcgagaccaacctggccaacttggtgaaaacctgtctctactaaaaatacaaaattagccgggcatggtggtgcatgcctgtaatcctagctactcgggaggctgaagcaggagaattgcttgaaccccagaggcagaggttgcagtgagccgagatcacaccattgcactcccacctagatgacaagagtgagactccgtctcaaaaaaaaaaaaaaaaaaaaaaaaggcagggttgatggtatcattcaatattacatacttttcaaaacactgcctcaaacctgcttagatgtgaatttcacaacatactggtgggtcaggtagattcagatattgttcatctttttttttttttttagacggagttttgctcttgttgcccaggctggggtgcaatgcggcaatctcagctcactgcaacctctgcctcctgggttaaagcgattctcctgcctcagcctcccgagtagctgagattacaggcgcccgccaccacacctggctaatatttgtgtttttagtagagacggggtttcccgaaattggccaggctggtgtcgaactcctgacctcagctgattcacccacctcagcctcccaaagtgctaggattataggcatgagccaccgtacccggcctgtaatccttttttatagagaagggaaaatacgacaaggaagacaaccagcccaagctcacatagcaagtcaatagcaacacagagtactatactttttcctcaacaccatttctgctactattaaaaataagaaaaactaaccaaccaaacaaaaacccactaaaacagggaaatggtagccgtagtagtaacagtagcaaaaacaagagcagctgtcatatgttgagcactgacagtgagccaggcactatgctgagcctgatacatggattaccccattgaataattacttagagaacattatgagcagatatcatctcaggctatggtgcagggacccagacacagagagtgaaaggacctagtaccgttgcctcagatctcacagtcaatgtgtggcagaggtgtgattcgtcctcatggttgtctctgactgcctgacagtcctaaactcattctcttacagaaagctggtgcctctcaagtttttgagtccttgagtcactactcagaagccaccgtcataatgaggtctaccctgaacaccccatttaaaattgcagacctcacccccaccctactaaagtcgaccctccttcccctgcactactatgtgattgacagggtttatgtttagtgtttgttaatataagctccacagggcaaggatttattattattattattattattattttacttttattttttgccctcaacacataccaatgcttaagacagtgctgtccaacagagctttttatacaatggaaatgttttacatctatgctatccaatacagcagccactaggcataagaacaaaattggaaagtcgaaaactggctagccatatgtagaaagctgaaactggatcccttccttacactttatacaaagatcaattcaagatggattaaagacttaaacgttagacctaaaaccataaaaaccctagaagaaaacctaggcattaccattcaggacataggcatgggcaacgacttcatgtctaaaacaccaaaagcaatggcaacaaaagacaaaattgacaaatgggatctaattaaactaaagagcttctgcacagcaaaacaaactaccattagagtgaacaggcaacctacaaaatgggagaaaatttttgcaacctactcatctgacaaagggctaatatccagaatctacaataaactcaaacaaatttacaagaaaaaaacaaacaaccccatcaaaaagtgggcgaaggacatgaacagacacttctcaaaagaagacatttatgcagccaaaaaacacatgaaaaaatgctcaccatcactggccatcagagaaatgcaaatcaaaaccacaatgagataccatctcaaaccagttagaatggcaatcattaaaaagtcaggaaacaacaggtgctggagagcatgtggagaaataggaacacttttacactgttggtgggactgtaaactagttcaaccattgtggaagtcagtgtggcgattcctcagggatctagaactagaaataccatttgacccagccatcccattactgggtatatacccaaaggactataaatcatgctgctataaagacacatgcacacgtatgtttattgtggcattattcacaatagcaaagacttggaaccaacccaaatgcccaacaatgatagactggattaagaaaatgtggcacatatacaccatggaatactatgcagccataaaaaatgatgagttcacgtcctttgtagggacatggatgaaattggaaatcatcattctcagtaaactatcacaagaacaaaaaaccaaacaccgcatattctcactcataggtggatactgaacaatgagaacacgtggacacaggaaggggaacatcacactctggggactgttgtggggtcgggggggtggggggagggaaagcactgggagatatacctaatgctagatgacgcgttagtgggtgcagcgcaccagcatggcacatgtatacatatgtaactaacctgcacattgtgcacatgtaccctaaaacttaaagtataataaataaataagaagaagaaaaaaaaaagaaggtggttagtccaattaaagaactaaattattttatttaatttcattatttaatagccacgttaccatactggatactgcaggcctggaacaaatgcctagcatggtaaacccctaggaaatacttgttaaatgaatgaatttataaataaaacctattttccatataacctgtagactactttcactaactacaaattaaattttatttttatttcaacagaattaatggctgaaaaagtccagattaaattttgaaaattcagaagatatggccaaaatagcaggcacagatttcatgaactattggctccctttgccatctgccactcaaaaccttctgaaacatttcatgaaaccagggaaagcaccaacagcatgtaatgaattcctatgaatcacacacacacacacacacacacagaatatgtaataaattcctatgatacacacacatatatgtataggtatgtgtgtgtgtgtatatacgatacacacacacacacacacacacacacacacacatatataccatttccctgtataatatataattacagctttgccataatcactcagtacctttttgaccttgtttttcttctcataagtctctgacagaggttttttcttctgttgagttgtgtctttggagaataaatactcaaattcactggggtcccgaatgtcaggttcttctaaggagtcccataaggttggtgtagcattttggcttaaaagagaaaatgacaagttaaccataagaaccaaaacaggaaggaatgtaatacaatgaaatctttctctaatccattttttaatttcatttttctaaaaaaacacataaaactctaataatgcttggagaaaagctttttatgttacgcatttgttaaagtcaaaatatactatagaacattaaaacacacacagacgtatttccaaaaaagtaattgtcattagctacgatcaaagatagagctctacagaaactccttaggactagaaatcctgggattcggattcctgggggcacccaagctgctcctccctcagcctgtggcatttccatgatgtgtaaaaatgggcatcatataaaggctgagaagataaccaatttgagactgtgacaggctaattctgaaggagactgaaaatggagtaccgaagtaaagacctgcctcctctttggactttttcaactacttttaaatacagtttttaggattcatgcaggtaaactcagtgcagcgtccttaatatgtaaacaggctgtgcctattttaaaatacatgattcatagtatctcagtcccctaaacaatactaacaacaaaaaccaaccaaaaacctcctccattgcacctcatgggatatcatctaaagtagccatagggaaactgggctgtttcatcttccagaaacaggggcaccctagttttgaagggaagaaaagctcttgagaatcaggcgtaacagaacagcctccgtgagctgactccagtggtcactcctcagggttccctcagtcagaacacatctcccaaatgtttactttcttatcttaatttcaaacactattaatgtttactggtcaggcatggtagctcacacctgtaatccaagcactttgggaggctgaggtgggcagatcacttggggtcaggagttcaagaccagcctggccaacatggtgaaaccccatctctactaaaaaatacaaaaaattagctgggcgtggtggtgggtgcctgtaatcctagctacttgggaggctgaggcaggagaattgcttgaacccgggaggcagaggttgcgatgaactgagattgtgccactgcactccagcctgggtaacagaacaagagtccatctcaaaaataataataataataaatactatcaatgcccacaaatttcatctatatacttattgtttatcaaacataggtatatgttacaatccataacatctaaaagtatatagctttatttccatacctattttctcaatgaaaactaaaaagataactattattacatggaatggtccacagaattttgtaatactacaggtgattttggtatttaaaacagttggcagccctggctcctcaggtctgcgtgttcacactttgcaatagatctgcctttcccatgatatatgacattttggttttggccacattcacctcttctctcctctactttttattttttaaattatgatttcgccaatagttgaaccatgtaatagtatgacatatggaagttataaagtataacaatagaatgaacacctgggaaaccattacccaacccaagggctagaacatttccagtgaagtacatccatgtatgtgttcctctctcagccatacccctctgctactcacttaacttcaacttgaagcataagcaccacggatgttaagtgcttatctctgtggtgctgggggagacgggggagaagtaggatcttgaagaaggaagtcagctgggaattctggagtgagcatgcggcatgttaagggccactggtctgggccttgggaaggttctgggcagctaaggggtgacgtctagagtgaagtgatgcagagtgtcaggccaactgctcagccccatccccacttcctgcacctgcttggctctagccccacggactctgaggtcaggccagtgtaactagtattataattcacttatattctggagtaaattggctttgggagtcaaccgtgatcagtttaagcacctgatcaccatttacaacactatttctatgggaaaggtatttccaatactgaatgaaagaattttggaacactgcctctcagtgattttgggacagccagcatttggtagggcaataataaggacgtgcttcccaacgaatgacctgccatggtggtcaactgaccactgaacatacaattctagctcaaaaggaaggcagggggagagagagagaaagaggaggaggaaaatgagaaacttactaagaagctgaaaaggtagttagatgaggatttatttttccttaagtgtctcttgcttattctagaaatcacgaaagagacacccaagaaggcaaaacgtcaaaagaaaaaaaatcagttcataccaggagtcaaaagcaatttaggtagatgagaggcagtgtacacataatgctgaaaattcacattttgtttctggcttcccagaagagcaagaccaacatttatgatgcaatcattatataaactacttaatcctctagttgcacaaaatattaaaatatgattttgcctcctttatgagaaggtatcccaaataattgcacttttgctcctaagcaaatactccacaggctctttgagtcattttcatttaaaagcagtagtgctaataggtacaaaaagttggagggacccataataaaagaacttgaatatgtggtaccaccaggaagtgcccgtgttgcagtcttaacacatcatagaggggcagccccccgtgttatgtttcaggttcaaatgcgcaccaagcagggctctcttgatgtcctattcatctacttttcattttgctcaaaagtaaagccctagatttatgatgaaaccagtgagaccttcagtattcaattgcttttcttctcaaaacggccaactaaatgaggaggaaacaatgtagacaatgattgtctccagctttcccgtggtcgtgggtgaagggcccacatctcccagtgggactctttgatggctgctgtggtccacagttacctgttgctcatgaagtctctcagggaaggaagtgaaggcaggctagtgggacacaggtgtggaacagctccccgtgctgtcggacacactcgtccagggcttacaggtgggagctattgccctggaatggctgtgcactaatttgagaacactaatacggaaacatgactcaaaataaatattctgggaaatgattttttaggaaatgtctgagtctttattgggaaaaagggaatactagtactttagttaatggcagaagctattacaggatcatctcacttttttatgaaccattcatttgggaaattacaaagtataattgaattttgtaaaaaagaagtatcaggatgttccaaaaacaaactcttggcccttattttttggtgagaggaaaggggaaaatatgaagcacatatgcttagttttagggtattccccactcctccacagggatttctggttgttttatcattgtgagttgtgtgttattttgtttcatatcctgccttgcctaagcaaagtgttatataaattgaagaatgcattaccacatgacttgggaaaagctgtaaaatgtgtcctatatttgctgtcctttacaaacaaactttaaaggagaaagtggtcaagagacaacttaagatctctttcactgtcctccttccaggctcagaaataaggcagaacaaatcacactcaaatctgtttgaatggatgtttccaagcaactatatcttgctgctttacaaacccagcttaacaatctatacaaatggaagatgctttcagctatccacatactgacactttctctgaagggcatcaagacataaaggaagatgtgagagtacttagcagttaaaagaaacagagttcaagcagagagagtttgtattttaagactctcctctgatctaaagaactaataacttagccatgtctcattcttttaataaaaactgaagaacacccatttctgttaaatatctagattatagggttgattatagtatttaaaaacaagacagtaaaaagaattctaaaaatcctcagtgaacctacagtatggaaatcaggttcaattctttatgattactaatcaattgtagtgatgttggggaaagctttggcttagatccggactcttgtctagtctgtaaaatggaacatttgccttggaaaaaaatctgacactgaaacacatggtttctcccagcatcttcagagaatacagagaggccctgatggagacagacaatctccccaaacatcccaacattgtttatccaagcattcactgtatcacacttgataatgggtgctacactatggagatattgacccggtaagaataaaatatcacttgggccaaatcctaggaattcacatgctgagaatgggataggggagaacttacctcctatcacttatttgtatcctagtccaatataaaggcttcatgggacaactgggctcgatggctggttttcgaggacattgactggaagaagagccaagtccaaagaagagtccagggggaggtgggggtgcaagtcctgggggtggtggagcaggaggaggccctccagggttgggtggggcaggggagttaggaagtgggggtgggggtgggggtggtggaggtccagcacttgaaggtggaggtagaggtggcggtggaggaggcggaggtggtagcggtggcccagcactcacaggtggcattggaggtgcgggagacaaagatccaagtcctgaggggaggggcggagggggagggatggatgcgggaggcggaggcaatgccttctgctgatttgatgccatgccctccattggctggagtgctgcatggatgtctttgtggtcatttgggggtgagagctggcttaaagaggagatattcagctttttgggtactaattgattacttctggttgtcttgctttcactttcacagggcttgaggaaggtctctctgtctgtctggacgcacacatttctgaaggtctttggagggcagtcatcatcggtggaaatgcacacatctttcctctcttcacaaccccctcgccatctgtgttctagctcgtgtttcagattttcaatggtttcttctagtctcgctgttatcattgcatgctcgccccggatatgaaatgcccgaagttcaaactgtgcctataggaaaattcagagggaaagaaagtaatgagtttattaagaacaaacttaagaatttagaaactcaataataccatcatggtgccactgtagcatggcccacataaatgcagggaaatacagagacattcttttaagaatccataaaggtgtaaattgcactctgaattttccagggacctaaacaggcaggagtcaaagcacaatttcaaccagcctgagctcacgggagataattttcatggattaaggcttaaagtacatctattacttaagaactcttacccaatttgcatatcaaacacaaaacttttaataaagttttggacatgcttgaatatctatctgttttacaacttttcgggttggtttcaaaaaagaaaactataaagaaaaaaataggtttagagctcctctggcttagagctgttctcccagtcttccagaatgtctctttcactgagtttccaggacaatacagcagacacagaaagcaagggaagaagccacgataacttacttttttaaagtttccttataaaagcagcccaagatcagtatttgtgtctgtttcataatatagcaataaataaggaacagagaacataaataatgaagatattatagtatgccattttcttctatttacacagcactttaaagtatataagacagtagtagcctttttaatgcttattgcctcagttattttaatgcactgagtctgtaattgtacacttattagcacagagctagtgtactcgcagtcattaaccagcccgttcctcagcattcaaagctattcatcctattacagttaattggaaagcaaatttagaattttattagagttttcaaaatccagtttaacagtaattaaatattttttgtcaatttatttaatttctgcctcccccatgagattataaactccacaagatgaaactggtgacagtattgtctttctatctgtatcccagcaggtagcccaggaagtacatacctcagcagcaatggatggataaaaatcactgggatagttatattcactgtcattgtcactgtcccaagagcctcccttatcaagactctcttcactataatttcagcacaaatatctagaacacctaaagcatgcacaagtacagctcccttttgcattgaaaaagtaaagaaatattttaacagccttggagggaaaggtatacacacaggaagctcatctaccttcattgagataacttttatactatgatgtttgcatagttcagcagattgaattatgaagagatctaccatttgtctggtgttaaaaaaaaaaaagataacttttaactattttttactaggttcaacttttctctaatattcattctcaagagcaaacccctaaagggctatagtcaggagaactgaaaggcgaagtttttcgaaggctcatcttctcatatgtggacacggtctgagccaactctgagggaaggggctagctctggacaccgtctatttctcgtgcagtgcagagcgctgagtgccgagtttggactcacaccacctggttcacgtcttggcttaggcacttgcgagttctatgacctcagacagggaacgctgtgtccctaagcctgagtatcttcaagtgtaaagtataaataatagccatctctaggacttttataaaagtaaaatgagatacttcatataaaatagtaggcattatgcctggaacacagaaacgtttggataaatcttactgttagtttctgttgctaatgctaatgctaatagcagagcaagagactaacaaattcctaattattttttaaaattttcagacaatgctacctttgtagagggacaggcataaacctaggaaaagctcaaaatcaggataagcaaagtactgcaaataccaaagtttacctagccttttgtgagttctactaccgattacctaagtaatttcgagcttcactcaactgtgagatcgagataatctttgtttcaacatcgtatcatttccatcttcatttctctctctctttcctgtccacttccacccacatcttagccctgattaccaccctgaattacccacattttaatttcattctaatgactagttcggttctgtcacaacaaactaactctcagctgttattctcaactaaaccttctttcaagattaagaatcaaatattcaagaagcagtaattttactcaatcctcaacttcttaatgatatgaaagagtttcaaagacatactgcatggtgaaactttccctaataagggaaatatttttggtgaacttattgagtttctgcctcccctatcagattataaactccccaagatgaaatcttgtatctagagcaaaagccctggccccacctcctcttctttctaccactctgtcaacgatcttctaaatctgttgaagctgacatgtaaagctatatatcattttagcagctctgaggtaaggcatttgtttagtgtagtgggcagaacacaaatcgggcagttaagttcacctctctgtacctcagttttttttgtaagctaaatggggataataaaatgtacctgacagagcggatatgccagggaggcaaattaatatacgtaaaagaaaatacagaagagtgtttgcagcatagtaagtgctatttcagtttgccgtcattattattctctctctaatgcctggcagatcagagcccagtggccccattagcttgctcttggctctgggtacgcttcccagccccatgccctctactgtctacatgctctatgcttctaaagcaaaaatagacataccaaaatccttcttaaattcctttagctatggcactttccaaccctacctcttttccttcgcagcagaacttttttgaaaaaagcacttgacccatgctttatttttgtcattcattcactttcacccaattactggctttcatctcccccatcctattgaaactccatgatttgactgttgcattcaatcagcacttttcagtgattttgacctctctgccacatttgttaagagttgactgttgcacaagcattgaaattctgcttccctgaactcgattccacctctctccttttgttctcctcctacttctttgctgtccctagtcaatctgtagactcattcatccttaagtgtggttctcttggcatcttccttgccatttttttccttatcacactatacaatctttctagatgatctcatatactcatataaatgacaccaggtgagtaccttcaaacttggtaccttgagatcatatttccaagtatcctctggattaatctacttaaatatttaaccagctgcctcagatccaacaggttggaaagtgaactcattgttgccgaaccccaatgtgttcctcctctgaaattcctcctcactattaatgcctcatcgcctccagtcagcacatccagaaacctgatgtcatgctgaatttcttgctctctctcatcctcaacatgctatttgtcaagtgttattgatttctcttgtcacccccaccacctcaatctttcactggacaaaggcaatgagcattttcttgactcaaattcaaccactttggttccaagaagattttgaaaaaataaataaataaatgcagatccctagtccttaaaatctcttcaataattagctttacttgcagactaacatgaactttttagcacacacacatcaacagctcttctgatctgttttctgaccaacttctccactattggcttttgtcccttccccagatatgccctggattccagtttcctaaacaggtccatgctctttcatgcatctgggtctttgcaaatactgtcctcttccaatacccttcctctgttgcaaacactcaaggtagggggcagattaccaggcacagactccatgaatgggttcctcacatactgtattcactgatatggagaatgaccaaataagaaggaaaacaatgaatttccatgtaccatacaccaatatgctgcaatgatagtaagaaatctttctggatcactaaaatttaattgcctctctctgcccctcaccccccccaaaaaaacacttgtctttgacctttcctgtttcataatctctcttgatcattacaattttgtcttggttgtgttcatgacctcagtgtggcagagcaactcaaagtgattaaagtaataagcacctcattcattctctgtctgtccatatcataccaattatttcaaattgtgtctgactctattacaaatgaagcatctcaagttcatgcataccatgcatggaagttttgggaaagctaatctttaaacactatttttaattttatttcctgttagtaccacttcactttgtacctggatattatgtgctgttccccctcctttatccagatacacagctagaaagactggtaatgatttggtgattctaatacagagtagaacgttctgttagataatcatgtactcccaatctttgcccaggatcctgggaatcttcaggaagtgtcaaaaccagtcccttacaaaggaaactacagataatgccaggtcaaggaaacaaaatgcctttatatcctgttaactttacttatacattgaacatgtgcttgtaagcagtatccaattataaaccctccatttatttttagaccaatgttctttaggacatataaagaaagtctcaagatttcccctctctcactcttcctgctaaaaatctgctgatttgaccccaatacatcatttgaaaagagacaggtgctgaggtttgatatctttccagtctttaagttttacctaccttcctttactcttaatttgtttgcttcaattgctttcatttttaatcacatcctcttctcacctgcaatagtctgttataatatatgtccatctcttaataagaaagattcaaacttactagctttgagaggacaatgccaattaaaccatcctgttttgattaccccttttttcctagtggcacaatttttacctttctaataaagtggttctcaagccctgctcccattagaatcacctggagagttttgtggatgacactggtgctcaggcccatccccacagaccctcatttaatcaatctgagatgatgcctttgcacaggtgtctttaaagcactgcaagagattccaatgggagccagaggtgaaatcaacaacaactgttcttaatccgtattctgctctaacacagctgagatagtaaaacaacacaatatcaatgggttcttttggcaatgactttcacttaggtcatttcagaatctccaaagtaatgtgttatttggtaaagtccctttcctaattgtgattgcccaataaagggaatgttccttcattgtctagattgagaatagttattctacacagcagacaagcctaaattctttccatgatactcatggctcttcaaaacttggcctctgcctactttcccagatatttccctgctcttttcctatgctataccactacagataaccaacactcatatcttcactctttcacacatgctgtttcatctacttagagaaccttttatccattttcgcctggtgaaagccctgaaaaaaatgaaatcaagctcaactgaatcttctggcttaaacttttcttaattctgcttgacaaaagtattcctttttgtttccaaagaacattctaggttcatgttgcattatactcatttctgtttatcttctttgcaaatctaaaaactccaggcagttggggaccacaatttaatcatatttgaacctccagagcatcacacactgcttgcctagttagccatccacaaatgcttattgatttctttagtgttaaatattaagacttcttcatgcctctgcattacccatccatttataagtgaaactccaaaaaaatttaaggagagataaagatccttttctctttgctattcccatacacagcaaactcttaagacctgttagttgtcaactgttagacattacttacagactaatactgaaactagagcagacatactaaacactcttctgatctcttttctgttacttgctccgcttttggactagaaaactcataaaacatccaaattttttttttaatgaaggtatttctaaaagttgatgttgatcatgttagttttaataattcaaaatacttaacgtagataagaattctcttcacagtcagctcaaaggctattcccatacatatcataaaccacccggtagaaatgaaccacatttgtgattctaatctgattaggaattggactctagcaacttccccaggcctcctttggggatggttctcccttcccctaccaaatcctcattattttttaatatcctccccattaccactgctcagagatatcatcgaaggaacacactgtactaaaacccaagcaacagaggagacttttgcttgtctggtccccacaagcatgtctgtcaaaaagaaggtggaaaagcgcctactgatgaaagacatcgtgttggtgccaagcactgtggaaaaatcatccgttagcattttgttgttaaaaacattctctctaggtggtgctgccagggccaataaaaaatcaggttatctgctgtacaacttaagtcagtcagtcttttccagggactcttccaaattctacatccctaggctggggaaagctaggcagttcctgggggctgcatggaggctcaacaaagctttgtcacctctgaaaagtgcagcgtgagcagaagaaaggaaaggaaagtgaggcttgtgagcacaaaatgcctcgaaggaatgggattcagttcttacagaatgcttaggtaaggcaaggagatggcgattctatggctttggacatgcatacgagtttcttctgttttctttttgaaggctgtccagagacttcaataatcccttagttaattggcttatactagccactgtaaaaacaaaagtttctattaatgaagagaatggcattgggtttgatgagaacccataaattaacaaaagctggttttaattaactattataatttttttgtccttatcagaaatgtaagcacatcaagttacaaccaaaaggccatgtcaaggacacttagaaacatgaggcacatttgacacatttctgtaattagaacttgctgggagggataaagaaatagagaaacagggcaggaaaagaaggggtaaagagtaattgatatgaagctgactccgagtaaaacccaatgaatgcaatgctggagagtacacctgtgtaaaaatggtgctgacctcaagtaatcacctgccatgctgatgctcgagaaacacaagaagagaatccaaaccaacatggcgtgagtgttccaggcactatgctagccttcatccttgtgactctgcaaggcagacattctgggggacgttaatctgtataagatcccacagctgaaaaatagtaacaaggggatttcaatcctggctgatataaaaatttatgctctttctgccttaatattttgaatatcagatgactccctaaattgatatccagtaatactaactcataataattaattagtaaaactacattccacctcttacaatgcatttgcattacatcaatgcatataattataacaacaatctgtgagaatactggtattgtggctgttttccagatgaagaaagagaagcaatgaggaattaagtaaatcgccaataagagatagactaaatctactatccaccttatcactgatcctcaatgattaataatccttcccatgcaatatattttaggaagtcagtatgccaatacacaaaaaaagatactttctagtcacagatgctttcctcaaaatatttgccctccatcctcctgaaaaagatatggaatgattaagtaaataattgatttgaagtttcttggctctcaggtggaaaaagcattgggttcaaagacttgagttctattcctggttatctcaatcattagttacttgctcttagccaattttcaaatttcctctaagcctcattttatatatgtctgaaatgagaggtttaaaatacttagtcattaagatttcctgtagttctaaaacattagtaatttccacacccaagactctcgtatcactttgtttcaaagcttctttgaacacatctctattcataaaagcttcataagagcttaaagcatggtattatctaagcaatataaacagatagtcccaagcctcattatgaatgcaaatgttcacacaaaatcagattcaagaaggtactctgaaaaccagtgataagtatgcaatttagatacaattattctttttttttttttttctgagacagagtctctgtaaccaggctggagtgcatggcacaatctcggctcactgcaacctccgcctcccacgtttaagtgattctcctgcctcagcctcccaagaagctgggactacagatgcatgcccccacgccctgctgatttttttattcttagtagagacagggtttcaccatgttggccaggatggtctcaatctcttgacctcgtgatcccctgcctcagcctcccaaagtgctgggattacaggtgtgagtcactgcacccagcctattcattaattttgaaaggtgatagttaattacaagttttaaggaatacacctttaaaatcagcaaatataaccatggatagtcatccaaggaagtagcaggaaagtaaaacagatgtttgaaatctgcactgaggtttatacttgagacacaaaacaaaattgtagccagagtgcattttatgaaataaaaggcattattactcatcggggaacttcagtaatattttatttctaaattattaatatccaaaatataagtcacaaaatggatatatatccatggaaatgactttcagactctatttttccaaaaagtagttctaaacccaatgagcaaaactaagactgcacattttaggcaatgagccaacatactaattccttctctattaaaagagagaacttgcaattttatgttgtattattattatcactactgaagctgcagccagtccaatgaggcattacacattctagagtatatgcaagcttagaagaaacagatgataaacccaggtccttaatacactgtgacaaactggggttctccaattaattaatcattttaatatttccctctagatgcctcacacacttgtctataaacggatactatcccatggccaatgtccacctgcacaacagtatcattttgaaaaccatgatgcggattcctcagtcaggtttgccttacatactcccaacatttagtacatgtcttaaattggaattcggtaggaaatgaaaaaatgatattaggtcaattatatagaattatcaaatggagtcagttgatataaaaaggggccagctgttgagttctttctggtgtaaaagatgaaacttatacataagactctaggagtactgactagaaaaatagttcccgcaactttacaaatgatacagctctctgggagcaagaaggggctcagaggagtggttggtgatacatcttctgctatgagcttactcttcatagtggtgctgtataaacctggtagaatgcaaacaggttttcatcacaacaaagatggcctccctaccagccaatactcaaacaagctttgatgagcatctgcaaagtaccagatcctgtggaaaataagaaaccattcgcccggcatggtggttcacacctgtaatcccagcactttcggaggctgaggtgggcagatcacgaggtcaggagatcgagaccatcctggctaacatggtgaaaccccgtctctactaaaaaatacaaaaaattagccgggcgtggtggtgggtgcctgtagtcccagctacttgggaggctgaggcaagataacagcgtgaacccgggaggcggagcttgtagtgagcggagattgtgccattgcactgcagcctgcgcaacagagcaagactctgtctcaaaaaaaaaaaaaaaaaaaaaaaagaaaccattcatactttcagaagctcacattctaggtagaaacagtaatatatttgtaagttatgatgaatttccaggacaactgagctggtgtgagttttacagtgctattatttttactattattattcagacataactttttccttgacaactgaagaaaacccaggacctaccatcaaatgcatttgattcatccagcaaaagcataccaaagtcatttgtgttcactgtatcccatgagcagaatgctactccaagcccaaccatgcataaaccaacctccctgaattaatttttgcaagtaagcaaggaggtatttggctttccactttcattacttaaacaaatgaccgatgatgcatgcatggatcacaatcaccttctccttgccactttgagttttaccagggattagtcacttgagaaatctgccattgaatgggttttacgttataggcaaatcgacagggcaaacaaacaaagagggtttgcttgtctttctttatgatttgggttctggcttaggatgcctcctctaaaagaagctaggaggggaagtgttttaaatttccaaaaattgctcaccctagccaaaaggcacactcgttatacaagacataagatgccagaaagggatcacaaaattgaatataatcttaattccttaagaaatggacccaaagagaaatattttctgctagaatttgagtgtctaggtcagtttgaaaaaaaaaaaaacaaaaacctaaaatagggtcacagcacttggctttagctctgcataaggctgctatgtaaccttaaacttgctttatatatctgggttttattttctttacaaaccaggttttctagggatccaaagaggtgcttcagttctgtaaactcagttttcacactatattaaaagaacatttaatcttaaatattgtgatttttaaaactgtacagtattatgccaaaaattttacacatttatataccatcagcagatctactactggggtacttggttaaccattttctgttttgttttgttttatttcagtctttggaataccaaattttctctgatttcctgaatctatgtctctaaaatggtttcattgattagggaaaattataactggtctattttccttccttttcttttttcttcttttaaaattcagactcatgcatatacactttgggaggccaaggaaggcggatctgaggttaggagttcaagatcagcctggccaatggcaaaaccccatctctactagtaacacacaaaaaattagccgggcgtggtgatgcgtgcttgtaaccccagctacccaggaggctgatgcatggaaattgcttgaacccgggaagcggaggttgcagtaagcagagatcgtgccactgcaccccagcctgggcagcagagtgaaactgtgtctcaaaaaagaatgaaatacatttcttataattcatgtttaattttagagctcttttattttattcaattctattcaaaccctgggattttaaaaggaaattttttttcaaaaaatgtttccatttgtaactattttgtaaaatgtgatttttaagattttctgtaactaaaatattacattcaaattaattaaattctgactgggtgcggtggctcacgcctgtaatcccagcactttgggaggcggaggcgggtggatcatgaggtcaggagattgagaccatcctggttaataaggtgaaactgcgtctctactaaaaatacgaaaaaaattagccggcgcggtggcaggcacttgtagtcccagccggtggcaggcacttgtagtcccagctactcgggaggctgaggcaggagaatggtgtgaacccaggaggcggagcctgcagtgagccgagatcgcgccactgcactccagcctgggcaacagagcaagactccatctcaaataataataataataataataataattattattattattattattacattctgtgctaacataagactcaacagcctttgagtcaacttttcagtcaactttgttgtcctcaaaaaagcatcttaatgaaaacacagaagaatatacttaggaccttggattaggcagagttcttacatatgccatcaaaaacatgattcatttagcacaggacagcaaaagcatgattcatttaggatatgttacttagcttgatttaggcattccacaacgtatacacatatcaaaacacaatattgcacacaatgaacatatacaattgttgtcaactaaaaaattcatttttaaaacagcatgatccatttaaaaactgatcaattagacagaccctttcacaattaaaattttctgtttgttgcaagtctctaagccacacagggaaaaaatgttggaaaacaaataacggacacaggacttgtttccagagcatagagagaattcagttaaaacaaaaataaggaaaaaaaaattccctccacgctccaaaaataggtaaaagatctgaacagataatctaccaagagagatatacgaatagcaaataagcacataaaaagatgttcaacatcactagtcatctcaacaggaagacacaaattaaaaccacataagatatcactgcacgcctattaggaggagggaggagagggaggagtgagagaagaaaacagaccaacctgacaataccaaatgctagtgagaatgtggaacaactagaactctcagattgctgatgggaatggacagtggtacagtcactttggaaagcagtttggccatttcttataaagttaaacacacactttccatatcaactatcgatcccactcctacacatttgcccaagtgaaacaaaaacataggttaatatgaaaatccatatactaatgtttttggtagctttatcaataatagcctgtgatggttaactttatgtatcaacttgactgacccccagggtgcccagttatttggccaaacattattctggatgtgtctgtgaaggtgttttggatgagattaacatttaaatctggaggctgggtaaagcagattgccctccctaatgtaggtgggcctcatgcaatctgttacaggcctcaatagaacgaaaagactgactctcccactactaagaaaaaattcctcctgcccagtggccttcgaactgggacataaagactttcctgtctttacacctgaactcttcttgggtcttgagtctgccaggttttgcacaggaactacacccccagccctcctgaatctcaggcctctagacacagaccacagctatactgtcggccctcctagatctccagtttaccctgcagattttggaacttatcagcgtccatcatcatgtaagccaattcttcataataaatctcttcatatacattttaaaatattcacattaatatatatctatatattttacgtatacacgcacacatagacgcacacatcctattacttatgtttctccggaaaaccctgatgaatacattgcccaaaattagaagccacccaaacgttcttcaactggtgaaaaaataaaactgcggaaagtgcaccaagtagaatcctactcagaagtaaaaagaaatggatttcaggtagatgccaacaatatggatgagtctcaaatgcactctgttaagtgaaaggagctgactcaacagactatatattgcatggttctatggatatgacgttctggtaaaatcaaaactgtactgatagaaaacatcaatggatgccaggagcctgagatcagaagaggggttgtcttccaatggacacagggaaattgtttacggtaatggaaatgttctacatcctgattgtagtatgtttacatgactgcacatttttggtgaaacctcagatggtacacttagaacagcaatttttttattacatgtaaaattatatctcatcgaaaaaacctcttaaagattgatattataagtgaaacatatatgttagatgaattaaaaattgtaaaataagtgaacactaatataatgttacataaaagttgggcttccacagcaagattctgtctgcaacaaaatctctctctgttgaaaaaagacattatcacagaaagtagagtaaaatgagtccgaaaagtatctaaagcattactcacgtcttaaagagactcaagtgttcaaatttcttgaggtaaaagtttaacctctttcatcaacactacagcattttgcactactatgacccatcttttagaggtttctctgtcgaggtgaattcagcgctaagacaggatcagtagtaatcctctaagatggtactgccacattcagtatcattcttacattgcagctacgtgggaacatggccaggcaagggggtgaatgacatttaaaagctcaaagtgttaggcacaatgttatgttccatttaacaccgtgatgtctcatttcttcccctgtctctacagcctgttttctaccgcattatacttatgatgagtgtgatttttttcatatttcatccataaatgcttccaaacaaaaaaagtttctgcttttataagaaaaaaagacctactactatcttctattctcaagccagcttgaagatttttttttaagttttgtttttcttaagccagcctccaatgcaaggattaggtttagcttaaaggactactttgggttttttattttcttttatgcaatagattaatattttttcttagttttaaagaacaccacctatcaaacagatagtctgtcccacagtgcaattagcacagtttcctcctatacttaaaagggtctccaagacagataagggctattattccatcaatatagtaagctgcaaattctccctcaggttcctactctgtaaaatgaggatgataatacccaccttgcttcttgatatatttttcatggggagagaaagaaactcagaagaaacttcacaacaaatataaaaacactctgagtaacaatgaaggattaatatcatattggatacaactaacagcaactatttgggattatagtacattatcaatcagaagctatgagcacaacccttacatctacgtatggtttatatgtttgtttagatggtggtggccttagagaaaagcgtgaacacattgtggctaagtgaaattcaacatttttttctacacaaattgcattaagcaggatccatatgtcatgagaatgtaaccttcattgcatcatccaataaaaactaggaaatcacttgtgtacaagacacactgaagttttgttgacattttttgcaagcaattttttaacatatttattgatacgtaggtcttctttcacccctacctaaaaaagtgcttaaggtctccttttctctgtttgttcatccatcaccaaaaaaaaaaaaaaaaaaaaaagaagggcaaaacatttgccttaactctatcccttcttcagaataaaatcccccattgtattcattaacaaatgttgcgcgaaaggattagcagttacttattatctttttatctttaccatacgctctgtgtaatttctccaaaggctggtttaggttgccaccatttgctaaaaatgctcacatagataactaacagcttcctaaactacccaatttggtggattttttcctcattctcctttggaactctgcacagcttatcttgagaacagcctcttggattctctgatagtacaaattcctggtcctcttcctccctttgagattatcctgcctgctgtgctaacgtctcttcctccttccatcttttaaatatgtcaactttatggggactcatgtttttattttttgttcactgatgtatcactgtagcaggggtcactgaatgaatgaattcttccaatatcctagttgactgttagaaatccttaaagctatagtgcccacgactactgggttctgttagcaaaagaaaaccaaggaagaaggaactgtaatattaagtagtgcccatgaacagcctgttacatacatgataaaaactgatttgtatgattactgcaattattcctcagccaggtcacagctgctaagtgcatagctgactgtgactacattcttttcaacaaatctggcactcttaagtccaaattgacaggtctatctccacacagacatggaagtttgttttgtttagtgcccctcccaactgacttatcttacaatatggacagggcccagatgacagtcgatcaattgatctcaaatgggtcaaaataaagatattaatattgccataactgtgaatgcacatcacattttaattggtaagaatttttatagttctaaatatattcccacttcaataacattaaggggccaatgcaggtgttttcgtccatgtgcatccaaatgttaggagttatttttcactgagagacaacaagatgatgggaagaggggtcatgaaaatacgctgagcaacaaaaagagccttgaaacagcacccacgataataggggttatagatttattctttgtggtggcaaggctctttttgagttcctgtatacaggcaattaagcttaccaaaaatatccagttatggatctatccaggaagaggcagaagtttctggagctgcacttgtttcatgtggaatacttgcaattgaggacatataagggctgacagtgtacaaatgataaagtgtatccgttgaggctaagcttatatgcttgaaaacaacagtgagaaccggaataagggtatttttgagtaacaagcaaattctaaaaccccacagagaagattccctgaccacagggcatcaatacccatcatttttacaaatagttttggcaaagtgtcacactgatttatttgaattcacaaagatctgatgtaatatttaaaaacagatctcttctttgtgtaaacatagattaagaaaaatgtaaatctcccatctaggtttattttttaatagaaattttaattatacatgtataaatctagagtgctcaatgccttaaccagttaaaataataaacggaatttggcagaacatttgttctgattactagatgtttaatgatacttggaacatcaagatgcatgtggaattacactctactaagatgaagacagaataacttggaaaagatcagatctcattttgacttgattctcttctcctggaatatagacaaaccacattcttttcctcccccaccttagattatactatattacttttgattgatattcatctccataatttgtgctttttgaaagaataattgttataagaattacgtatttcaggttttctctagtaattggaaggtatgaatttaaatctgacttatttcctaactgatcaaacatggactataatttatgaaatattttcaaaataaacatttaactatcctattcaaacttgaaatgtcacttcaattttagtttgactgagggttatagatggctacatttttttctcccaggcaatttttctattttaaatgttattagctgcccatattaataatgtgaaaaggcagagacaggataaccttaaaactcatacatcattttttcttaagtgtttcaaaggttaatacctaaccataaaggttaatgatacaaggtcagctgtataacatccacatgaaaccacatgaccgctgtagcgtttcataccattgacatgttgctgttttgtggaatgtatttgtcagttacaagagatgacatgcttgtttggtgccatgtaccctttatgaaaaaatgaactggctcaagtatccatgccagtcatgtactccgaataattacaaactacttcacactctaaatatttagatcactaggaatttcaacgttagaccatcacctttcccccgactgcacatcagagcagaaggctttctgactgcctgtccttgaacataacactaacacaacatatgaaactgattaggaggactgaggtgtttgaaagaaaaaaactttgatttttataaagattggcatgaagatcattcttctcagttgaaatttactttgataaaatacacccccttctcaactgcagttgccaagtataaaaacaaatgcctactttcttctgaatcacttttttatatttgtctcatgtatttttcagattttcacatcagtgtaacacaggtaagaataaaagcatagaattaaatccgaatatttacctatgaagaaacacttaacaggccagtactaaaacttggagctcataaaaggggaaacatgtctttctgtcgttgagtataatttagtttcaaaagatggttttttgggtttgctatgcaaaatcctctagcaacagtcacagtttctcagtactggtgttttaaagttctttgctttgggtagtgcctcgttgcaggtttaggagaaaaaaatgttaaaaggtattcctgacagctggcagcctgtctctccagtttttttttttttttttttttctttttttaggtaattaggttgctaataagcagggagtgagtgatgctgttggactccaatgtttgattctaggtcacagtaggacatagtcaatctggacactgacccatagctcacaaatcagaaaaaaatcatctgagaattagaaaataatctaccaagctcctatttgtaaaccctcaatacaattcttaaccttgcagagataaagcgttggggaagaggaagtattttacaaccttttaatcttaaaaaacaataaatttgaaattgagcaaagtatttgaaagaggtggccttactttcctccaactgatttatacattcgtaacagaagcgtgtttgagtttgtgtcatctgaagattctgctcttaaatatgctactttaaacctaagacagcatattctcagtacaactcaccattatgagttgagtgatggtttttctgcccatcacttagactgtagtcaacactttatctttggcagagcaatttccacatggcataaatgatggggcaatggactgggaagaggctcgactttcagtcatggtgcttctatcagtttcctgcctgcgtggtcttgagccctcttgttgctaactagaagtaaccagacggtgaatcttacagggtggccaacttccttggctacaataaaccccgttgttgttgtgatcatgtcacctccctttaatgtattgagaaagttgagaaccattaagctagattctaagaccaactcttttaccctttagctccccatctataaaatgaacaggtttccaaaatatcacaaattcaagtaagtctatgttgcttccacttaagctaacgcaaatcatcatgcaaatgttgtctaaacgcacaacatctgataaatgcacatttaagacagtcagaaacagtaaatgtcattctcccagcagaaagtcataaactgtcaaaaatatcttttaaaaaaccttctggaaacacagtttttccactacagttttcctttgtctctgagtttgaaaaatattacctgtgaaatcactttggtttacatccagtttccactataggggaagaaaggaagaccaaccagtgattaatttatagactaatgcattactgtgatggcagattcaactgtttgttgtttagtgaaagtttatgtccgtcatgtacatgacactggggatggaaggtaggtggaggtacctctgctttcataattataatgtgagaactagtctgctaagtgcctaagtcaattcaaaatttccgaggaggaagccttagggaattagagatggtttcatgtatgatgaggaacccttgcagggcacaaagaattggcaaaggtaaaatgatgattgtgagaaatccaagtgaaagataaaagcatgctggagggaaagtgtagggaaatagcggaagagaaaaccataataattccccaccctttgtagtcaagtgcagtttagccccttcacccgccccccaccaaaagaaagaaagccaagataaattggagggtcttaaataccatgctcaagactttgaacttaacttgacagacagtagtgagccaccagaggtgttttaagagacgggcaacaacctaaataatcgataaggtgggctgaatacacgcaagctatgctcaaggcctatgttaggatgatgggaacaggatgccaagcagtgagtatatatgaaaccacagagcccagattaacataatttggtaatcaactagatgtgaagcagagggtgcaggagttgtcaaggatgcatctgaggtttttggcctagacttttagttttaggagaaccatgacaccgtacatatacagggtagctaagaaagcagattgctttttgtcatgtttacattgggaggggaagaggaggaggattcagaaggagacaagtagatgaaaataaagatccctttctatggtgggcttataaaactttttggatgctctggttttgggaattttaaatttgagatactaaaaatatttcccagtgtagctttccacaaaaacttatctgtaactcaggaagaagtttgaattcaaataaataggtctgaaaagcacttacacagagataagcttgtggcaataagggaaatctccaagagacaaaatataaaaggtcaggtgactaaccagccacaatttggcgtgctgcagaggcaacactgggagggcagcaaagaagatagagaagcacaccgtgaggaagaagaaaaaaactgcagaattcgctgtcccagatgttgagggaggagttcgaggatgtcaacactgactctccaggatcagagcaaagaaagaaagacagataggagacaagtagcacaggacaattacttcatctgtttcagtagagttggaacggaattcaagtggtaagataatttgctacaagtcattaatgtttaagaattttgccagtgagagaaggaatggaaggtcaaagcaacagtatggtcaagagaaaggatttctaatgtaaaggatagctgaatttattactagaaatgggggaaagcacctgctaaaagaacaactgtattagtctgtcctcacactgctgtaaagaactgccccagactgggtaattataaggaaagaggtttaaccgactcacagttacacatgcctgtggaggcctcaggaaacttacagtcgtggtggaaggggaagcaaacatgtccttcttcacatggtggcaggaaggagaagaatgagagtcaagcaaagggagaagccccttacaaaaccatcagatcttgtgataacttactcactctcacgagaatagcatggggtaactgctcccatgatttaattacctcccaccaggttcctcccatgacacgtacggattatgggaactgcaattcgagatttgggcggggacacagccaaaccatagcagcaaccaaacgagaaaagagcagaagcagcagtagatgatatcaaagagaacaggtgaagaaacaccagccacctgcctttcttttcctatgcataaggccaaacctaacaaccaagcaaagaaataaaggcatttatagcccatagacaaaggccctcattctttattttctctcggtttcagaagaaatgccacctctttcttcccagaatctcctgggtccctgatttcgctgtcttctacattctcaggaatactttctcatcaacttattccttctggccagctccctgctttacctatttagatctcttgctggaaatgctggactgctcaggctgtttcctgcaccatctacatctactgcatattgattctcatatgctgcatagtaacttgacaaatattaccctacatgatctaaacaacactgtggtgaaggtaggagccccaaattctggaccatcgaaaatcacaatctagggagcatcagggctgtgattcaaagctgagtcttctgctgcagcctcgtgttctttctcctctgcagggctgtctcttgatgctggtcaagatgcaggcagtagactgtttctatctaaacattacaaacgacttggcttgctgtcagacacctaactttaaatggctaaaatcgcttgataaatggtgtgaaaattttatggtccttccgtcagacaccgtaatttattatcacataatgcacagttagaagaaccaaaagaaaccatcccacaagggcaaacaatgtggaggcagtggccctttgacactcaaaggccacaggcattatatggatccaataagagagctgcttctacgaacaagagaacaacctcttgatcttgcaaaatatttttggacacctaaaggctcttttattactgtggctgattaaaatgaaaagtttaaacgactaaaatgttctttttgatgagtttttaccatgaactatagaccttgtagtccagggggattcaagccctttgatcctgcgtactcacataaattcagagtcataaaacaacattggatttgattttactagtgtagctgatgttgccagatttgtaatgcaatcttgttttctcccctccttgtttttgagcccatccaccattgttttatagcaaaaggaaaggagtttccatttggttttggcaatccagtttcaagactgagccacttttctagaacgttggaattttacagaaaaataatggtcctgtattgtatccatcaaaacgggaatcaatgttagttttgcatgctgaaaataaagtatcaaaaagaaaaccctcttctcattataataatcacagattttcattacttaagatggttagaggatgatgtggttgagaacaatagtataagtatgaagtagaaaaactggtgtgatttagtgtttataaatttccctcaggactaactgaaaataaattagaaatatcaaaagatgcccaatttattcatcaatggcagattatagatcatatcttagtttacaaacttaagaaaaaggactggtatctgtgggagaaataaagaaaatgttcgataagacatatgtttaacaaaaagacatgcagtaaatataacttagatgtttaattcactttcttctaatatcctaatcattttcctgtgtgtatgtgcaatatcatattcctataactcctaagacatgaaatttttactataaagggtctatgagggaataagaagacaattttattaaatctatgttataaagaccataacaatcaatagtgggtcataaaaatcgttcatttttacggagtaaaatatcagtttgggctcagagagatcaatgtatatttagcctattcactagaccaagtaatactaatttaacagttttcactaactttatttttcatggattgcctgaaagatgaaacatttctcgccaagattgttctgtaagtgacacaggacataagggtcatgtgatacttcaacaattctaattggaaaagagtcaccatgtaagggatgcttcattctcctagggacaatgccttgtgacattttcagctgcagtctcttaacacctgctgaggccccagtgaacatttcagaatacgattcattcagagaaatatcattccaatacacattcacttccttgccatttggtatgaatatattacattaagccatataaaattgctgctttataagtcaaataggtcaaatatcagcaatttaatgcagttcaacttataaacttcatttagcaaatttgaaaattatcattgttctatgttttctcagttaatcctttaaattatgtctaaaggatctatttgccatagataagggtcatgccatatatagttttaaaacaaaacaaacagaactgtgttatacagacacctactgcagctttcaaagacagtacaagaaactgccccctgtctacagagacaagtaattgttctggtggtgtgtatatcaaattaagataagagaagtgtatccagttaacaagagctttctcatttcatgctcaaaagggtagtgtgttgtcagcaccttcttcctccctattaattcattcaagaattatttattgtatatttaccatgttccagagggagaatcaagctgtacacatttacagacaagcaacaatgacagttttcatggttccagtttcagcagaagcaaccctcagcaccggtagaaaggtaatgcttgttgtcagagagcgtaaattctctcttgaccctgtcttagagccactacaatctctgacttggacagctgcagtactccctgctgtcctctccacatcctctctgccctcctcaacttgtcctctgcaacagcagccgggggcggggtggggggggtcttttggaaatgcaaatctcctcatgtcacatattcctctgctcagaattagtcagtagattctaactgttctgaagatgaaattgggaaaccttaaaaagatgtacaagacccttccagaatcttgcctcttgcctttctccaccgcactgttttcaacccataggccatcatcgatcagtgagatagcatattaacatatcaatttgtgctttatccagagcatatttagtaagagttgaatatatccgagtatgttacatgcaataaattgttgaatagaactcattcctctctctctctctctctctcacacacacacacacacagacacacacacacacgtaacctgggtctcgatataaattacattgcttattctgggttgtagtataaaaaggttgaaaaaatcctactccagagctacatttcccacctctctcctgtttttcctgtgctttggccacacaaagcttccctgcagttctctccaaacaagccaagcttctcttcactcttcaaacctctgcttaaaggtcagttcctaagagtatccttgtctggacccatggatcttaattagaccccatcagagcagctccacagcactcatcacattatatttattggctggttattttatcaatatctgtttctctgaatggactacaagctccaagagagtggggcctattatctgtcctgctccctcgagcacctagcacagtgcctggcatccaggaagcactcaatcaatacatattgaatgattgagaaagacctctatttccttttgatgattccattcttagatgaaacggatgatcaagttcataaagcattattttaaggtggtcctttgtcatttgttatatagaatgtacctatttacagccataaacatagcatgtactgtctctgtaagtacattaagcactgcctatgagtatggacttatgtgcactttgctgtgcatgtttttctgtaaaataaactaacaatgagttttcatgtgtttaaagcaaaaactcttagtataaaactggaatgtgtttcaatcatcaaaagaaaatgtatctagaaagttaagagaaaaagggtcaaactgacctccagtggtgagattgtggaatgactcctaaagtaattgtaaaatactcagcctatcacacagaagcatatatatatatatgtatatatgcaaaacacatttcttaataatacttcaaattatgtttattataccaatttgcaggagatataggtcatgccatatattgtatcaaaacaagtagaagtgtattacatagacacctgtaacagctttccaagatagtgtatgaaattgccacaatcagaaaatctaagtcttggaaagaatcttagttgagatctgagacctaacatcagcaacttctataaaaagttgataattttaaaatgttaacactcaaaaagtctctccctccattagtctctgcgtaatattaggtcctcagtgtaagctgagtgttatttagcctttatggtataaattctgttttcccaaataaatagtaaatcctctgagtacggaacctatatgaggattaaataaaataatccatggtaaatgctaagtgtagtgtctggcatatagcaatatgcaacaaatgttatctgttattatcatcattattaccatcattactaaatgatgttttatctctagcacatctcttgtatttgacacgtgctcaattggtgtttaccaatcatgagagagataaagtgtaagaagccaagttatgtacatgaaattatagtttagaaaatttgtctttacagcaaaaacaattttaacacgcaattatcttactcagaaccgttccccagatctgtgttttaactcttaggctgcttatacatattcagatgtttccttcataaaactatggcaacagtaatatttcctaggaagaggcaataatggaaatgagcacatcatacttttataacatatgaaaagcaatgctcattggagaattagatataacagtaaatacagaatgtttcttttacctcggcacatagcttatatggaacaaactttaccatccaaaaatacactttgacagccacagacttagagtaaactaaacatgctgctgctcataataaacacaatagttatgatagataggtcatctaccacatgccattgtggcccagtcccacctaagctatcccaacagttgtaatcagtcaaaatgaccaagttacaacattgtcacacccactttaaaggtgagaagctgaagctcagaaaggtttaaataatttcttcaagaccacacatctagtagacagcacaaacaggattcaaactcagggaggattacacacctgtttttctatcccactatcctacctagggttacattgcattttgtttaatgaatggtcacttgacttcattatatgagtttatgcttcagcatgttctgattctaagggccatcactcctaaggacaaatatccacccaaagatagatcagaggcaaaggtcaatccagaatcaaagtcacatcaggaatattctcactaggcaaggacctttaagatcttccagaggcagttcagtgtacagggtaagagggccacctcataatggtgtaatagctcattcactccttatatataaagactggcacatagtaaatgctcaattaagtaccaaatattattattgttattcctccaggacacagaggaagctacaacaaattgcagtgaaatggtcaaagcacacataatgttacgcgcgtatacacacaaacacacaataaattcacactatgaattccaaagtctatgaggttggagttgttagaagcagcaactagtaccatttatcacacatgaacacaccatacaaggaggtggcagcatagagaacacagctgaatcaccccataggcctgttaaggaatcagcagtgttgggtatcagggactatactggagaagattaaagttaaagaacagctgagccccgatgttcaaattacaaaaatcgtaacgaagaagtaaggagctggcaagctgcatagaagtctagccacagtattttcttacccaatttacaatcttggaaattaacttctatgagattcaggtttcaaatctctaagataaatacaggcaaacatcaagattatggtgacaagtattagaggcacttcctcaaactgggctcaggaccagctatgagaaataaagctggaaagagaaatttcccacctgctcctttcttccgtacctcagtagagagaacagaacaccttatttctgaaaccagtgaaataaaagaactctattgtttatttttctttcctaacactacagaaatatcaccgtctttttttttttttttaatcacatggggaacttgtgcagatcatcctttattcctaccttgtacaggtctttgacacaggacgagagaaaaaattaaaacttaaaaaatcattatactaggcagtgaatacatatcaaatttagaaaccaggcagacctggttgatgaatctagccattctactgaccagctgtgaaagctcaggattgcacttgactccgctgggtctcaggtagttcgaaattatctacgtgaagcactgagcatggtacctggcacagagctggtgcttccttctcagtagccaggattataaacatctccaattaagtcaaaaagcatggggtgctcagcatttaatctctcatgtcaacacaatctcttaccatgccttcctgaaaatgttctagaacacagaccatacccaattttttacactaagagctcatctttcacttacacttccaaagctgctgccctttcaattccttcaatagccctttcaggaaaggacagaagagaggaagaaagggaaagggcaagagggaaagaaaagggaaaagaaaagacacaaatgtaaatgtccataaatatctaaaagctcaaggaattctgctttgtattcgtatgttcatgaaaaaaataaatgttactcagcctctttatcctctgtaccagaagtcacaatctcagatgtctacaggctccaggcaatcaacataagtagaggagactggctataagatgatagtaagtgtggggcagtactttggcaactagagcatccatgctttatttgaaaattattcaaaggaagtttttaaatgttattgtgctcaatgaataaacgtctctgggctgtatttgatggtatcacaaatttaagaattctgcagctttcctaatgctaccccccaaatagccttctacctaaatactgtgagtcatgaaaaaatttccagcaatgtccagtcagatcaattaacaactatttattcaatttcagctagttgcctagcactgatctaggtaacatgggaaaagaaaatctcctaggactttggattgagttgggacagatgcaggggcccactcttttcccaggccagaaatgatagaactttgaagctagaaggaaacttacgccagctactccaatgcttttactttacagctgaagaacctaatatttaagagtgatgtgtgattgtatagaatttacagaattattgagtgaggcaggacaagtctggagagaaggaaacactccccgtggtgctctaccatgctttctcccatttcatgaagagtcaaaagcaatggccaacacgcagaaactcaccggttccagcagtagcccgtcacctaaagtcaaaaaacttttgcaataaaaagaaaactgtcttggtccacctgtattgactcatgttcaggggttaagactcagcagaaatgattgaaggctgatggtgcatgaaggaaatgtctaaaaccatcattggcccccatgatacaaatgagcaatcaacattctacaacagcctccttctatatctgaattgtctgaaggcaagacagtatcttgaaggctgagacaaagggctccttttccatgaaaattcaagtccaaatgtacctaccggattctaggtagccagtcgcccaagaggaatctcaacactagtaaaccagtaaatctagtaacctcacaacatttcacagtcacactaaaatgatgaattaacatatttctcaatattgtctattttttcctttttggcatctcagtaatgaattacactaatatcagcacttaggggaataccataagggttttatgaaatcatcacatttcatacttgtgaaagttttgtttattggcctacaaattattccctttccctcacagtattatctgggaattaagagatttaaatgtattgtgttgataatgaagaatacaaaaaaatggaacaggcttgggatttatgcctttataaatttcgttgtatcagctcaaatagagtctgcactcaattctgtttcaacagcaatgtgtaaactattagaaatggatgagtggaatgtgttggccacagtaaaatgaggaagtctacaagtcttaatggaggccagcataccatttcattctcttggggacaaaaaggtacaatgtaagttaattttcagtttggcattgatccctggatcattttgcagtgggagttaccaaactagaaatgtgactgcattgcacaatgagcagggggcctgccagaggccatcgctcagtgaagtttcccctcaattaggaaatatgcatgtgataaatggggtaaacgaaaaagattcccgtaaaggaaatgtcactattggctggttctttgtcttgcatcccacaacccaaagaacattagttaaaaacagatacaacaatctgtcgtttccaagtcctctactttcaaactgcttaaggtgttggtcaaaaacgatattcttaagctaccagctcctcacaagccagacaaagggcatgtacttttctttcttcccctttcaaaattgaagaagtagagatccaaagaagtcctactaatcccatgctcaggcttcccttttgtcataaagatttgggtatcctacagagtttcacttacctttccagagctgcatcccttcacagagtgacacatctgagaagacactggaagattagaggactacattcagagtgtaactgaaaacctaaacacattgctccacagaggcaagtagatggactagagacctgctgactaggaaggagaacttccacgagtaactaaaaggttaaaaacgggaggcagtggctggacgtgatggctcacgcctgtaatcccagcactttgggaggcagaggtgggtggatcatgaggtcaggagatcaagactatgccggctaacacggtgaaatcccgtctctactaaacatacaaaaaattagctgggtgcagtggcggccgcctgtagtcccagctactcgggaggctgaggcaggagaatggcgtgaacctgggaggcagagcttgcagtgagccgagatcctgccactgcactccagcctgggcgacagagccagactccatctcaggaaaaaaaaaaaaaaaaaaggaggcggtgtaaataggaatttagggctgagcatagtggctgacacctgtaaccccaacatttggagagagaggctgaggtgggcagatggctcgtgcccaagagttcgagaccagcctgggcaacatggagaaactccatctttacaaaaacaagataaaataataaataaaggatgcaaccagaactcaggaagtggattatacattgagaaaataagattatattaatcaattagggtagtatcccaaacaatgggtttcttgaagaaaaaggattatgttggaaataagctatacagcattctctttatagttcttccctgtacgtggtaaagctcaaacacagcaatagatatttctcaaatatatttgaccatgaaaacattttgtcaagaggcatttcaaagtatcactgttcagtggattctgtcttgggaaaagctagtttagaccaccctgatataaagcacacaggcacaagtacagcaggaagatcacagacaagtcacccttaaagaataaatccacggccaggcacagtggctcatgcctgtaatcccagcactttgggaggccgagacgggtggatcacttgtggtcaggagttcaagatcagcctggccaacatggccaaaccctgtctcaactaaaaatacaaaaattagctggatgtggtagcacatgcttgtaattccagctactcaagaggctgaggcaagagaaccgcttaaatctgggaggcggaggttgcagtgagccgagatcacagcatttcaatctagcttgggtaacaagagtaagactccgtctcaaaaagaaaaaaaaaagtgtagcaatttacatttaccttccccttatagttcaaaagcaaagatttattgattatttaaatgaatcaatttctggtacacatgtttatacacctttacttaaagtaagtacttggatgattttgccattcaaatctccagcgggagggtggttgcaggtcatttcccatgacttcactgttttatgtcatttataatatccacaacataattcttcagttttgtccaagtgcgtcccccctcatcctcctcctcctcccacttccccccccacctccccccatcctcctcctcctccctcctcctcgagtttagagtggtctttgtgcttttttttttggttgaggacatatttgggacattggactttcctcctcctccccctccccttccgcctcccccttccccctcctcctcctcctcctcttcttttttgatacaaagtctcactccctcgctcaggctggactgcggtggtgcgcgcatgcagcatgctacaccttttgataagctagtagcaggagcagccttgtgccctttccatactgcaccactcaacgaatgctggctgcagagcacacatggaataaaaaccctaagctcccccacttactgcccatggaactacagggtaaaataatcaactgtccaatccaaatattttaggtgatagggcttgcattttgctggtgggggaaactgaacaattaagtgatttcccttcaagtgtatggttaaaacaaaatggaaagttctctgcttatttaggttctctgcttattgaatcatgctgttttctttaaattctatgaaaacattccaaaaagacctaaatgtgatacttatcaattcttgtacatggtgacagaatgagtcactttttcttttgtactttaaaagcatgaaacccttcttattctagaaaggcatgttgaagaagtctggaaacatatctgaattctccataacttgtatatggagaaagaaaatctaacaatgatagctgccaatggaaatcacatgtaaagcatcaacatatttttcccactcactatcttccactaggtctgtgacaaaagatgagtccactacttagtgaaacaaaacaggtaggggtgatattcagtgagtactcacaagtacagctagggtgggtttttgtctgttcgttttacgaacagcatctattttttattgtattgatgccaaaccagttgtctcattttattttcagtatcacccagagtacaggggtaattaatcaggcaggtaaagtggcccagagagcaccctggcaaatgagaggtcatgcatcctggtggaagtgaatgcctgcgacttagccccagcaggttgaagtcatacaagaaaataagtcctttggtgccagcttctccaagttttaaagcagcagctagaaatccaggttttatataaaaatctccatattttaaaatatttattcctagttcaatctttaaaacactgtgtttgccaaatgaaacacttctttgggtcagattagagaagagggttgctggtttcctactgagggttgtccatctgtgactgctagaatagtttaaaactacagctaagtgttcaacatacgaaaatcaataaacacaatccagcatataaacagaaccaaagacaaaaaccacatgattatctcaatagatgcagaaaaggcctttgacaaaattcaacaacacttcatgctgaaagctctcaataaattaggtattgatgggacgtatctcaaaatagtaagagctatctatcaatatcatactgagtggacaaaaactggaagcattccctttaaaaactggtacaagacagggatgccctctctcaccactcccattcaacaaagtgttggaagttctggccagggcaattagacaggagaaggaaataaagggcattcaataggaaaagagaaagtcaaattgtccctgtttgcagatgacgtgattgtgtatctagaaaaccccattgtctcagcccaaaatctccttaagctgataagcaacttcagcaaagtctcaggatacaaaatcaatgtgcaaaaatcacaagcattcttatacaccaataacagacagagagccaaatcatgagtgaactcccattcacaattgcttcaaagggaataaaatacctgggaatccaacttacaaggaatgtgaaggacctcttcaaggagaactacaaaccactgctcaatgaaataaaagaggatacaaacaaatggaagaacattctatgctcatgggtaagaatcaatatcgtgaaaatggccatactgcccaaggtaatttatagattcaatgccatccccatcaagctaccaatgactttcttcacagaattggaaaaaactactttaaagttcacatggaaccaaaaaagagcccgcattgccaagtcaatcctaagccaaaagaacaaagctggaggcatcacactacctgacttcaaactacactacaaggctacagtaaccaaaacagcatggttctggtaccaaaacagagatatagatcaatggaacagaacagagccctcagaaataatgccgcatatctacaactatctgatctttgacaaacctaacaaaaacaagcaatggggaaaggaatccctatttaataaatggtgctgggaaaactggctagccatacgtacaaagctgaaactggatcccttccttacaccttatacaaaaattaattcaaaatggattaaagacttacatgttagacctaaaaccataaaaaccctagaagaaaacctaggcaataccattcaggacataggcatgggcaaggacttcatgtctaaaacaccaaaagcaatggcaacaaaaccaaaattgacaaatgggatctaattaaactaaagagcttctgcaaagcaaaagaaaccaccatcagagtgaacaggcaacctacagaatgggagaaaatttttgcaacctactcatctgacaaagggctaatatccagaatctacagtgaactcaaacaaatttacaagaaaaaaacaaccccatcaaaaagtaggcgaaggatatgaacagacacttctcaaaagaagacatttatgcagccaacagacacatgaaaaaatgctcaccatcactggccatcagagaaatgcaaagcagaaccacaatgagatactatctcacatcagttagaatggcgatcattaaagtcaggaaacaacaggtgctggagaggatgtgaagaaataggaacacttttacactgttggtgggactgtaaaccagttcaaccattgtggaagtcagtgtggcgattcctcagggatctagaactagaaataccatttgacccagccatcccattactgggtacatacccaaaggattataaatcatgctgctataaagacacatgcacacctatgtttattgtggcactattcacaatagcaaaaacttggaaccaacccaaatgtccatcaatgatagactgaattaagaaaatgtggcacatatacaccatggaatactatgcagccataaaaaatgatgagttcatgtcctttgtagggacatggatgaagctggaaaccatcattctcagcaaactatcgcaaggacaaaaaaaccaaacaccgtatgttctcactcataggtgggacttgaacaatgagaacacgtggacacaggaacgggaacatcacacaccagggactgttgtggggtgggggtagcggggagggatagcattaggagatatacctaatgctaaatgatgagttaatgagtgcagcacaacaacatggcacatgtatacatatgtaacaaacctgcacgttgtgcatatgtaccctaaaacttaaagtataataataatattaaaaaaaaaaaactacagctaagtgtataaattggatgtaccacccagatggcaatagtgagccatggtggccatggctttagcaattaggtaaacatcataaatgtggggcaacaacagttgtttaagtgtactagtatcatcaaaagagcagatgatttttttacagatggtttttaaaaatctaaagtatagtttggaacatttttaatctttactactgttaatcacaccttagtctaacctgtattttaagtgcagatcatgatcacaatatactttccttcttccatatactcctcttttccatctccaatcttttcttagtttgagatatataagatcataagacttttgcagagacagaatgagataatgtgcttagaacaatacctagcacacagcaagaattaaaaaactgtaagcatcttctgttaccaagaatattattccactgtcaaagccctcgccaggctggtctacagtttgtggaaagctagggttaactgttacaacttggctgttaacacaacttctgcttacagaatcacttctgttcctgccctctttaggaatctgtgtcttaaattatcccctaccaatttcagttcctctgaggcagctgacaatcttttttcacatcagaacaaagaaaaagaaagagaggtctccctttgtaacaagggagataagggcctccctcctctccttttcttctaggagacagaggtacttttccacttttttgtttctttgtgaaattgactcattttctctccctaactatttaaactctgctggatgggtagggcttgaattcatacaccatactacttatcgaataattttctgctacttgcaataacataacatataatccaatacaccgactcagttatttttaaaagcacattatcattcattgaaaagaaggatgttttcatatatctgataaggggttaatatacaaaaaatatttaaggaattcaaaggcaagaaaacaaacagcctgatttaaaaatgagcaaataatctgaaaatacatttctcaaaagaagacatacaaaagggtcaaccaatatatgaaaaaaatgctccaacatcactaatcatcagggaaatgcaaactaaaaccacgatgagatatcacttcacaactgttagaatcgctattgccaaaaaaagacaaaagattacaagtattggtgaggatatggaaaaagagaacccatgcacactgttggtaggaatgtaaactagtttgtagaaaacagtgtggaggctcttcaaaaaaattaaaactagaattaccatatgacctagaaatcccactactgggtatatatttaaaggaaatgaagtcagtatgttgaagagatatctacactctcatgttgactgcagcgttattcacaaaagccaagatatggaatcaacgttgagtgtccatcaatggacaaatggttaaaaaaaatgtggtttatacacaaaatggaatactctagtctttaaaaagaaaaaaataatcctgtcatttgctacaatatggatgaacctagagaacattatgttacgtgaaatatgccaagcacagaaagacatggcatgacctcatttatgtgagaaatctaaaaaagtcgaactcgcaggaacagggagtagaatggtggttaccaggggctaggggcagagaggggtgaaaagtggggaaggattagggagatgttgatgaaaggagacaaatttcagttagatgtgagaaataaattcaagatgatcttctgtacaacatggtgactatagttcataaccatgttattgtatactttaaaatttctaaaagagcagagttttcgtgttctcaccgcatataaatgataaatatgtgaggcaatgtatgtgagacaaagtatatattaattagctcaatttagttactccacaatatatacatatttcaaaacatgtcatataccgtatatatacaatttctattcgcaaactaacaaatttttagaaaagaaatgtctgatccacagattgattaaattagcagtcatgagttaacattaaatgaggaaaaaatgttactgaaattttgctgtcattctctcctgaagcagggggttactgcagccatcagtaaacaagtctcagtgcctgattcagtatccagttatttgaagttaagattctgaactttctgccacaggcactacaagcaaatgccaaatacagggaaagtcaactagatggcagcacaagggaaatgatccctcagtcattccgggcttcacaagggaggatcaggtcaacaatttcccagcactctctgaggatacggaagggctcagaactcctcctcctccacctcctagggctccttccttaaattttgtaatctgcatcacatcatattgcagggatgtgctaagaaacatacagacatgaacacccgaacaagaggaagctgaacaaaaataacttccatcgtacctagaaaaaaaaacttctactatattttatataacagcagaagtctattccatcttctcttctgctttaaaaataaaataatcattttccaatccaatcaaatgcatttatggtattttttaaaattagaaattgaattctattaaaaacagaatccaagacttttcattccctgtatagacacagtgcctactggcagctgcaagatgcgatgctgtctagtttaacacttcaacttaagaggaatatttacttcagcataggagaaaaccaagtatcagttctatagaacccgttcagtagcatcaaagaggcatacctgcaggttttcaatttcttctttgtgctccctcttcaagtgtaaaatagcagcttggtattctgtaaaatcaaaaaagaggccaattataaagaagtacaaaattaagcacaaaatttatctactggtcctcttagaaataaactgactaaaataaatgccacaatttgacatcaaccttacaagagatgttaaaaattacagaaagataggacaagtagttcagggtaaaaggtaaattccttccttttagcaaacgctgaattacgaaaagacacaaattaagcagatgggatagggttaaaagaaaaaaaaagggatgatgagtgtgttccagataaacactaggtcaggagtttgtatttaaggagttggaaattaagtccccacagaggacaaatacagacatcttaagagcagacagggcaggaaacaaacgaaaactttctatgtgagatcagagcactctatttttaactctgtttcaaaaaagaaaaaaaaaatctccatttgaatgcaaggctaagtaagcacccagggctgattttaatctttatctcagaaagtcaatactatttgtcatttggatgagagattctagggtgaactgaggctgaaaggacaaaaataaatttctggtccaattttaatatgagtctaataatgtttatttcaacaataagtcccaagtgtacgtaagaactccagccaaccactaaaactatcattctgctggcgaagcatgcagctgtcaagacaactttatttccagcagaaattctaggtgtgtggggtcatggaactatacaggctgcagagaaccacaagacaaaaatgctatgagcacacatttttgtgagataagccaattattttacaaatgtgtttggggtcatgagtatgagtaagcaagaagcagtttgacctcattgaaatatgtgtgaaagccaggctatttctccaagtagatttcctaaatcaggcatgaaagtttgtgttttaatttaaaaatggaagaaggaaatcattggcaaagccacgccagaaaagtagtgttgctgctgataattacggctagatagacctctactgttgtggggaaggtgctccactgagctgtgaatccatcagaaagttctgtgggttctaaatccaaatcatacctcgaatggtctggtagtgaccacttgtcattatccccaccagcaccacgataatccaagttaccaccatctccactagattaaagcagtatacttctggtagggtgcctgcttctacttttagcaccactgtaactgatgctcatcaaagcagactgagtgatctacatagacatgaaccagatcatctcatccttggtttttcacgcaattagagtgaaatcagagctctctgttgcagcccataaagacctccatgtcctggttcctacatatctctccctatcatttcataccactccttccccttgttcatcatactccaccgtacactggctttcttgccattccttgaacttgtcaaattattttctatctcaaaatctttgctaatattgaaaacaataataaaggatttcatttgctgactacttactatatatcaggcattattctaagtcttactttatcaactcatttcatctccacaataaccctatgatgtaggtaccattattgtctccattactgatgaagatactaatgcatagagacattaagtagcttgatcaaggaagtagaataattttcaaagccagtaaacatgcttcatttaatgggtgaatgcataaacaaatgatagtatgtccatatgatggaatactactcagcaataaagacgaatatatgcatcaacatggaggaatcttttttttgtttgttttttttgagatggagtttcactcgtttcccaggctaaagtgcaatggcacgatcttggctcactggaacctccacctcccaagttcaagcgattcttctgcctcagcctccagagtagctgggattacagcccaccaccatgcccagctaatttttgtatttttagtagagacagggttttactatgttggccaggctggtttcaaactcctgacctcaggtgattcacccccctcggcttctcaaagtgcctggccaacatgaagaatcttaaaggcactatgcagagtgaaagaagtcagtctcagaaggccaaccactgttcaatagcatttatatgacatctagaaaagacaatctagagggatgaagaacagatcagaatagtagttgccagaggttagagatgggggtttggggagggggttgactgcaaagtggcagcaagcaaaggaattttagggataatgatattagatattattctctgtcctgattatggtggttgttacatgaatccatacacattaagttcaagaaaaagtacaccaaaaaaaggatgttaatttgttttaaatctgacattaaatattatattggtaaatattttccctgtaagattcagcataacacaacaatacctgctactattgttgatattcatcatttttctactgctactagcagatgtaatggatgagaaaaaagacacaaaatctacatagattataaagagaaaaaggaaggtattattctctatgttcatacatctagaaaaatctaaaagatccaactgataaaatattagaatatgcatgtttagcagagttgcttggtattatcaacaaaaatatacaaaaatcctcatagtagcagtttaaaaaagaaaagcataacacttacagtacttctaaaaatacaaaatacccagaaaaaactcaacagaaatatgtaaagacctcatataagaaaatagtaacattttattgacatattttactaaaaaaaaaaaaataaacgcagaaagacaagtgggcaagccatgtttctgatttataagacttcatattgtaaaggtgtgagtcttcccaaactgattccttcaaaatttgagttttgttttgtttgaatataaggagcccattctaaaatgcatgtggaagcatgaaagtgcaaaatgccaataagagccaaggaatgcatgaaaatatagactaagttaagacaacttaccttacctcctaatgagaattatttttaattcttacaatgtaattaacatggcatggtacagacacagggattaacaaataggctaataagatagaatagacagtccagaaagataccatgatttatagggtcacttgatatatgatagaaatagcactgaagatcattagttacacaaagaatgatcttttcaataactattggctgggaaaaaaatattctgttcctttcttatggaaaaagacaaaactggatcctaaccttatactataatctattagaagtcaattaagtgctaaactgtaaaaagcaaaattgtaaatattttataataattatcttataaaatttatcttatagcatagtattttacagcctcaggatagaaaaaagatttcttaatattcacaaagcaatatatatagaggaaaaaacctgataaatttgactacattaaaattaagaacttatttttcttaaaatataccatagagaaacagattgacaatagatcaatctatcatcaatagagataacattccctacagagtgggagaatatacttgcaacaccatcaatcaagatctagtgtaaatatataaatgcatcctacaaaactatagaaaatgaagcccatgtgaaaaatgagcaaaaagcatcaacaggcgctctaaaaagatgatatacaaataataactatgttaaaaggtgctccttattagtaatcaggaatatttaaggtctgacaacagagccttggtgaagatgcagaacaatggaaacttccatacacttcacttacagcaggagtgcaaactggtataatcactatgaacaatgatattttctaataaagttaaagatattaatgctttcttaaccaacaatcctaaccttaggcatacataagtaacaaaactatgaagaaaagcaacctgtcagtggacagcaccaaaggaagcattgtctctcttcccactgctgtcatgtctgcacatcagagtccctcaaagggcctgaacagctgtggaagctcctcatcagagggttgggctttgaaaccaccgataagtgcctgaggaatcattttgagcaatggggaacgctcaagaactgtgtggtaatgagatccaaacaccaggtattccagaggctttgggtttgtctcatatgccaccgtggaggaggcagatgcagccatgaatgcaaggccacacaaggtggatgaagagttgtggaaccaaagagagctgtctaagaagattctcaaagaccaggtgcccactcaactgtgaaaaagacatttgttgctggcattaaagaagacacagaagaacatcacctaagagattattttcaacagtatggaaaaatggaagtgattgaaatcatgactgaccgaggcagtggcaagaaaaggggctttgcctttgtaacctttgacaaccatgactctgtggataagactgtcgttcagaaataccacactgcaaatgaccacaactgtgaaggtaggaaagccctgtcaaagcaagagatggctagtgcttcatccagccaaagaggacatagtagttctggaaactttcgtggtggccatggaggtggttttggtgggaacgacatctttggttatggagaaaacttcagtggtcatggtggctttagtggcagctgtggtggtggaggatatggtagcagtgggggtggctataatgaatttggtaatgatgggagcaacactggaggtggtggaagctacaatgattttggcaattaaaaccaccggtcttcaaatttttgatccatgaagggaaaaaactttggaggcaaaagctctggttcctatgatggtggaagccagtactttgccaaaccacaaaaccaaggaggctataggggtagcactagctatggcactggcagaagattttaattactgccaggaaacaaagcttagtaggagagtagagccagagaagtgacagggaagctataggttgcaacaggtttgtgaactcagcaaagcacagtggtggcacagggcctagctgctacaaagaagacatgttttatacaatactcccgtgtatgggcaaaagagttaaggaccatatttgtgattagttatataacaggttattttaatttctgttctgtggaaagtataaagcattccagccaagggttttaatacagtggtttgtctgcacccatgctatcaattgctaaatgtaatagtctgatcatgaagctgaataaatgtgtcttttatttttaaaaaaagaaagactagcaagcaataatattaacaaaactaagaagaatggtggtttccaggagaagatgaaccaagttgggttgtgattgagcaaggagatgttatatgggtgttaaatgaaaaattattctttaaattggatattttttacgaaattatctttatgcatatctaacattaaatgaaagaaaaaatacttctcttttgaaaactggttacattcgtttcctcaaatatcaatataggcaaaacagaacatctgaattcataaaataagaagcagaaagtgacttagtaagtttaaatcttgtgtaaatgttgagtcctaacccatgtcatgataaatatccaaaccctaaccaattccaagcttctacaaagtagtcaaaggaaagctacttaaaccaagcttcttgtgaaattgatgtcctttgagaatagcatctacattctaaatagaaattatacagactatattttgcaatgattcattttgtgtaaattgtacctatatgggtgtgacagatatcgctatgactaattcattaacaaaccgatgaaggagactactgcaaagctaacatctaggaaagcatgattcatctcctcctttaacaaatatttttaccaagagtcccagtgtgacgggtggcaggaaacacactcccatcccaacaaggatgacagaatccctgggcagcatgtagaaggaggaagctaatgcctttactactggcattggtgaatgctcactttgagagttcacaagagagtagtaagagaatataaaggttacagaataatgtccatgagtcaaaactaagttagtgctttccaaatgtgtcttgttagtggcagccccctgcccccagatgcttcttgaggcttgcagatgcctgagtgtgaggatggggaggcagaggtgtcaactcaagaccaaggatgtgtgtatttgttaaaaagagaacttgaccctagcattggtattcagtagctctgggaccttataagtgtgtgaaaaggaggaacaggaattctacatcagggttgaaaagggcagactcatttgaagtcacattagcccctaatggaagttaataaatcaatttaaataatctattccacaagaaacaagtctaaagaacgtctttttgaaaacaataatgtagtccatgaaagacagagaaaggagtaaggctcctaactggcaggattcaacattttggaggaaaaaaaaatgaaagaactttctctgtacaaataaagctttcttagtctagtatttagctaattggttccttccctttatgttgcacaaaccttcctttttgatcagttcacaataacaaaacatccttcctgccaggtgtcattacaaagtttgtgccctccaatttgtgaagagcagaattacagatgattccacaaacacagaaggcatgcagtaaccactgctgaagtccatcacttactaaatgagtttacctaattacatatgggtacggataacattattgagggttatttttcaggaatagttctaagcactttacacagattaactcctgccatcctcacatcaaattgaaaaggtagaccctatcatatcgagacttactttacagatgagaaaacgcctcaggttgaacagctttcctaaaaccacatgctagttaagtgccaataatatcattcagacccaaagaacgtgtgctggctctgcagagtttttgtttattcccttgttttcgttcttgccgttcttttggttacataagcagcagatgcaaacaaaaccccaagcctctgtaaacttcaaagttgcttgctttatcctattaccagaatcactcgtaaacttggggtaacttttttcataattctgtaaaaggggaatgctaattttaatcacagggaggtttgaagagccaggggtcagagtgaatggtgtgaatttcaatggctggcaccgacaagttctgtgattatgattcgtctgtcttttctaagggaatttcagggcctgtagttactagtttctggttaaatctgattttcatttatgcgctctttcttacacatatatccaagcctccaccgcatcacacacgcacatgacatgggcaaaactggattatgtacagttaggaagtagaaactttctgaattctccactgagtaggaaacatggatctactcctacccgcggatcctgatatgtccggcctgtgcctctcactggcctttacccactacctcacattgttgtattttcaagtacatatgtgacttaaaaaaaaaaatcattcctctgaattatacttggacgatactcaatcagtgcttccaaaacttagcacacacaccggcaaggtcattttttgtaggtatctgaactttttattttgacagttaaatgttttaatgtgcattagggaaaaattatcaaacacacacataaaacccgtgatttcactgataatgcttcccagatagtgttgatcggagtttggtccctggaccaggagcatcagcatcacctggaacatcttagaaatgcaaattctttcctctacggtggatttattgacttggaatctctgaggctactttaccaagcctaccaagtgattataatgcacagcaaagtttgagaaccactgctttaataaggcttatttaagcaaaaacagtaaattcattaaaataacaaattaaataatagtaaaaatagtataaatatgtatcaaatttcaagaagctggtgcataaaggatgacatttgaaaaaatatgctaatcactgacagataaatacaaattcaaacaaactcatccgtgagtgaatgcacaaagcttctctgaccatttctaacattgacaaaaatggtcacagttcatgtaaggcagagtcacaagtcatttattccaaaatctaagaataaaaatcaaatgtgagctttcatatttaataagcttatgaaaccaaagtgtgcagcctggtcttggggccctgcgagtcctctgtttcccttccagatgcttataaacaatgcagtccttagtaactgtgcagtttgaagaaagcataaccggttttgtgtctgtcagaaacagtggaggtagattcaaaggcagtgaagtaaagagaaagtagtcaacagctgccagcagagctttttaactgggtgtctcaggctagcagctggtgagaggctgttacctgtaatgttgatccaacaccttttgtcagcgggccttcaaccagcacacacgtcagcaaaagcacaggaagagatctaactccactgtttgatgattgactcctgacagtttttaagcctcacccctccttcttccccggtgtcccacacacctgggcgatctgatagtaaaggctttgacgcaggagatgtgaaccacacagaccactgcccgcagaagccatagcccagtactgtctgttgaacgccataaaaaccccaagccagttttctacactttctcttgcaagtcatttttggaccagcttgagaggcctgtctcgctttccccagaggtctccttatgtgaataataaatcttttcatgcccttgtgtgtgtgcaaacacataatgcatctgcggtcatcaatattggcatctcaatcaaatttggggtggctggggttcaccctgcctcttcaaaaaggatgaggccgtaccctagaacttaaagcataatttaaaaaaaaaaaagtggttgccaaggccttgggaggagggaggaatcagtggagcgacagggggtttttaggacagtgcaactactctgtatgctactataatagttgatacgggtcatacattattcaaaatccatcttcagtacagagccaattctaatgtaaactgtggactttagttaataataatgtattgggtcaactgtaacaaatgtaccactccaatggagaatgctaatactaagggaaagtgtggtatgtgggcgcagtagacggtgagagggaactctactttccgctcaatttttctatcaacctaaaactactctaaaaatagttgattttttttttcaaaaaagaagtgaattatcagtgagtcaacctactatgttgttcaataacttacagaaaggagcctaatttctatatcagaaaaataaaatattggacaataactgggagaaatcccatgaatttaggaattgtaactgtcaacctttcctcattcaacacataagaatttctttaggcaaaaatataaaaatgtcagtatcaaaagatggggggaaacttctaattctccaagccactagtttcttaccgctatggtttgaatgtttgtgtcctactaaaatccatatgatgggctgggtgcagtggctcacgcccgtaatcccagcactttgggagactgaggcggacggatttcctgaggtcaggagttccagaccagcctggccaacatggcaaaacctagtctctaccaaaaatacaaaaatttgctgggtgtggtggctcgcacctgtaatcccagctactcggggggcagaggtaggagaatcacttgaacccaggaggtggaggttgcagtgagccgagatcacaccactgcactccagcctgggcaacagagcgacactacctctcaagaaaaaaaaaaaaaaaaatttatatgttaaaatcctacccccttaaggtgatggtactaggagatggagcctttgggaggtgatcaggtcatgaaggcagagcccttgtgcatgagattagtgtgtgtgatactgcaaaatatgtatttggcccttgaccccacttcctgacaatttctaaaatccttacactttccaaagtgatgtcttttttttaatcttaatgatcgaccaataactggaagcctttaggtagcttcaggatgggggcaggacacctgaaagaccaagacatgattagagggttgggactttcagttccacctcccaacctatggggagggcagaggagctgaaggttgagtcgctcaccaatggccaatgatttcatcacccatgcgtacataatagagcttccgtgagaacccaagaggactgggttcagaaaccttctggacagctgaacacgaaaaggttcccagagggtggtgcgcccaagaagaaatgtaagctctacggcccttcccccgtaccttgtcctatgcatctcttcatctgtatcctttgtaccattgtgtccggaattggtgtgttcttggtctcactgacttcaagaatgaagctgcggacccttgccatgactgttacggttcttaaaggtggcgtgtccggagtttgttccctctgatgttcggatgtgttcggagtttctcccttctggtgggctggtggtctcgctggcttcagtgaatctgcataccttcgcggttgagtgttacagctcttaaggcagcacgtctggagttgttcgatcctccggtgggttcgtagtctcactggctcaggagtgaagctgcagaccttcctggtgagtgttacagctcataaagacaatgtgggcccaaaggagtgagcagcagcaagatttattgcagagttaaagaacaaagcttccaccatgcggaagaggacctgagcgggttaccactgctggctccggcagcctgcttttattctcttacctggccccacccacatcctgctcattggtccattttacagagagctgattggtctgttttacagagagctgattggtctgttttgacagggtgctgattggtgcattcacaatccctgagctagacacaaaagttctccacctccccactagattagctagatacagagtgtccattggtgtatttacaaaccctgagcgggacacagagtgctgattggtgcatttacaaaccttgagctagatacagagtgccaattggtgcattcacaatcccttagccagacataaagattctccaagaccccaccagactcaggagcccagctggcttcacccagtggatcctgcaccggggccgcaggtggagctgcctgccagtcccacgccgtgcgactcctcagcccttgggcggtcgatgggaccgggcgccctggagtagggggcggcgcttgtcggggaggctctggcagcgcagaagcccggggcggtgcgaaactcaggcatggcgagctggaggtcccgagccctgccctgcaaggaggcagctaagccccggggacaaatcgagcgcagcaccagtgggccagcactgctgggagacccggcgcaccctccgcagctgcttgcctgagtgctaagcccctcactgcccgcggcagggccggcaggccactcggagtgcggggcccgccaagcccatgcccactcggacctctagctggcccgcaagcaccgcgtgcagccctggttcccgtccgtgcctctccctccacacctccccgcaagcggagggagccggctccggcctcagccagcccagagaagggctcccacgggtgcagtggtgggctgaagggctcaagtgtggccagaatgggcgccaaggccgaggaggcaccgagagcgagcgagggctgccagcatgctgtcacctctcactatgctttctagtaaaccaggaaatgtgtttccctgagctctgtgagcaactccagcaaagtaaccaaatctaaagaggctgggggttgtgagaacccctacttgaagttggtcagtcagaaggtctggaagctcagacttgtcactggcatccgaaaggggggcagtcttgcaggacggagccctcaacttgtggtatcaaatactatcgccaggtaaacagtgtcactattgaattggggaatacccagctgctagtgtccactacagaactgactgcttgggaaaccgacccccccaacccccccaccagattcggtcactataagactatgtggccaggcgcggtggctcatgcctgtaatcccagcatttggggaggccgaggtgggtggatgactggaggtcaagagctccagaccagcctgaccaacatggtgaaaccccgtctctactaaaatacaaaaagtagccgggcgtggtggcaggtgcctgtaatcctggctactcaggaggctgaagcaggagaactgcttgaacccaggaggtggagagttgaggtcacgccattgcactccagcctgggagacaagagcgaaactccgtctcaaaaaaaaaaaaaaaaaagacactatgcttagttagcctctttcatgcatgtgctcagtgtctccgtgtgccaggcactgaactaagcattgtgtatataaaagaaacagcacacatttccaaccttaaaaggctttcaggatgtgcatctttgaaatatctaagaacttttggcatttatattccagtattagccctttaagcctgtgttttcttaaaagactttattgtatttcatttgatcattttatatatgttaatgtgaacgactggaactttaacaaatatttaatctgctttcacctctttctttttgggcaatggagaatacttcctatggctttaagccttggccatatgacttgttttggctagtggaatataagctgacgtgatgtaaggagggatttaaatttaattgcatagtttgacttgcctccggtactcctgctatttcatgtaattaaaacatattctgggtggctacaactcactcagcctgggtcccagagaaagatacatggtgcagacttaaaccctagccacagtcagcagtcaagaacagcctgaaaaagcccaaaccagctcagctgaaccttagttgacctttacacctatgctaacaaatgcttgttaccgaaagctgctgaattttagcatggtttgttacacagcattattacagcaatagctgatgaatacacttggtaagttttcagtcaagttaacaatttagagactcatagcattttggatgcttccagcaactggggtggagtctcaccaacttctctctctctctatgcatacacacacacacacacagagaaaaaggtttaaggaaagaggataaaatgggagacatgaataggcttatattgtttaatactcaaaaaattagttcaggacagatattgagtctttatgttctgggatgatgatataaaagaggtacaaaaagtcaggaaattcgtggctatatctctgacttttacctgtattgaaaaggtatgtattcaaggcctgagaccatttgatggacaccttaccatggagaaaactgtcattaagtccaattctagctgccaatcctgggataacctgccttctaccctgttcttttctgttacccttgttttatgttctatcataatagaggtgctaagcagtttaaaattccatgaatatatggtccctaaaacttacaatctcctttctacctatgtggtttttaaaaatcatagtcaacaacagttaaataatggccacaaaacaaatcttctagaaaaggcacacacttaactagaataaaatttcaactacaattgaaagtaaccaactcctgtcactaggtggcagtcacaataaagtcatcccttggtgggagggattggttccaggacctgaggatactaaaatccgtgagtccttatatataaatggtgtagcatttgtgtataacctatgcatatcctactaaatcacctctagattacttataataaatacctaatacaacgtcaatgctatgtaaatacttatcttttttatttgtatgatgttttggtatttttttcccaaatgtttccaatctgaggctagttggatttgcaaatgcagaatccgagaatacagatggtcaattgtacttcatactgaaactcgaagtttgctatcaagtgccacagcaagacttgaaggattgggtatggaggggaggctggggagagacaaggatgagccaaactgaaacaaccacttttccttgatttgaaaagtggactagtatggatatggtaactagctgagaaatatcagaacaaataagaggaacttccaatctgatgttactaaaaaagttaaaagtgtcccaacagacctccagttgttaaaggttcacattttttagctccctcctaagcctatgtaacaatgaaaattataacataaagcaagtaaaagacacagacaagtaccaaagcagaattacgtatttcagaaatagaaatgggacaaaccagtaagtggcacttcaggcctgaagctctggcctgctgtgccccagttcctctggcaggcagggcaggcaggacatcctggagtcaagttactgcagagtaacagggactgacagcactaacgtggggcaggaagccaggcccagacttgttgcctagaaaaagggactgagacacagctgtagttcccagatgggaaagggaagttggaagaggttgtcaactgctgcctgggggtcttggctggggcacagtggctccagcctgtaatccctgtgttttgggtggcagagggtgggaggatctcctgaggccagaagttctaggtggaagtgagctatgatcgcaccactgcactccagcctgggtgacagagcaagaccctgatccccctcccccacccaaaaaaaaaaaaaaaaaagaaaaaaaagaccaaacctcaaatccatctatccctgtcaccagccgactaaatctgcaacattcacataccacctcaggctagtgaacccaatacgctattataagagcgacttagtctgggggtcttacctggtaagacaactgcaaaacaaataagggtaaaggggaaggggagggggaaacttaaaaaaaaaatcatcctatagatcacgagccttcaagccaaactttcaaaacataagaagaaacctaagcatcgagatagataacacaatcaacaattgaaacatgacatcacccaatgcaaatttaaatcttaaacatatgaaaatattttagtaatgtttagaatccttaccaaaataaaggcaagaataataatcatcataaacaataatgatagtagcaacacactaagagacaagaaacaatagtaggtgattgtaaaattctgatatattagaaacaaaatactcaacagacattgaaataaaaggtgcaaaagcttaataaactcaggtacagtcaaggaaggagtttgtgagtaaaagatactgaataattaattgaaagtgcagcatggtgcaagaaaggataataggaaagagcaaatactgaagagaccctggcattgacacagtgatagaaaaaaataccaaaaaatagagtacaaaaggaagcatataaataaagccaagcaacatatggaaacataatacgtgatttgaggttgcattgaaatttgtgggggagggatagactatttttttaaagccacatttaagaaaaatattcatacttcaaaaccattcacaagaatcacttttagtgattcagctatattaaaatataccagaatcgtgtctgttgaaagatggcaggagaaactgataagccacataaatggagaagacatttgcaaagcatataaccaataaaatgttagcatccagaataaagaaatcctataaataaataaaaaggatagcaaccattagaaaaatgaacaaaaggacagtaaatttatggaagataaactccaaatggctaataaacatataaacatacaaaaagacacaatctcacttgtcctcaggacagcgcaaattaaaactacagggaatactatttcacacctatcagatttttttttttttttttttttttttttttttttttttttgagatgtggagtctcgctctgtcgcccaggctggagtgcagtgacgtgatctcggctcactgcaagctccgcctactgggttcatgccattctcctgcctcagcgtcctgagtagccaggactacaggcgtccgccaccacgcctggctaattttttgtatttttagtagagacggggtttcaccgtgttagccaggatggtctcgatttcctgacctcgcaatccgcccacctcggcctcccaaagtgctgggattacaggtgtgagccaccacgcctggcccagatttaaaaatattaattagtctgctaatactaactgctggtgagaatgcattagaattccacacattgttgatgggagcattaactgcaacaatcactttagagaacattttgacaatatctaccaaatgtaaaggcgcacataagtaaaatcagaaattctactctaatgttcatcctctagtgaagcatttacacattaatacaaatattaaaaagaacactatggaaccattgtttctaacagtgaaaaataggaataaacttaaatttccatcaccagcactacagacaagcaattaagatgtacattcactcagagtgatattatgcagatattaacatgaatgaaatagagctatacatacgaatgcagataaatctaacaaacattattttgagagaaaaagctgccaaaaaatacatagtggaagccattttgtagactcatgaaatacataaaaaccatactatccactgttttgagactttatacattattgttataagtataaaacatgggattaataacaattttacccaagtggctggggtagggcatatagaaggcttcaaatatatttgtaatgttttatttcctaagttaagtagtgagtataatcatgaagttgaacacaactaacataatacacttaaaatctatgaagcaaaagaagctgagagaaattcaataacaaaattaatcaaaatgatatgaaatatccctctaccagaaatagatcaagcaaataaaaacataatgactgacacaatcaacaatcttgattatatataccccagaaccaacaaatcaacatgtatctttttcaggaacatatattttcaaaatatatcactgacatatttgcaaaaaattgatgattcacaaagaaaacctttcaaaaattcttcaaatactgtcacacaggccatgcaaaagtaatgctttctataatgcaattaaattaaaatccacaataaaatgataagctaaaaacaattaaaagaaactttaaaaacctaaaattaacaaatctatttcagcaatttgtgaaacccaaccaaccaacaaagcaattatgcggcgtttgttctaagaatgtaggaactatatattatctgaaaatttatcagtggtatctcacattaacatactaatggagaaaacctattgtatctcaaaatctcaaaatgatacagaatgacacagataaggctccacatcattctttgattttaaaaagaaaaaaatcttcttagctaagttagaatagaagagaatcagattcagaatatctttcaagaactttcaacaaactttgaaagtaacgggaaaacttcaggaggcacgatttaaaatgcacaccattacccacattttcctacattaaactagaggcgtgagataatgtgctaagaaaagagatgtaagaattggaaaagaagagataaaactggtaatgtttacaatgatatggctctcaaaacttacactgtgacagcatctgaatggggtttaaaaaacccatgctatatattgcttaggcatacacacacacacacacacacacacacacacacacacagaggttgattgtaaacagcaacccacagagttctgcatggtggtagccacacatgaatgctgggagagttaatcatctctggggaaagaggcagagaaattgaataaagggaggtaacaaaaggggcctcaacactggttttaaaaatctaaagaaaatatgataaaaagcttaagtatagatggttaatatataaatactaactctactttattctatttgtttgaaattattcaggatccttctttataaacattagaggatacgtccaaattttcacacacacacacacacacacacacacacttctgtttataagactaggtttagccttataatcagtgaggaaaaaattgcctacctcaaacagaatgtacactcaaacaatatataaagtacttgtaagaaaaagcatattcctcatataatacatatatgattttatatcatgattatataatgcatatataagcattggttgacttgactgaaaatggtagaagaatctctgtccttagcttgtgctttgactcagtaactgacagagccttttatttaaagctgacaaaatgaacctcaggagagagaggtgaaggtcagtctcttaagaggcaggtgaaagtcagccagatttaactcgacagagagtggaattttctagtaaaccaggccagacaagtacccaggaggccaggctacctgcccaggtttctaagggagacaggacacttgcatttcccacgtggtggaaaagtactccaaaatatgtaacatattgcagctgtcactgggcttactgcctctaagaataaggtcctattttgcattgctcctaccattcaaaatttaagatctgaatttgtgtggagtgtgggggtgctgtttttaaatctgcatctctcaatcctaacactaaagacaagaaagcctaacagacatattttttttttaatgcaaaagtttggaatagaaaactaagaaacagcttcctatagaaatatgggaagaggtaagctcacatcaagagtacacaggccagaaaatacggacagcactctggtcttctagtccagaagcctagcccatacctccacagggtgccaggagatatgagctatacctattttctattttaatttagaaaataaaagtacagggtgctcagttaaatgtaaacttcagaataataacagataattttttagtataagtgtgtcccattcaatatttgaaatatactaagtaattactcattcactcagttcacatcttgtgttttatctggcaactctaggaactcttaagtattcttagtgagaactgtatgcaatgggccaggaatttaaagaaattggggactacatttgcacacaggtggaaacagagccaactagaatcacggacagccagaaacactagttttagacatttcagtttaacgtgcccttttcaaatcttctggggttttgttgttgctttatggtagtagttttagctttgtttttcccccaagtaatctgatctttcctgataaccgactttctcataactgatacagtgagaaacgatctagtgttcaaagtgaacgggataaacaataaaagaacaaatgaaatggagacaacacacacacacgaatatacatacacagcacctgttgtcccttcttgtagagggttagaaatatgacagacaagagcatatgaagaaaagcacacactgattcacagccaaaatacagttgctgctcaaaggttgtactaacaggcttctgaaaatcagtcatccacatctcaccacctgtgatcccgctacagtgttactagcatcaaaatgagaaaagatgaactggagaagcaaccagctcacttgggcaagtcaaaatttctccatgagccagcctatttaatccctacccccataaagcgtttattccagtggctttaaacattgactacatattacaatcacctggggaggtttaaaatttacttatgtctggattccagccctagacatagacttaattggcatgagatgcgtgttaggagctggaatttttaaaagctttccaggtgactctgatagacatccaaagtcaagaactgcatttgtaagttatccccaaacagtgacacctggggaaggccagaaagtgacacgtgtatatagattataaaaagtaagctcctacatttgactctcactccaagctctctgctatccaagttgataaggccacaaaagtgaactttgcagtgagccaagagctaatataaaggaactgggttcttccttaccctacacaagttgccctgaaattctagcaactggaaataatgctcaaatgctggaaaaaacatataaagaactacagaggaaaaaataaaaataaaaataaaaataaataaataaataaaaatttttaaaaaggcaagatacttttggaaatcccactttactggcaaaactcaagataatctgtgagatcatttttgaaatgcaccatctgggcagcatgtgaaggatatcagctcatttcatagaaatgttcggtttcatctggtagcaaacctcaaggggctgctggccacgtgccctatccaatctctggggtagaacctggtcagaaaacacattcttcttccccagatgccccagtctgaggctcaaggcaaactcttgattaactctaatacagaaacaaaatacttcttaagtttcttcaaatgctccctccctcctattgatccgacgctagtccaaacaacaagtcattttcactagtttgaaaataataaaatagaaaacagataaatttgccaccacaaaaagaacacaacttcctggtttctgtgacaagtaagaatgtttcacctaagaaatgacattgtcagaagtaatatctatctgcaaattgaagctgatttgaagaaatacacttaaataataccataaaaatcagaatcttaaggacagagtctcagaggtcacttagactaacccccttcctcaaaatacataaagaaactaagaaatgaatacccaaataaactgactcattcgatttatagcatagagaatctcagctccatatgcaggtggaaacacattttatgaacacacaaggaaaaaaaaaatcacatggctgttcagcagagcacaggtctcctgacctttctaatatattttctaccatactctgaagcctctttatggcttttaaatgaggtcaaatgctcagggtaaagggagagagagagagaactagatgttctgagggagatggaaaatacttgaaatagcagctgttgagagtcgcgtgtagactaggaacacacgctagggatggaggacctgtttgtaactagaaaccacaaatccacacagtggcagaaccttgacagttgtattagttttcctcaatagcttttgtagtccagacaagggtaggaagagccaaacgtttggatctctcaagactagggtttaccacatggctgctatagaaggcaatggggtaaagaaatcaaagatatcaccgagaatgcagcattaaagaatctcagtgtctcagagaaggaagtgaagacagcaagagctgacagacacagagaaaaagatgtctggagttaagcccctgaggaagaagggatctgtggtttgggagaactgtgggaaaaagccagaatgatagaagttggtaggtagaaacaggaatgttataatttatcttttcaaaggccaggtgcggtggctcacgcctgtaatcccagcactttcggagaccgaggcaggcagatcatgaggtcaagagatcaagaccatcctggctaacagggtgaaaccccgtctctactaaaaatacaaaaaaaatagctgggcgtggtggcgggtacctgtagtcccagctactcgggaggccgaggcaggagaatggcgtgaacccgggaggcaaagcttgcagccagctgagattgcaccactgcactccagcctgggcgacagagcaagactccgtctcaaaaataaacaaacaaaaaactaaaactgtgttaagtaaatataagagccagaatgtagatgcagatagtattagctgactgaaatggaaaagaatcaccactggaagtgaggagaggccggaatttggaatgggttatcccagtgttcattaaaagaaaatagagaccagagacctggtaggtcaagagatgaatgtgaccggaaaagttcatcttgaaagtcacataatgtattcctgaatccccaaagaactgaaaaatcacgtcactctgtggatctacgttctgacttactgaagttttgtgttaagagctctcacaatacaaggataagcggcttgcaataaatatgccttattggtttaatggggacattaggatctggtttcagtcacaaaaccaaacaaatgataacactaaaatagaattttatattgccaaaccatgttttaatgtttacaaatgccctatttcttcatatacaagaacaccactgattctaagatgcatcagtatttacataccgaaaagaaagtaaaactgctgttagttataattgtaaaatgcccattgtaaaacacatcctaatttcaggtgtagaaaatgtgtattatacattagataaaatatataaactcaaataatctatataaaccttatgtgggagtttttttattaatatactttaagttctggaacacatgtacagaatgtgcaggtttattacataggtatacacgtgccatggtggtttgctgcacccatgaaccggtcatctacattgggtatttctcctaatgctgtccctcccctagctccccaccccaccccccgacaggccctggtgtgcaatgttcccctccctgtgtccatgtgttctcattgttcaactccctgtgtgggaattattattattattattaccacatccgtgttagaagtaaaaaagatcaaggcacaaacagcttaaatggttgcccaagcttacacaggtaataagaaatacagccaggattcgaacccaggaagcctaactccagaatctatatactcttaatgtccacagcatactatccaaactcaataaatgtccatcgaggaagacaaaaaaccatcatgatacacaagcctaagctttctaccatcaggaggagccagcactgtggagagggtctgcttctgatgcacctgagagcacaaacttcacagaggacttgcaatccacagggcagatctgactcaggcccagtcctctccagaggagctgccccaattagtggtttcctgaaatacagacctcgtggcatgaccagtcagcaccaattcatccccacccacaggtttttttccacttggccattactatccccattaaacctttagcaatatgtactcgtcctcttcttccagttgtcatcatatgcttcatttcatgaaggcaactcctggagccgcgttcacagctgtcccaaataaaggagccacagctgaataagcagccagatgcatccagccatcaggtgatacagcctcaggctgctccattccctctggctctcacgactggcaagctggagggccaggctcatgaaattcacatattcccactgactgcattagttactgtggtaacagatgtcacagaaataggaagtcacagtcatcaagtttctatgtcctataaatatatgaacaaatgttcaaccttgttggtaaacaaataaatattgataaagcagtaatgtatcaattttttgtctacttgtttccaaaatgttttcacatttttatgtcatgaaacccgatgttgtctaaaaatcaataaatgtaatcatgaagtgttacaatcattaacaacaaaaataataattactactgctagaactgttgctaatattaacagttatcgtatgtgttctacgaaccaggaattgtgctaagcattttacctgacttactttctctaatccatggaggttttaaccatagtattccacttgtaggacacttagggtcattagttaggaaagagaaaagcagactaccttttgggaggttgatttggtagctggcatgcaacactaaacgagtacatcatggttttaatgactcattcgttgaatccccctccaataaattctggaatatgttcaaagatgtagatgcaagtattcattacaatgttatttcaatagcaaaaataaatattagcttaaaggttcaaaaacattgaatttcttaaatattatccattaatcttgtaatactccatagttattaaaaagttaagtgaattattttcttctgtttgtgtgtatgcccttgtattttctaatttttctacagaaaactacagatactcctcaacttacattggggttatgtcctgataaactgattgtaaagtcaaaaaatcattaagtcaaaccatcatatgtagaggaccatctctggtgttatttgcacaattaaaataacttatacaaagtattccaggtttatgagcataaccctcggttccaatcaagcattgatgagttgatttcactttacagacagatcatgactactgtagatggagtcacagagctgacgcagtaaagccacacaattaagacaaccgattccatacccagaaggcctggttcaaatcctagctaccatttacaagcagtgggacctgggggggttattttactactgtgtcttgtttcttcatctatatatgggaataatggtgattcctacttcgcaaggtcattgtgaggtttagagttattaagtatttgttcaacgcttagagaagtgcctggcatataggcatgcagtattacatatggctagctgctgttttactattactgtttcgttttcgtttgttttttgtttttaaatggagtctcgctctgtcgcccaggatggagtgcagtggtacgatctcggctcactgcaagctctgcctcctgggttcacgccattctcctgcctcagcctcccgagtagctgggactacaggtgcccgccaccacacgcggctaattttttgtatttttagtagagacggggtttcaccgtgttagccaggatagtcttgatctcctgaccttgtgatccgcccacctcagcctcccaaagtgctgggattacaggcgtgagccaccacgcctggctcatcttcgctcttaactgataactttgcttccaacttcactgatgaaactgaagaacttgcacatcctcccgcctaccacagtccctgtccttggacctattactagaggtggttgtccactttcctatcaaacccaacccctttcttagtacagaagctcttatccctcttactttcttgaaagtatcactctaggtcttccctcttcctacatcaaattttccctctctaccagaaccttctttctggcatacaaaaatgtctttattttttccaccttaattaaaacaaaatgaaatctttcatttgatcgtatttgtcccaccagctacctcatggttttttttttttgttcctttgtagcaaaatctctcaaagtcacctacatactgtctccaattatcattctcttttaaacccactccaaattaaacttttatcccgacacctccaatactctttcattgagaagatcacagtattgtccaggcttccaaattcaatggttaattctcactccttacttcatttgctctatcacgcggcacactccctctctgatacactttcctcacgtagcattcagagctccgtagtctcttagttctcctcctgcctcactggaggctttctcatttctcctcttcatctcagtctctttctgttgcaggtcccctgggtcagtcctggttcttcttctcctctacgttcaccatctcatccagtctcaaagttttaaacaccagttttacatgtacaaatgactccccaatatacatctagagctcagagctccgtttcccaatgccacactcataaatccaaatgtctgctcaacacttcctcatacatgtcaaattgacatctcaagtttaacatatcagaaatgatgcctaatcttccccctaaacatgctccacccacggtcatcttctccagtccatggcaattccatgcttctattgctcaggtcaaataccctgacgtcccagcactttgggaggccaagggttccaggaagactgcttgagcctaggagtttgagaccagcctgggcaacatagaagaccttatttctactaaaagtaaaaaaaaaattagcttggcatagtgtcatgcgcctgtagtcccagctactaaggaagctgaggcagaaggactgcttgagcccagcaggcctaggctgcagtgagctgtgattgcaccactgcactctagcctgggcaacagagagagaccttgtctcaaaacaaataaaacccctgatgtcatcccttactcttctccctgacctccaacagatcaggaaatcctgatggttctgcctcaaaaatccagaatctgattttttttttactacctccatcactacaactacagtccaagccaccacctcctgtgcaaatataatctcttgcctgtattaccataatgatttccttgtaattgctttcctgggcctacttaccctccacaccccctgtgccctcaatctccagttcaacaaagcagccagagggagtctttgcaaatactaggaagatcacatcatgcctctgctcaacattctctaacagctccccatttcacccaacacaaaagccaatctcaaacaatatcctataatgttctaaatcaagggttccttactctgtttgcaccatggattccttttgacagatggcaaaacctacggacccctttctcagaaaaacgtgttttaaatttacaaaataaattacaacaggttacagagagaaccaattcaggtgtcaacatatttttaattgtgatacacatacatatgtactcctttattatcacattaaataacaggatctagtggcaggtgtaaaacctaacataattttgaaatggctctaaacatattttaagatatccacaacaactataacgtgatgtgacagtatctgtgatttcctattgctgacaaagtcatagtctatctatattcatgatggaggaaaatgctaaattttagttagctacgattaaaataaaaaatgatttttttcctatctacattcgatagacccctgaattctgtctacggatgccttagaggtccttagatcccagataaagaacatctggctctgcactgcttctgggagctgttctcctagctaactgctttactgctccagtcatgtacaccacagcactcccaatctgtactcacagcctttgcactggctgttcccttttcctacattcccttacctctccctcttttcttatttggttgctcaaatgtcaacttctcagtgaggcctgcctgccctaaccatcctatttaaaactgcaaccagccctgctatcacaatctcaatcccctgcagcctcttttcttttccatagcatctatccccatctaatatactacacaatgtatttactatgtgctatgatttcactgccccctccaaaactcatgttaaaacatagcccacaatgtggcaatattttgagaggcagggcctttaagaggtgattcgatcagacagccctgacctcatgaatagattaatttattcacggattaatgggttagtgggttaatggactgtcataggagggaagctggtggctttataagaagaggaagagagacctgtgtttgcatgttagcacactcagccccttcaccataccccacaccacctcgggactcctcagcaagaaggctcttaccagatggggtaccttgatcttgaacttctcagcctccataactgcatggaataaatctcttttctttatgaattactcagagtcaggtatcctgttataagcgacatacaacaggctaaaacatgctaagacactacatttctttattgtgtccttaagggcagaaccgtttttctgctttgatacagtgatgtaattcaaatgcctagaagagagcctggtgtgtaggagatactcaagcaatacttcttaataaatgtatacacttgaaataaaattatttgatgagtgcctactatatgacatacttccttcacacataattccatgtaggaataccatgctataaggttttatacattaattatcactgtatatttaatatttacttatttctgttcattccaaagtgaatcctcattcaagtacttagaaatgtccctatatttatgctgaaagaaattagcatggctcccaatgagagctgagatttctgtcagtttaatggtacacaatattggttctggagctaacttccagggttcaaatagtattgactcctctctttactagctttgcagaccaagtagagtttaaaatttctctaagctacaatatctttatcagcaaaatatggataattacctacttcacagggttataataagtattaaaatttaattatttaatccatgtagagcatttagctcatttccaagggcttggcagatgaaaaacacaacgttcagtattgcttgtattatcatcaacgaaacatgaaaatactcacagtgcaagtgccagaatatccatttgtaccatttgagtgcctagtatcctttctcttagaaataaattcatttggcaaatatttttaaattataaaagcaatgagagcatactctatagaatttaggagacaaaggagaatccacccttctaagacacttagcattctgctatatttccttttgttcttttttcctatacacctttatcagtgattcacatctgatttcaaaattgacctggaactcttcagttatgacttcctcaatttctgatccttattataaattatcaaataaaataaattaacagaactcacagttctttcttgctgactcaggccagtcccagagtttgagatgatctgctaggacctcagacaaacacactggacggttttccaggtacatcacaacaggacagaatttttttgtccctggtagagatgcttacagttcccagtctcctgcacagcctcattccttcaaatactctacagctgatctgagtttgggtgaggaggggaaaataaggtgagagatttggggaaggaatacaaaattttgtcggagagcctgtatagactggggctgactccacaggtggaggggtggggtggcgagagaaggcaagttagtgggaagggagttgttggagcaggctcatatatgagggaactggctgtgtcctttgtaaccttaggctctggttataaccactgaaaaccaggcagcaagccacagtgaaagaaaatttgccatgacctggggaaagataaacagcattgacacttttgtagaaaggagccagccactttcacttgctttgccacacagaactgactcaataaatgtcagctgtaatcatgcacattccaggaatctacatttttaacattgtcacaggtgattcggatacagtatttttcaaagtataaactagaacggtgttcttcaaactcttttgcttaaacacttactaagatttttctgaaaaataacatgcatatttttaagttgacatccaaaacttttaattttcagtctaaaaagctgcaaagaataaattctgagtttatgaatactgataccttaaaataaaactattatggttgggtgtggtggctcacgcctataaccataccttgggaggccaaggcaggcagatcacttggtgtcaggagtttgaggccagcctggccaacacggtaaaaccccatctctactaaaaatattatacaaaaattagccaggagcagtggtgcatgcctgtaatcccagctactggggaggctgaggcaggagaatcgcttctatccaggaggaagaggtagcagtgagccgagatcgcaccactgcactccagcctgggcgacagagtgagactccgcctcaaacagtaaaataaaataaaaaataaataaactattacatccctcttttaaatgtagctaattgaatctaagaacactgatttgccgccctgcatcttctgtgtttaaaaatggtgtgacctaatttggagttaacattcagaagttttacatggttctttttcatcccttcaaacgtttcaattttatttttttccatggaattcattgaaaagtaacacagttttatgcttgaatattttctattaatcaccctgtcattatttctgtgggatgcaaatagtaaataagttgttaaaatgtcctgtcatcaaaagaattttaattttaggtttacttctggactgagttataatttttattgcatctaacctatgaaaacaacacgtaagatttaataattagtcaacataaaacaggcgtgttttgtattttaataaagaaggcttcccagataaattatttggaattatccttactttaagtccctgggagtctttacacttgagcaaagtatcatagactcatttggaatgggtgagactttcacctgttgttggaaattggatggaagttccatttaaactaaagagtactaatggaagctgaggatctggaaaagaatttgctcaaaattatccagggttccacgattttctttggagtttccttctgtgtcccccactttgaagacttctaatgtagcaccctcctatatacaaaatgtgtgggtatcttgttaaaaaggcagattcacagactccctccagatatctgaattaaaacaggctccccagattatttttgtttccccactgaagactgagaaaaactgaattgggggataaaacaaacacacacgatgttaaacaatatagtaagatttaaataaaaattcaataaaagagctatcatagtcattatctgattgtcaaaaaattcagaaaaggtaatgggaaagtgagatagccaaagcctttataaaggaagcaaaactggaactgagggaagggtgggtagaattcgaaagataaaggaacagagataattatttaccaaggttgacaggtatgagatattaatttgttggctagattggagcagtcaatgcccttagaaagtatgtgtggctcatcacagagaccctggtagaatagcagtgggtgattttgtctaagtgtagcaaatatgataattacttgttaaaaacataataggttattgaggaaacttattttttatgtaaattgttattagacagctggttttatgaaacgttctgctggaaaattgacctagagctgaatgtatattttacccaagcactggataaactataaaaataataaagactactatatatcacttttaagccctacatctgccccaggccaggcaaataaattagtgtaaattcaaattatctccttctgttcttttaatagccctgacaataggcttagcaagaaaagaggtatgagccatcacctaaaatgaaaccaagaatatctactgatttttattatctctgattccattaccactcggtgtcatgaataataaagattttgaatgtatctgttcataagaaaatagaagtcattggttgcctctatcatctctcctctggactactattagaaaccccaaactggccttcctacttccccactgccgccactcaccttcctcccagactcatatccatccttggtatttctagaggagtcttacagtgttattcccttgcctaaaacctttcagtggctcccccagctgtctacagtccaaagtgctcagcatggcatgccataatctccctccccatggaagacgtggcaccatcccaatctacaggcataatgcccttgtgtatcatttgctttgtctcatgtatatcattcataataaactaaaaacaagtgctactctgtctttgctctgcatgtttgctctaccctgcctctatctgacttactcaaactattgtctccccaagtcagctccggaagcctgtcctaattacttatgtaggactgatgacagtctcctttgtgttccactatatgctaatcactctttctataaccgcacctagaatgtttgattgaacttatttgtgtatttgtaaacattccacctctcccaaccctactctctgtcacctaacccaccttcacagtggcaaaaacaacaaaacagaaaaaaaccattaagtgcttgattccaagtacctgtcaaacttagcagaacctagtagatgcttagtaaatatttgctacataaatgattattatttataacagtggaattaataacagcaccaatgaattagacactaataatatgctaggtattactaaataagagttagatatgatctgggagcaatggtgactctgatgtcacagccatttacttgcaatgtctaagattacaccaccagatagaatatgtgctctaacaaaatcaagggaaatcccccaggagtcatcctagccatgctatgtagctcaacatacaatagcatcttttttatcgaagttcacttctacttatcttgaatagtggtacaatgaaggagtcttcacattaaaataacttcagagattagcacagaggacagatctgaaaaccatttgttattgtttctattttaacaaatctagtgctctactacagagtcactggatactttggtacttaaaatacagaaaatgtctccagtttcctttagttcgccttatcttgaattcaaaaggttgattattttgggctaaggcttttccttatttaaaatggccagaaaaatcagcaagtcaaattcagcatttcatcatgaccaaataaaactcatgtcaagaatgcagaggtggttctaataaatctaaaatataaatcactaaacagattgaaaaaaaaaaatcacatgagtcacatggtcatttcaaatataccagtaattaaataattaaattcaaactacttttcgtgaagaatactttgaagcctaggtctatgatagaagagtattaaccagaaatcttcaacccgtaacacctaactggaaaatatcagaaggaaacctttaaaatcaggagtaacacaataatgtctactattcacttcttgttcagctttcttttgacgttcctcaccagttaaaaaaaaaaaaaaaagactggaaaaaaatagttactattcacttctttttcagctttctttcgacgttcctcaccagtaaacaaaaaaaaaaaagactggaaaaaaatagttaacaatttgtgttttattttctaatgtttacaatctgattaaaaaataggcaaaggacttcaatagacctttcttccaagaagacatacaaatggctaataagcaaatgaaaagatgctcaaccttactaatcattagaggaatgaaaatcaaaaccacatcatctcatacccattaaaacggctattaaaaaaaaacggtaaataagtgttgtcaaggatatgaaaaaattagaacccttgtgcatgattggcagaaatataaatgagggaagatggaagtggcagttgtttaatgcacatagtgtcagttttgcaaaatgaaaaattctggagaaccattgtacaacaatatgaacatacactactgaactatgcaattaaaaatgggaaagatagtaaatttcacagtgttttttttcaccacagctaaaaataaattttaaatcattaagatagtaaacttcatgttatgtatattttaccacaataaaaattaaaaaataaaacataaattgtcatgatgtctacctaaaaaaaatccaatgctctccattgaaaagctagaactaataagagcataaagtcagaattaatagaaacataaaaatcaattgctttggtatataaataaaaccaatgagaaaaaataatgagaaaaatcccatttacaatcaaatatccagaaataaatctaagtgtgcaaaagctataagaagaaaatggtacaagtttactgaaggtcataaaagaaatcttgcagaggcaagttatgctcctggatgggaagacagcattataaggtttccttatattgatctataaatttaatagaattccagtaaaaattacaataggatcatttcatagctcttgagaaaatgaccttaaagctcatatacaagagtgtaagtgcctaagcatccaaacaaaatttagaggaaaaaaacaaattgaggtaatctgaatgatcagatatttaaataactttaaaactacattaattacaaaaacacagatttggcacaatgtttagagaaatacatcagccaaaaatgataaaaggtctatacacagatcagcatataaaagtgatttataaacaagagtgttggtactacacagtctcagagcaagagtgaaggatttagtaaatggtgttggggcaactggtgaacaatttgggaaaaacaaaactgataataacagcttacattactttggtttcacaaggagccagaactatatcattaaatacagaaaagaaccccccaactttttttttttaaacaaaacacatccctgaggcacaaaagggaattaatttgcccagagtcacacagccagtagctgctgaagcctaaaatttgattccatgtcatgggattccatagccccagctccccaatcattataacacactgctaccccttaacatatccttatccataacacaaaaacaaataatggaagcgaaatctaaacatatgcgtgtatatttaaatacagacagtccctgactcaaaatggtttgacttatgatgatttttcaggtttacaatggtgcgaaaatggtaggcattggtagaaactgtactttgaattttgatctcttccctggttagcgctatgtagtacaatacccttttgagaagctgagcagcgagccatggtgcccaatcacaggatcacgaaagtcaacaactgttaaatcaactttagcctaaagctgcctcctccttacgttttcatgtcttaaatgtttttctatacatcatgaactataacaaatggaggtgtaaaccgactgtagcccacacctgtgccaatcactgaattttggccagtcaaatgtagccaactgttctgtgttcaaataagacaaatgccgagctgtaaccaacccagttgttcctgtgtctcacttccatttcctgtacatcacttgccttttgccgtctataactcttgttccaccatgtggctgcgcaagaatctctctaaatctgctgtgattctggggactccctgattcacgaattgttcattgctcaattaaactcctttaactttaatttggctgaagtttttttaacagatggtgtcagaagtgggataaaaagtggcacccaggagtactgtgtaaacaagcaaggtactgatggcagcggcggcctatatggagcggccactgccatgatgctggctgcagttggggaggcatggccagggctacatgctccatgcagccagtgggagccaggaacaggcagaagccccaccccttctaagttggcagggcacagctgcagctgcccagccatggctgtggaaccaggcatccccatgctcttgagggccagaagcagacaaaagccccgccctcctgggtgcagctgcagctgcccaagccatggctgtggacctgggcatctctgcactctcagggacccaggaagtccccctttccctacaggctcaaaggtgcctgctcccactgcccagcctctcccctattctggcacctgctctaatctcagtgcacagttgagaccaagcccaggcattgtcataacctagttgggtatctacacattcagggcagtgctgacatgccagccccctggggccttggtgccctcaagactttgggcaccaatgagcatgggatggaggctgaggaggggctgagggcagcttagcattggcctgcaggtgccccttggcacaaacactctaggttccatgaacagtggcaagaggcagacaggttcctgggtgaaaaggggtaggtccctagtgaggccccaccttcaagctggggaaggtctgaagcctggaggttgggctgccagtcccacagagcacagtgggaacttatgatgctttttccaggcccacctatggccacccatggaccaatcagcatgtatttcctctcctccgaagcccataaaatcccagactcagccagactcaaaaagggacaacaggacaaccatctgtggagagaaactacccaccaaagggtctcctctctgtgagagctgagaagatgacaggatgacctgcctgcggagaggaactactcaccccaggatctcctctctgctgagagctgaaaagggatgagaggatgaccagctgcagagaggagctacccaccccagggtcacctctctactgagagctgaaaggggatgatgagatgaccagctgcaggagctacacacccaagggtcttctctctgctgagagctgaaaagacgacaggatgaccagctgtacagaggagctacccactgtaggtctcctctgagctgctctattgttcaataaagctcctctacaccttgctcccccctccacttgtccatatacctcattcttcctgttgtgagacaagaacttgggacctgccaaatggcagggctgaaagagctgtaacacaaacagggctgaaacatgccccttgcttgccacattgtgggtgacaaggaggagagaaaagagctgccacccttcagggagcccagacctaggagctccccaagccagggctgtgacacctgctttggggctctgcagtttctggcttctcccaagattccaggtgccaccgcattccctgatgccagccgtggaagctgcttgtggtacatagtccagccatagcctcgcagggagtcagcacccatgctcgcacctggagctgcccatcccgctgcagccagcatgcctggctgtgggcagtggctggaccccatgctcacttgtttacacaccctatgccactccacttgcccttggtaggcatggagtccaggccagtagcacctcccgagggcagcctgccaggctgagtgggacctgcagtccagagcaaaactcaggcaaaagcacccctggccacagaggtttctggctgttaagaaatatcccaaaaatcctgtaattgtatctgctggacccacttgtctcctttgatctctcagaggggctggggattgcagtaagttgcctcttggatttcagagctccatggacttatgttttgagctatccaagtttcttcatgcaaatttctgttccaaactggatttggaagccgtgacagaaactggactgggtccaggattgaatctgatctggtaattaactggcttggatccagttagaggccctgtacaactcactgggtcagaaagaaactggtagtaaatggtaatactgcaggggttgaaaagtttggcttttgaaaattcacagggatttttgtgttctaaccctttgtttcatttttcgtgcacatgtaggtaggaaaaaaaatcattggctaaattaatcaagggaacctgaaaacaaagccaatatttcaaataaaaacgggatcccttctgcctgccttggcatcccaaagtgctgggattacaggcgtgagccatcaggcttaaggctcatttttcactgattttcttgatctggcatttaattatgaaataataaaagattcatggatattgttcttgccttgctgaaatggtattagctaagattttaatttattattactgttatataaaatgtatattatatcacatataaatatatattagttctatacttgtgaaaatatcaatctctagagaaatcattcgaataaaaatgtcctcatgtcaaaaaaagaaaattgggatccttaatatctggaaaactgagttccttccagcttacacattaggcctgggaagcagcgagtcttacagaaatggcaaaatgttaataaagataactcacagtgcaatgttctgaatgaacaatgcactgaagtgcatttgaaaatgagggttcccaaattagtctcatctagggatgcctattaatatgcagaagcttctaaaaagatttagaaatgacaggacccatctggggagaagtttgacacttgccagtttgatactgcgtgctaagcagaatggctaatgtctatgttttgtcacaagtattttgctctggccagaaagaaaaatgctaatttggttactctatgcaaccccttggtcagcaacttgcaaaattgaggatgttgcttgcctgtggtttcataatttttctttgtgatgcaggatggaccccagagctatggtatggcaaacagggttgctgggctctcttagggaaagagaacccagaaacctgacatactggcaaaaacgataagaatttcttacaagtcagacttctggtctctctctctgtgcaaactggttgaatgaatggtaaaaatcactgtttatcccctgtaaacttttgattaatggaaaaaatgatttctgaggctagtcaagctgtagccaatctggtgtggtttgtgtgtctttctgcacggttctatcataaggaagaataccgtaggataaaacatgggcttagaacctcataaacccgctgttcaagccagtctggcaaactggtcagtaacaaactttgctgcagttccctgaaacaagcaaaaaactggatgagatctccattttgttttatgtccttgggaacttgatcttgtaaccacatggcagtattttcttttggtctctgacattttacaatggcggtctggcttaggaaatgagtactttctggttaatgtctgtgtggcctttaccatttgctgattcttttcccccaccatgagcatcttctagcttcccttcttatatcttcctttctcttagttacctttgaagattctagattttataaaaactgtttgccacctctttgaaagtacctcatagacttgtggttaagtcataaccttagttcaggcttcttgttttcacctgtgaggttacttttggcaaagtttaaaagcgagaaatattggccactttgtgtgcctaaagttgagtaataagatatttaaaaaaacttttataaacagtgctatatttaaaagtcagcttaattaaagcaaatactcaagttctaacagcctgggacaccttgggaaaagcagaggaagcaccacagaccctgttttgggaaaaacctctgttttcctcataaagcctcagaaattaaaagcaaatagatccctctcgaaatctaaggttttcttcggttttgcatggtgttagctgatgattttgagttatcaagggtatcaggaaatgactttgaagactcccatgggagatgggctgactccctctttttgaaatgcaggttctggtataaagatgggacccttaatttctgaagatctgttttgccttccagctgtgcctgcttattatattaggctgtagaaactgcatactttcctggccctattcctccaaggactccatcctaaagcaagtaatccaattaaaaaaaaacttagaaactagtaaatgaaaaatcttacaactattggatcttcttctgtctgagtagttatatatatatgtgcgcgtgtgtaatctttacataaaagagctctaatttgcttaaagaaaaataagtgcttaaatcaaatattttgaaaaaattaaaaactgtaatgccttttagttcctgtagctttggtaatctttgggaaataaaaagttttaaagattatgggtaaaataaaaatgtcttcaaaatgtaaacgtggtctaaattatgcaggtcagatattaggtttgttaaatgctttaaggtcataaactgcttcttcagcttttgaaaattgttcagttaacctattttggagcataagattctacataaggcctggggacatgtggaattagccatatcccttagctatgcaaagaagttataaagaaatgagattatatataagaaagaatcttgtatggtaaaatcttgtcctaaagtaaaataactggttatttaataagactgatgtttaggacaattcagaaagtccaggcatgttgtagatggtctttgtaagttgtgaaaggattcatgaaaggatatttatgcactaaaagtaaaagtttctaacagttaccattatatcatgtaattgagactactaaaaaaaaagttttacatgcaaggtgcgtaaagaaatacattagtctgttttcatgctgctgataaagatacactcgagactgggcaatttaccaaaaaaaaaaaaaaaaaaccaacagtttaatggacttacagttccacatggctgagaaggcctcacaatcatgacaaaaggcaaggaggagcaagtcacatctcacatggatggcggcaggcaaagagagagtttgtgcagggaaacttccacttataaaaccatcagatttcatgagacttactattatgagaagagcatgggaaggacctgcccccatgattcaactatctcccaccaggtccctcccacaacacatgggaattcaagataagatttgggtgaggacacagccaaactgtatcaggaaagtaaaaggtgcttttagtaaaagattaaaagaagtcatcaaaatgtggattttctttcctaaatttagacggttaaaggattgttttaaattaggtaagataaagctaaaggtttcaacaagttgtggaaggtttgtgaaaaattaatcttgtaaaaaattctctgtgtgaacctattggccagttaccatcattttgtgtgtcaaaacttggtgctaaggccctaagttttggtcacattgtaacctaagtgagaacctaaccagaaagggggaattttttttaaacaaaattatgggaggcccttgttttggacttagctcatgcattaggccccaacagacaaaaccaaacaaaaatgaagtcacttgtggtaaatgtgacattatcaaactgagactttaaggaaacacatagctcctagaccagaacagaccaggtttgttctcctaaaaacaagatgttccaacataaggggataccctctactcaagtccttgttcctacctttgcaaaactcacagttctgtttccagggggtttcaagaccaaattagtaatttatgatggtgatagtgatagtaatgactaaagttttggtcaatctctcaaaattgagaaaatgaccaaaagaggggaattgttaaatcaagtttagtctaaagctaccttcttacatatttaagttcagcctacaggtttttctatacatcgtgaactataacaagtggagatgtaaactgacctcagccaacacctgtgccaatcactgagttttagccaataaaatgtagccaactgtccaaatcgtgttcaaataaggcaaacactaagctctaattaatcccgttgcttctgtacttcacttatgttttctgtacgtcactttccttttgctgtctataattgttgttccaccacatggctgcactggagtctccctgattctgccatgattctaggggctgctcaattcacgaattgtttattgttcaattaaactcctttaaatttaattcagctgaagttttttcttttaacacaaccaatataaccattctatttttcacttctggtacagtattcaacaaattatattagatattcaacactttattacaaaataggctttgtgttcaatgattctgcccaactgttggctaaagtgtgttctgagcatatttaaggtaggcttggctaaggtgatgttcagtaggttaggcgtataacgtgtattttgacttacaatattctcaacttatgtttatcagaacataaccctattgtaagtcaagaagcatctgtatacatattgttaaactttaggttggaaaatgcttcctttagaccagatttcactacataaaacttttgtataatgaaagacaccatgaaagaagagtcatggcaagttagagcctaagattccaatacatacaatgataaaaggattttttttttaatacatagaaagcttcttcaaatcagtaagaaaaatgactaagaacctcattttcaaaaggaccaagaacaccaggaagctcataagaaatccaactggtcaataaatgaaaagatgtccaacaccacttatatcagaaaaatacaaatttaaaaaacagtgtgtgatttttaacccattacataggcataaattaaataaatgctggtgaagtatgagtaatgggcattctttctttggtttaatattctgagaggccaactgtgtagtatctaccaagtaatgggccaggacacaacaattccacttcagtcctatcaaggtactcacaggtatgcataaaccaaatatacaagaatttaatgacagcattatttgcaaacagtgaaagattctgagcaatcaaaaggttcattactacaggcataggtctataaattactactgtatggaatactatgcagccattaaaataatgaggaagagggagagtgccctgtatgcactgacatagaaaggtttcagtatatggtaaaaagcagctcatcttagaacagattttatagtatgaccccacttgtgtggaaatattttgtgatgtgccactcagtgtatacgtattcatgagtgcatatacaagtgtgtgagaagcaatgtaagtaactgttcacaaggaccccccctttaagaaggcagagggatcgggggatatagagtgaaggatgatttttgctttttcctctatatatataccattctctgaattaggtatgatcattccagggtatgttccttggattttttacactgcttccttctatccttcctgagaatcagatgtgtcctctttaatcagaattgaataaaacagtctgggaaaggttaaggtgaattatggctgggctgaaagaaatgggggccacattaaaaatggaaagaaaaaactaaactggaagtcagaagaccaactttctagtcctggttctgttgttacagtaggtagctagtcagacatgagcagggcaggagagggtcccctgccaccaccaggatgtcgggcaaccatcaggtgataggtggttgtgacagtgccgctctaataattggtcacacctggtgccagagaaaggcagtctcccaatagatataaacacctgaaactggtgatcagcagcttcctagtaagatctcaggagttgggtgagtgggctcaagcatgggcatgaagaggcaaaacagcagagtttttagctggtatatgaccttcctctagaaacgcttgactggttagggaaaaatgcctcaagtgagcacgtgtacaactccaataaacacactgtacatgcagcccctcccaagtgctggcaggccactgcacatgctgatagcccactccaagggaggaatccggggagaaggacgcaagaccccggaagcataccaacatataaaaccccaagtcaaaggtcaaacactgcacttgatctctcaagtaacccacttggccctgttctaagtgtattttacttccttttgttccagctctaaagttttttaatcaactttcactcctgctctaaaacttgccttcgtctctcactctgctgccttatgtcccttggtcaaattctttcttctgaggaggaaagaattgaggccgatgctaacactatcactaattagcaaatgtgataacctttctggacatctatttctctgtaataaggagagagctaaacctgatattctccaaggttccttccagttcaaagaacacatgaatactatacataactatgctggtgtcttagccttgagattctagtttcccaactgaaatgtctgaaaatacttgatttaaaatattttattaaaattatcatcagcatgtagccactaaaaatggttactaggaagactacagaaaaaacatggaaaacattgataggataaaaaggaactcgataaaaatgctgggttcagcatggacacaaccatgcaaatacacgtgcatggaatcaaagacttaaacaaatacacaaaaaggaaaacagttacttcacctgtctgatgtctttttctgacaccaaccaattctccaatagcaacaccaattctctgatgtcaactgggtgtcctacaattcaattcaattcaattcaattctgacaccagagttagcatcagactccaggtttacaggctcagccccacaatgatagtgacaggaggcagccaaatacctaggcagataagggtggatccctggtgaaaccccacctcaaagctaaagacagtttaaagcctgaaagccaagctgtaagttaaatccttggaccagactgagaacttatcttcccatttgatgcgttttcctctgattgatccccacccttcccctattttatatacacctacccttttctaattggttttctacactgtcatgcccacctttgagtggtgtctttactttaaccttttttgcatattcacaaaccaatcagcatgcactacccattgtgagtccataaaatgccccagacccaaccacaggcagagaaaccacctgactgtgggggtgtgggatcatcccccactccccacagtcccttctctgctgaaagttgttccattgttcaataaaatcctccactctcatcacccttcaatcgtcagtgtgacctcattcttcttgaacgctggacaagagcttgggacccactgagtgcaggtactctgaaaggctgtagaactaggcctttgccctcactggtggacgccagccaactgctgactgggctgctaacacaccaccatccacccggctgcagacagcagaactaaaaaaactaattagcacactaacattccctctggggctttggggtcgcaggcacccctgcctgggcattgccacattccccttgaggtaacatgcctggtctggcaatgggcactgcacagaagttgctcctatgttggcacttggagctgccagccaaaccctgcactcgttcactcatgtgctcactcccacaaggggctgagtgcagcatgccgagtagacggggtgcccctgctgcaagttcgggaaaggggccaagaagaatcctgcttcaacaagactgccctcattttggaggccaatagcaagtactgggtcctcagaatatccatacatctgactaacttggctacaaacttcggtgttcccacaatactccccatctcaagtttgataatttcctggaaaagactcacagacctaaaaaaaaaatgctgtctgtattgttataatgtattataaagaatacaaatgagctgccaaatggagaggtataggtgaagtccagaagggtctccagtaaagggagtctctgcccctgtggagctgaggcatgctacttttccaacgtgaggatgtgttcgttaactcagaaactctccagatgctatggtttagcgttctttcctttctttgttttcttttttccttttcttttctttctttcggagtttttaatgtagatttcactacgtaggcatgattgagtaagtaaatcactggacactggtgaatgaactcaatctccagtgcctctcctctccctgagagttgaggaggtgctaaaaaatccaaccctctaacgaagatgtgaaccttccggtgtccaacccccatcctgaaactttctaggggccttaccaggagtcatctcatttgcataaactcaagtacagttgaaatgggctcattgaataataaaaaatccacatattactcctatttctcaggaaattcaaagggttttaggagatctgtgcctggaaatagagacaaagaccaaaaatatatttcctactgtacaactaaatatacatttctgcttacactccaccatctcaccaagatgttctttaagagtatttctacaatcctgtaaattaaaaggttagatttttttcatctaaatattcttatatttattaagtcctcaactatgactatggcatcatttcatttttacatgggtttggatcaagtaaaggtgcccttccgcaaaaaaactttcaggatgtaaaaactggttcctgtaagaaaagaaaggcatgatcttaacaatgttgcatccatctatactatttcatactgagaagcaagagcaatctgtttatcaaacccaattaccctttccctcctcttctacatgaaatggtcgcaatagattaggtagagagaaagaaaactaaacactttgcaaacatcaaaaaggagttgaagaaatgagggatcccaccatgaggcagacataaagccaatcacagcttccggaaaatgcaggctgaaattctttccaacagtttttggtgaaagcttttatgtctcagttatttaaaactctatattgcctaattattcatagatcagttctagctacttgtatcttacatggaaatacaaagagctgagagtaaccaaggaacaaggacacattctagcagggtatcataactgattacagagttatagttgtaaaccaaaaataaaatttgaagccctccaacccctgcaaccatctgaatggactctctcctcagccacagcactcaaaaatttaacctgaacaactagttcaggccatgatgggaagtggggattggacaatgcctcattatacccctgcagcattaatatcaatatagaccttaagtctgataaacatctataatctattctctctgaagcctgctatctggaggcttcaactgcatgataaaaccttggtctccacaaccccttatcttaacccagacactcctctctactgataatagtaactctttcaaccaattgccaatcaaaatatgtttaaacctacctatgacctggaagtccccccaccccttcgagttgtcctacccttccagattgaaccaatgaaaaccttacatctatcgattaatgtattacatctccctcaaatgtataaaagcaagctgtaccctgatcaccgtgggtacatgttgtcaggttttgtgtttacacagtcattaagacagtgtgaaactggtacaaggctagacaaagctacagaacagtggaacagaatacagcccagaaggtgaaggtaggcttttcaataaacaattctgggtaatttggacagaaaaacaaatttgactgtacttcaactcatagacaaaaaaaaacaaacaaaaaaatcaacgcccagaatattgcaggtctaaatgacaaatgaagagcactaataatttttaaagataattaaaatatatgtattttcatgattggcttagaaaaataagaaggctcaaaatgccctaaccaataaaaccagattcattagagtaaaactgagaatttatcctaatcaaaaaccactattaagagagagaaaaaacacttgcaacacacttaaccaaagagctcaaatccagcatataaaaataacttctctacaaattaatatgagaaagagagacaattcattaaaattaagtgactcagacaggcacccacgaggatatgcaatggccatgaaaaagtgctcagcctggctggtgatcaaggaaacaccaattaaaaccagaatgagctcaaattagaaaaaccaaacacaccaaatgacaagaatgcggagtaaccagcactgtcatatgctgctggtggatgtataaactgataaaaatccctttgaaacactgtttagcatcatctgctgacatagaatccagatatgccctattaccagcaattctatttccaggtatacacccaaaagaaatgtctccctgtatttaccaaaaggcatgtccaagggtgttcagagtaatgtttgccattaaaagaaaaaccttagccaaattaagtttaacaaagtttaattgagcaaaggacaattcgagaatcaggcagtctcctgggccaaagcaggctgagagaccccagtgcagccatgtggcacagaagatttatagtcagaaaaaggaaaatgacatacagaaaaccaaagtgaggtacagaaacagccagattggttacagctcagtgtttcccttattttaaacacagtttgaacagtaggccccctttgattggccaaaactcagtgactgccacaagagtaggctacagtctgtttacacctccatttgggttacagttcactatgtacatagaaaccttaaggttgaacttaaaatacataaagaggcagccttaggcttaacttgatttagcactgtaacagccacaaactttgaacaacatcagtgtccaccagcattagaactggataaatatgttgcaatatattcatacaatggaatactataggggaatgaaaataaatgaactacaggtacatgtagcaacatatatgattctcacaagcataacgttaacagaaagaagccagacacaaaatgagttaatttatattaagttcaaaagcagatgaaactaggccgggcacagtggctcacacctgtaatcccagcgctttgggaggctgaggcaggcgatcactggaggtcaggaattcaagaccagcctggccaacatggcaaaaccccatctctactagaaatacaaataaattagccaggcacggtggcacacacttgtaatctcagctactcgggaggctgaggcagaagaatgggttgaacacagaagcagtggttgcagtgagctgagatggcaccactgtactccagcctgggtgacagagcgagactccatcttaagaaaagcagataaaactaacctatagtattagaagttaggatagtggttttctttgacggaaagggaaattgtagcaattggaagggggcaagaaggaaccttctgttgtgctaaagatgtactatttattgatctacatagtggttacctgggtgtgttcactttgctataactcagagctatatactcttgtgtacttttctctatttttgttattcttctataaaaactggtttaaaaaaagaaagtcagtggtgctgcagttgaacttcatatatattgtcttatctctacaataattgtttaaaattatcattaccctcctttttagagacaaggatgaaaatccaaacaagtaaattatcttgccacatgtcacagctggcacatgacagagccaagcttcgaactcaagtttagttgatgctcaaacccatgaacccctgcagtaaaagtaatgtcaaacttaattatttcttcaggactttcccggtcctactttcctttccctctgaaatcattttctacctttctcatctcatgttctcaccccttcatcaagtgcttccctttatcttggggggaaaagtgcttccgagtttacctattgcaactttgggtttagttatttctcagaaataatttgttctacaaaagaagaaaaaattgttatttacaatttcccatctggtttctatggagaggggatctgaaagagtgtgctctatttgctgagctagttgatggctataagcacatgaaagcagactgagcggaaggaactaaactgcaagtgaaaagtatgatggggctggtggtggaaaggcgtggcggggctggtagtggaaaggcgtggcgggctggtggtggaaaggtgtggtggggctggtggtggaaaggtgtgatgggggtgctggtggaaaggtgcggcggggctgctggtggaggaggctgaagccaggatggtggagaggtcgcttggtggatgatctggagaaagaacacttggtggctggcaatagatggagatttgcagaacagaagaaaaatgaagccacctggatagaaattatgagaaagacgacgactgaaaaatgtttgtaaaaatgtggtgtggaatatggagtatcgacctcattctaatcttcccaaaagaggactcaaagtagactgaatgcactggttttattttctctaaaacccagtaaaaccactgaaataacaactgttaaaataaaaatgtttgctcatgtacctcccaaaaccatttacatgtacaccatgcattttactacacaaactgtggctcaatgaacggtagttgaatgaacctcaccttaactttccaagaatccacagcctagaagcatttttatttgcttgaaattgcttatgcttcatagcgtaaaaaataccattcactcccttctttgattcctatttgaggaatcaaaagaacagcgtgaaacaaccaagtgagtttttgcagatgagtccagtgagccaggatggcctcatatgctctactttattgttcaggtccactcacttcagatcccgtaatttgtaataacctgcataattttttattgacaaatcatagttgtatacctttacggggtagatgatgcggtgttttgatacaggcataccatgtggtatgattaaattaagctaattaacacatgcatcacctttcttgcgtatcatttgttatggtgagacatttgaaatttattcttattttgaaatacagaatacattattttttactataatcacactgctgtgcaacagatcacaaaatctatttctcctgtttatctaaaatgttgtgccctttgatcaacaactctccattccctccgtctcacatccccagcctctgataaccatcattttattctctacttccatgagttcaactttattagattccacatataagtaagagcatgcaacatttgtctttcttgtgcctggcttatttcacatagcataaggtcctcctgatacatccacattggcacaactgagagaattccccccacccttttaaggctgattggtattccattgtatatatataacatagtttatttatccattcacccactgatgaatacttacactgatttaatgtcttggctattgtgaatagttctacaatgaacatgggagtgcagttctatcttttacatattggtttcagttcctttggatatatgcccagaagtgtgattactcggtcattttgtagttctatttttagttttttcaggaacttccatataattttccataatggccgtactaatttacgttcccacaaaaaatgcttctgatcccatgtattttccttgttggatctttagatactggtacattggcaaaaagatttaaaaaaattttaatccatcactcttcaattttagactatctttatctccaaattataattccaactcataattattacacataatttatcaacagagtattaataagttatgtgtatctttcagcaattcataatctcactactgtcatctgtaaaatgagtaagttaaactaaatgacctaagatgtttgcagctctcagtttttatattctaaaaactgagactctatattttaatctcttgcttctactctcctgagccaaagatctttactagtatctccttgaacacaatatgtgattcttgagtctccagtccgcacttttgattcctctcctaaaagccaagctttagttcccatttatgttgggagagtcagtctcctctagagctcccagctgtgtacatatactaagtggaagcttagcacaatacacttcacctctagtttcccagtaaacctttttctgcacccacaaactgcaagacttttctggtctttagtctgtacagcttccaatttctaggctatcacaatccaatcaactccatgcaagtgatgatagcaggctacaggggtctatgaaagatagtacaatgcacaaacccattccccagacggtgaaagagaaaattaagataatttgtctggacacataactttaaaggaaaatccattgctgactaacgcagcctgttagctatgaatgcagaaattaaaactcaaattatagtaggccaataaagtagtacaaggtgtttataactctctttgactgataaagcaaggatacctgacttatcaggaagggtggcaaatagctctcattttataatgacgtaaattaaaatgagaaacaaaccagaaaataggtggatctttattaaattgaggaatggtttatttctctatttaatttaaaatactctaaatagggatgtttctaaattgctcctaggttctgaggaaagatgtgtctgctggagaggccacatgtcttgacaatttgcttactttcaataactacaatgtattatgctaagttctcttctctacaaaagctatggtcctcacactcagcagggcagtacatctgccattccccagccccaggccagctctgagatgcttcaggtagagagaaaagcttttccagatgcacattgagagagaaaccacatatgcacaattcaactcagaaagcacgagtgtttttcttcaaacttttttctttctcattctgtgagtaattcagtcactgacagttccctaaatgttatcattttaattccgaaaacattaacctcacttcccctgaggattttgagatgtacatcatgacaatgtattttttaaatgtcttaataatgagaaatttcaggtagcccttcataatacaacataggagatggaggcgaaacgaagcccagctttcggttgagtgttcggaacaggttctccctctgaacttccaagtgcccacagatggctgtggggtggggtagaggacctaaaatacatgttaaattcggtgtcatgttttcttctgtgctttctatcattgctagattttaaaggaatctaaaaatatgaagaatcactaaccacagtaaaactgagggaaggtaccacaggtcagtccaaatgtgtccttcacccagtcaagccctgtccctggggagaaaatcacctgcaataaagctagcatgctcgagtcactagaggcttaggagcacattagatttctaagaaaaataaatcacaagaagcaaatccatatcatgtatttatcttttaaaacatatgccagggaagatatttaggaaaaaatacaagatatatacatatatacaaatatatatttatatgtaaataaataccatacatttaatttgctgaatgtcaagaaactttgaatagttttataagacacgctcctcgtgaagttactaaacattatcattcctacctcacattgatttataaactaatacaattccaataaaaattttaagtttttctagaagaatgaatatataaggaaatccaaaaacatttttaaaagtatgcaaaagaaatggaaccgccagattctgagatgtattgtaatgctacaataagatatagtataatatacaaacatatcaaagacaatagaaggcccccaacagtcctaaacaatatagaggaaataattattccaaaagtctggtatggaattaattagcaatttagaaaaaaaagttgtcttcgatctctacctctgactgtataccaaattaaatttttcatatgaaatggagtgacagaaagagagaaaaaaagtagaaagaaaccctttaagaaacgtgaaaacattggtaaacttagatcagagaaagtcttttaagctaaaagaattatcagaaattatataatgaaaggacagatttgattatgtaaatatttaaaacttccacacatcagacaacacagtaaaattaaaaacaaatgataaaaagtaaaataacagtttcaaaaatggtaatttttagggataggtatttagtaagaaaaaacaactatggcaatatggtaatatacatcagaaaccttaaaaaggcatatactcttatgtatagcaattctacctataagcatttatcctaagataaaatacttatagacaaagacttacagtagttatttataatacatcatgtataactcaaatttttataattagtaaaactcatttaaagagtttaaataacagtaggccaggcacggtggctcacacctgtaatcccagcactttgggaggtcgaggcggggggatcacgaggtcaagagatcgagaccatcctggccaacacggtgaaaccccgtctctactaaaaatgcaaaaaaaatagtcgggcatggtggcgggcgcctgtagtcccagctactcgggaggctgaggcaggagaatggcgtgaacctgggaggtggagcttgcagtgagccaagatggtgccactgcactccagcctgggcgacagagtgagactccatctcaaaaaaatagtaataataataatcggaaaagaacagtagtctataatgattcaaattctatttttatttttccacattaaattcataggcctagtttcaaaagtgacaacagtttctctgaaatagaatcatagaaagtttcttttgcttcatgatttttctggatatcttcaaattttactttatttggggaacatttaaaaccttatgagagattttctgagatcagtaaacaaatccctcacattaaaatgaagtagttttctacagagcaagcctcgaataatagctgtatattttctatgaactgattatactagaaaatataaccctcccacaggatgataataacagaagcttgtctttgtgcccttgtactaaactcccgtgtcgtgtggtatgacaacaccagcatgtctgtgcagattcttctccaggagggctttagaagtctctctgcccagggcctgctgggcgcccatggtggtaccataactgtgcaggggatcttctacgtgcttctccaggtctgtgccctttctgggccccggtgacaggcctgaaatgatagcctcaagtggctcccagtctgctgacttctctttgggtttggccaatgggaatgacgatgagggaccagagagtgggatgagaagagatcaggttgtgtgccctcagttcccagcctggcatgtcactatggaccggcggcacctccctgctgagggctgcgggtcctgcccagcagctgcctccacaccactcagcctccctcttaagttctagttttcgatagcgacttctactcttgccccttcaggcttgggtgtggtaaaagcttctccttggtactggccccagagtagcgctctcttactgctttttctaaaccccgtctgtacctctgtgaaaggtctctaataaactctcctcaaatcactccatttgagtgccacctgattcctgattagtacgaccctcattgatacagtcatatatgtaattaccctagagaaaataaagttaagtgcgtttggactaaacaaagcaaaaggaaaaaagtgatctaatgtggtttaggaaattttccattcaagtttgggttaaacagaagtttagccctatgctacttctatgcttcaattacctagaacatccttatgctttctttactgctgtgtctgaattgctctgctcagatgaaacaatcattttccacccttatgctgttcattcttacacaattatgatttttggaaaatcaaatgtgggaaagaagacttaaattgctatacatattttcattaaggatatgagttttcatcctgtaagtcaaacaccacagaaagaaaatgctatgaagtaaccaatgccctgcagaaactgtgtaaatgaaagctagaaatcatctcaagattcaactgccagtgtgttctcaatcactggagtaatttgatattatggaaaaacctactgaaccacccaactttgatctgttcatgtctatcaatgaacaggaatggaaagaagttatttttctataaccagatagatagatagacctcaatgcacacatacacctaataaaaacaacaaatataagccacgtataggtaatctccaaatatcaggaagaaggcagagaggtttcatggatatatacacacacatgcaattcttaatatcttacatacccatcctctaatgctttggtgtcattttacagttcacgtgaaacttccacttaaatagtaaccatatctagattcccatttcatttaaataaattcaagtaaagttcctaggcaggtttccagagagttaggttgctttaaagttggccatgcattaaataaagctttgtctcacaaaagtgaacgagtaactgatacggtatctgtacattcactctgcacaaggttcctttatctcaaaagcattactcgaagacaaacaacaaatcagattacagctctagagaaccatactctgcctcttctagcaacactgccagctcacaaaattgtatgaggaccaaccaccggcttcctgagggatttgcaatctaccttctccatcaggtcccccaaggttctcctacttcacacacattccccctttcattcattccactgcattcatctttcatctttcagaggctcgttaacaataagtgtgcaaaggttcactttaacagcaaaaccaaaaagaaacccttcagcattacattttataatgaaataaaaccccaaattctgagagtcaactaagctagaactaaaagccattgcaggaagagattcattcccgggtccctagcttcctttcacattacctgcttcagtgtacttcagtcccactttttcttctgtgtcttttgtctttgggggtggccagacagcttgaagtctgccaggagtcctgtcatcctgctcagtcaggctgtggtcaggctgttgaaagagcaggcaaatagtaagtggaatgtagtcagagccgattaattcctgaaaaatgacatgctaaacctaattctgaagttaattttaatggctagttgcacattgctctcattcactataattcagatatctcactatagtgtgacccttttccagaagtgtaacgtgatcagttgaggtgaaaatttaaaactacaacaacaaaaaaacctcaaggctaagtatatatcacacaacccttaaaagattatttttattatataattatttgaaaaagcacaaatatactttgacctgaaggtacagacataaatgtactacactgatgtgcatttatgggaatgtttaccaatgtatcccgggactccaggattatttaacacaaagactaatttcaagaacatcagtggtagaccaagacaccctttttcaaacattccacactgctaatttccttttattcctataaacgaatgaatgagatttgccttcatattccagtcatttttatatgtgttgatttttacaactaggagaatgttatattgtgcttggttttttaactgcagtctgagaaattctgccaaagactttcatttttaacattttaactgaatattttaaatatataggaggaatgatagtcatacactgaattgatattaagcaagaaattctatttattgttcttctgatcgtttaagatctactggacaggtacttgctcatctttataaattacctgagttagttttctttgagtaataacagcatctattaattagatgcttcccatgcactgcctttgtttaattctcataacaaccatataaccattttattttcctcattttgcacatgaggagattgaggcttggagattatcaaggttacccagccagtaaatggcagaattagaataaaaacccaggtctcattctaaatccagtgctctaaatctggaagccttccaaccaatgtggaacactctaatcacaccacaaacacatattttgtcaaatggcagactttcaaaggaacgatagactttctgcggaggtataattaaggggtgaggaaaccctgtaaacctgggctatactgccatcttgcatcatttcctcatgctacctagttttataagtgcgtttaccatcaacgtttaaattcacggtgacagttaccctttcctacctgcacatctttgtgtatatccctcttgcaatattccagataaaaatcaggacgcatgaaaagcacttctggttaactccatactccttacaggacaatataatttgactataatcctttttcaactaaaagaatcactaacaggcaactaggattcactttgggaggaaacctggaaagaaatacagcagcaccatattttatgttaaaatgcaaaacccaattctacatacacttttggaatcagaggggccatccgctggcttagaattggaccgttcaaacacagctcttagcgactccttctcatgtctcatcttgcgcttgagagcttccagctcagaggtgtcagctgtggtcccctttctggggggccggatgaatagggctttaaaagcctccagggctgtctctggcgactttggcttgacctcaccaccctgggtttgtggtactccagggccgctctggctctcttggtcagcattgcagcccatctcttctctcctgggcgactcagggtctgctcccttcggttcagttttgggcatgtcaatgttgagcagcagagagagctgctccaggagagtgggagtggccttcggatcagttgctttcttctcactcttcactgtctgcagccctgcctgcactaaggacttctgcacaggctgcgtcaatttgagcaaagctaagtccccatcctttggtttaatttccgtgatggtctctcctccctcagcggtagcccccttcttcagcacacgaagcccactgaaaaaagctggaagttggaatgacttctctccagagacttcttttttagaagaggcactctcagtgataccaacactcgaattctggtttgttactgcaggtaggtcttgggacccttcttctcccacctggtcctggctggggcgacgctctgtctgaagaccaccgttgccagcttccagtttgctgctcatctcaggtggaatcctttgaggatcttctgcacagagctctgcaccattcatttccccagtgacagtattttccctgaaacctcctgggttttctttggactcctgagatggctcagataaaacaccactaggggactttgggccattggtgctgcttccctcctctggctcctggccaccatcatcagagtcagaatcactggtggtgtgcaccagggtcccacgaacacaaatgacatcgtcttttgtccctttcaaagtagacagtggaagcagctcttgagcaaggagagatgtccctgcttcttttctctgacttccctctgattctgtctccacgcttgcaattttctcatcatttccgaggtcaggtgaaacccgagaccctgcttcctgtggatccaagccattgctggaatcatcctgctgagatgtgggattcacgtctaaactatggaatgctttcagcacagcatcttcctcttctggattcacagattctaatttactcgtaaacccaaatagggatttcatagagaacttactcaggatcgactgagccacttcaagtccggcttctggttttgctggttctgacacatcactgccatccagagaattatcaacgttctccatgtctcagtaatgcccttggtggaagttctgacttgtgttaccttctcctgcgctctcagtttatccactccatctgctcttaatttacaggacagagagcaacaggacccgggagtcaggctgtcagccgcacagcaaacacacttggtctctttcgggtcacagtgccctccttccggtttgtgcgatgatgtgttccagggcaactgtgaaaaatctgtggagtctatgcccagaagcagccgaggctgcgcaccttactacacacggaccagggaggctgctcttctgaaacttccgtatttattcccggggacaaaagcctttttgtcatagggaaagtcagcctgccctgtaatcccaacccaggacttcacgaggagctccgccccaggccggcggttctcctggtggcattcaacttcctcattggtgagcaagtgaaggcttctgaaagtgctgagccggcaagctgatactgagggcacttagccactgcccagagcagcctaagggaatcagaagtaaatcagcagaaaacaactgaaatacttctgacacaggccttctttttcatctggattatgatcagagaggcctggggcatccaggccaaaaaactagcagtacacccagatcagcagccacttacgaagccgcaatcaaggaaacaaattaaagaaagcaatagatcatctcaaaagtgcctagaactctcaaagcagttaatttactgcccttgaagctttttttaagtgctttcttccgcttccctgcaggtttcatctggaatgcagattttagctcctaaagcccgtgagggataacccacacgactggtttcagatgactgctgttttagctctgccctagctgtctcagtgctctacaaacaggtattaggcaagcacacccaccacacccagtgtccaccagcaacagggtggcagagtaaacagcccaggctccgcaggaatgattaccctctacactccctgtgccaaccgcaggcttctttctgctcagcagctgtgacttcctggctgccttagaaatcctggcagcagcaggacacgcctctccccctttggtgtcccagccaactaaatgaaacctggcatgacacagtgtaacacacaacctgccctattagacaaaacaatttgaagatccccaaggatccacgttctcctaaagggcaaaacatctgaaaagtctctatcagtcagatctctatcacagacccaatttgcctcaacaaaaacaggacagacaaaacaacctccaaacatcagcccagtgtagtttctaccactctatttatatgctgggaaactggcaacaaaggatgggggtaaaaattgcagccctgtttcctagctgcatagctgcctcttgggacagctccctatctacctgaaggcctcaagtgttttccaaatccagtcccactaagcaggcatgcagtgagtgcctgggatggacaggacactgttctggttggagaggcaagtcaaactggctgaacagtaattgccatctctgtttgagcaaaggtccaagaagattgtggtcaagtgttaaacacaaacagtaattccttctgcaaaatggaaatggtagccataaggaaaatgacagtcttgctttatctgcaggagtgggtggctgcatgtcacacattgataacttgagccatgttcttcagtactaaaaacaatctaagcatcaatactgagaaattctgattgcaaaaatacatttctagcaatgtattcaaaaggaacgctcacacaaataaaaacgcatcattgcatcccatcaaccactaagggtaagtaaaacactttctaaatcttgatttgatcttgtgttttaaacaggtacttctctgtttgctcctgatcatagtatttttgggaattattaactgaggcacttaatcaaaaagccaccaggacactgcagaaaaattcaatggtgtcttttaagtctaagaacaagattcttgtctagaggaaatacccattgattaaaatcagacatctgcttcttcaagattgtagaaagaagaaatgatcacaacagatcataagatcagtctttctctttttttttttttttttttttttttttttgagaccgagtttcgctcttcttgcccaggctggagtggaatggtgcaatctccgctcaccacaacccccgcctcccgggttcaagtgattcttctgcctcggcctcctgagtagctggaattacaggaatgcgctagcacacccggctaattttgtatttttagtagagacaaggtttctccatgttggtcaggctggtctcgaactcgtggcctcaggtgatccgcccgcctcggcctcccaaagtgctaggattacaggcatgagccaccgcgcccggcctaagatcagtcttcttacgagcaatgcagatcatccaattctaatatggcagggggcagtgggagagggcacgtatttggtcttttttttttttttttttatgaactgaaaagactcaatttctcagacataactaattattgatttctggaataagcttccaggcccctctatagatttgggcaaaatggaacagatgctggaaggggctactggcccttctgcaccatggcatggagcagaattataaggtttcagtatcccctcaatactcatagatgccaacacaatttcatgggaagtgggtcaagtctttggtcccaggagattatctgatttcatccccttggctctaggtaagtaaggtattattaggcccatttttaaaggtaagcaaccatagctgagagaaggtaacttgccaaacttaacacagctagtaagtggggaataacatcatctaagatttgagggttgaccatgtgccaagcacaattttaggtgctccacacatattaactcacttaatacagataacaaccatattatgagttgttattattattattctctttttcctgctagagaaccgaggcacagaagattaaaagtcttgccagtccacagaaacagtggatggtggaagtataatgtgaatccatgcaggcaggctccagcatccacactctcaaccactcttcgaaagcccagaggctccacttccttcccgaatagaagaccacacacagcgaggtgcaaaggtttcagcccagttcattggtggtctttaactgggatgtgaagtatactttatcctcttaaatgacacagaagacaaacatcaccaaaaacaaacaaacaaacaaaaaacaacaaccttatactgaggatgactgttcttttcttttgcataacttggggaaaaatctacaagttttcttaggaaaaaatggagagagaggaaagaaaaatcaagcaaaaattccagtaaacctagctggcctatctatctaacacagaagagacacggaatcctctgggctcaaacacatcaaggttttccagtttgcccctaccattctccttcatttatgaagcatgacttctattaagaagacttcttcatccaatgtcataaatgagcaccaacaatgaatgaggctgtgaggacataagaatgaagatagccctgccttccacctccatgaaatgtgtagtttagttggagatctctatttagaaagaggagactcttgtttacagactgtaaccaaggactttatcccccaggttcagtctaatagtaatagctagacctgaaacaattttgaatgaaagccagcagtgaccatttaaatatgaacacgagtaacaggagcacgagtaagattcaaagagatcttttaacacggactctttcaagccactggttctcatgaccataaaaaatgttaccactgctggtcactcagggaatgagagtgtttcagattgtaatattcaaataagcaacctacaaattcaatctaaattggtcttgaaaaatgaatctctttaaagctttaacattttcagggaggatagtaatcacttctcttggacattatctcagtatctatgtgctgaaataagcacctattacacaaaaccagcagaagcgaaggctttcatcctttacaacctacctcaactgattctcttttgtcttgtcttaacctcaagacaaactctctaactgccacatctgtgcaaaaatgatcttcaccaaaacaaacaaacaaacaaaaaaacaaccttatactgaggatgaccattcttttcttttgagtaacttggggaaaaatctacaaaaaataatctgtgccagattaaaaatgatccacctcagacaacccacgtttgaactgtatgggttcacctatacaatatgttttcaaccaaaagaagatggaaaatgcagtcttcatgagatgtgaaacctgcacatatgaagggttgacttttcaacttttcctgtaagtggattcccagagcctcctgtgggacttgggtatgagaggatttgggtatatgggtgatcaatcttccaagtagatggagggacaactctaagtcaaaggatacatgagaaataggtagcatttgacctacgtgatattctgttataactctgttaaaaacaatcagtacctagctacttaaaaatgtgagcatagtatttgtggagaatttactagcagtgaattcttcatttctcccatctcactgtcctctcagctgtacacagattgaaggtggagccaattgtaccccatggcaaaaagaacatcagtctaggctgggcacagtagctcacgcctgtaatcccagcactttgggaagccaaggcaggtggattacctgaggtcaggagttcaagactagcctggccaacatggcgaaatcctgtctctactaaaaatataaaaattagccaggcatggtggtgggcacctgtaatcccatctacttgggaggctgagggaggagaatcacttgaacccatgaggtggaggctgcagtgagccgagatgcaccccctgcactccagcctgggcaacagaacaagactccatctcaaaaaaaaaaaaaaacaaaaacagaacatcagtctagtaagtgtatacctagtgagataagaacaattgcaataaaaggcacattatctcctataggcagtagagcctagctccttgactttcctaatattaggagatcagcaataaaaatttttaaatatcgttttgcgaaaactggacactgaaagaaacttctctaagggcccccttactctttgtagcacttctcgctattactcagtttggataattcacccccacattctcatcagacttcagaaaggcaacgtgaaagtaaagcaaacaggatcgcatctcactgttaggctacttgtcatgattctccttgtccaacttatttcaagttctgggcctgattttaatgacaaattgcttctagcttcccaaagtagttcaaatagcttcatgcgaaaaccgtttgaaacaaaaagtagaaagtgtagttaaacttagtaagggtaaataagagtgaggaaactatttctgcaggtgaaaaaaagttaagagcaatgtactgggaaaaataagtaagttctgaataaagatatgggtaggttaatgggtgaaatcctggtttcttggttcaggaagcgtgttttaattcaacaaacggcatcttgaacaagaggggagagctgaggaaattataacatcataaggagtcaaaaaaatgtctgtaaaatgaggggtcatataaaaggagtacaagattatggaataatttgggtagaatccagttgttgtaaggttgaatgggaccttagaaatagtagaaatttacctagcttgttttttttttttttttgagacagggtctcactgcgttacccaggctgaagtacagtggcacaatcactgctcaggcagccttcacctccccttgctcaaatgattctcccacctcagcctcctgagcacctgggattatagttgcgtgtcaccacgaccgactaatttttgtattttttctagagacggggtttcaccatgttacccaggctggtctcaaactcctggcttcaagtaatctgcccacctcggccccccagtgtactggggctacaggcatgagccactgcctccggcctggcttgaccttttgttttaaagatgaaggcatttgaggtcaagggaagcggaacaactggcaccagttcatactgctcaagtgcagcacccagatggggaaaaaggcatcccatctcctgttcacccacatcacatcaccctgctgctatgctgtgggatcttaccttcttcctgatcagcatcttcgttatactcattttccacatctttgaaatggagacaacaccttgcttctacctaattcacaggaatataaagccaaacaaaagaaaaagccagagatacccttacacatctagttttgtagcactttccctgccttcatgctgtggcgttcctctgccaatgcaacgcttacaacagcctctctgggtcatcccatcaaaagcctgcagctgttttcactaattggttaaaaagaaaacaggcagcacctgcctcttgcaaggactgtgattaagggcttttttctctgttgaaaagtcttaagagtaaaatatttataagactggttccactgggcagtatcaaagcttctgtagaaatggattgaatatagataacaaactagaagaatctaaaaggaaaggagaaaggctgggacatcttgtgaagcttgaacaaaggaagacagcagtgggtatgtaatcttgtgatgaccaaggaacacgggcagtgtgcatagttaagaacaggacctcagccgggtgcagtggctcacgcctgtaatcctagcactttgggaggctgaggcaggcggatcacttgaggccaagagttcaagaccagcctggtcaagatggtggaactccgtctctactaaaaattcaaaaaaattagccaggcgtggtggtggtgtgcgcctgtagtcccagctactcgggaggctgaggcaggagaatcgcttgaacctgggaggtggaggttgcagtgagccgagatggcactactgcactccagcctgggcaactgagcaagattccatctcaaaaaaaaaaaaaaaaaaaaaaaaaaagaacagaccttgagtcctgggctcacaccatgctccactcctacaagagacttaccctggggcaagttatatataagctccctgtgctgcagctccctcacctggaaactggtaagaacagtacctacacttcatgaattgttacgcggcatacactattatgtgtttggccctcattaataacctgcagtaagtaggatatgttttcccaggaaaggaacagcttccttagggacaccaaccatcatctaacagatgtttttagcattctcattataaaacaagtatttactgatgaactaacagcccaagcaggaagttttcttctcccaactccctctgatatatgcacttgggcagaaggactacatacaacacacctccgcatgccccagccgcaaccatgccacaaggaaactgagctccaaagaaaattcttccaagggatccctttgggtgttgcagggccagtgttttctggattggattcttccatctgtgtcacttgagaagagaataaagttttctcaagtggccactgcataaggtgacaaagtttgccctgttctttattttgtttcccaagctccaacatgatttttaaaccaactcagttatttgagagaaaaaaaaaatccatgaatttggggtttcttccatccttttctcatgagaaaaagcatgctgaaaatgagactaggtgccttagcactgacattttcccttctttggggaaggactcttctgagacaatgagcaagcctgggtcctccatagcagagcaccagccattttatttattcatttatttttggtttggggtcaattcattagacttcaaaagtgctgcttcattacaaatgaaataaaagattacagacatgaaaatcaactttgaaatagttattacattactggctagaatcctactctcaaatatttctaagactgggttgttccaccaaccagtgtcaaaggtcctctagaaatggatttaatattgatgacaaagtaaaataatgtaaaaggggagagaaaggctgtgacttctgaagctggggggcagggggatgagggttggtgggtagcagtctttaaagtacagaatttcctgggatgtgtttcagaagagctttgagctttcccaaagtgaaggcataatattgctgttccatatggctaatgacagcagaaggcatggagtctatggtgaaagcatttcattgtgactaagttgctcctgataaaagatgaagacctggaatttattagactacttatgcctgttgcctatattcccttcttctcatgcagtaaagcgaggcacttcatggctactgctataactttttcttttccttaatttttttaaagtaaaagttatcttgagaatattagttcgaactccaaagatccaggtatcatttcaaaatatttttaaaggggacaaaagaaaatctagggaaggtggggatttacccaaaagaaaatgaagatggatgggaggagcatgcatgctgttccaagtaggcaccatgctcggttctttatgcaagttttcttgcagcctcaccctctccataactctatgagaaagatgtcattaattgcatttgacagattattactgtccaatgaaactttctgcaataaagccagcatttgcactggatccatctgattctaaatgtttcttttcatgacaataaataaaaaaaactacggtattttataacagttttctttcctactaaacataggaagggaggcaaaatagatctgctggttactcagaaccaaatggctactgaaattagaggtttacagagggtagaaaggtcacaaatgaatcctgaatcagcaatgattctttgatcctaatacccacatgattaattcagacatttaaaaagaaaactgttgaaacaaatgtcaatgcactaaaattgcaaaggagaaggtaagtcaggcattgccacagctatgatccaatttttttgagacagagtcttgctctgtcgcctaggctggagtgcagtgggggcaatctcagttcaccacaacatctgcctcccagggcgcaagccatcttcctgcctcagccccgagtagctgggaccacacgtgcatgccaccatgcctggctaatttttgttttgttttgttttctagagatagggtttctctatgttgctcaggctggtttcaaactcctgggctcaagcgatccacctgccttggcctcctaaagcactgggattacaagtgtgagccactgcgcccggcccatccttttttttttttttaatatatatatatatattttttttattatactttaagttctagggaacatgtgcacaacatgcaggtttgttacatatgtatacatgtgccacgttggtgtgctgtacccaataactcgtcatttaccttaggtatatctcataatgctatccctcccccttcccctgactccacaacaggccccggtgtgtgatgttccccttcctatgtccatgtgttctcactgttcaattcccatccatgagtgggaacatgcagtgtttggtttttttctccttgcaacagtttgctgagaatgatggtttccagcttcatccatgtctctacaaaggccatgaattcatcattttttatggctgcatgggagaaaatttttgcaacctactcatctgacaaagggctaatatccagaatctacaaagaactcaaacaaatttacaaaaaaaaaaaaaaacatcaaaaagtgggcaaaggatatgaacagacacttctcaaaagaagatatttatgcagccaaaagacacatgaaaaaatgctcatcatcactggccatcagaaaaatgcaaatctaaaccacaatgagataccatctcacaccagttagaatggcgatcattaaaaagttaggaaacaacaggtgctggagaggatgtggagaaataggaacaccaattcttaaacagagagcagagaaaaagtagaggcaataaggctatgtctttgaaaagggacatattggggtttagcatgagatattactagtcacacactagctttttgtcacttgaggcaggttctttaacgtctctaagatagcatccacgcgtaaaatgggaaaaataatacttaactcatagaatagttcaagaattaaatgtgctaatattcttaaccaagtgcttgcttgattccccacaggagctaaataaatgtgaccatcattattatggagcatgtgcaggtggtggggaggaaccatttttccatggttttgaaatgtattcactattgcctccatgtggtacatcattttaattggatatttaaataaaacaagtatatataggactactgtcatgttcaatactttaaaaagcctcatgaaatattctgaagaaatgctgtaacagttcctagaatcaaagtcacatactttctatagctggagaaggaagtttatgatgttcctatgtgagacacttgtagctgcaatccttaatgcaatttagaaataatgatactaataaattggaattgcttaactaaaatctgtaaaatccaaaaggcaacaaaaaaaaaaaaacaactgggccataaaaaccagaactttatgttaacataggagtgttcacaaacagtcagtatgcaaaggctactgcatttcaaattctaaatagctcatatgggttgtaattttaaccacaaattcccaccttcatcctggagagagagaggaaaaaaatgcttttttgaaagacacacatggagtataaatgacgtacgtagcaagagaccagggttggaagataccatgtgaggctcacagcactctaagtttagtgaatgcagacagaaccttaagcttttgagacagaaaaatgagggtaagaaattggaacacatccaaagggggccaaaaacaatcatgtgaattttagagaaaataaagtattttagtggcaatatttcaattcacttatatacaattcctagaaaaattcctcatcattttatataaaattcagttctattctgtgatctctctggctttggaagtataatacagagttttctctgtatataccctcaaaagtccaaattgtatatgaacagctatgtatttctcatcagaataggagacgaagaaataagaatgtgtgttatcaagatcaaagaaaagcaaatttcacagttccattaagcattaaggtgatgcaataatttagccaagctttttattctttttattttataaagaaagctgaggctgggcacagtggctcatgcctataatcccagcacgcaggaaggctgagggagggaggatcacctgagatcaggagttcaacaccaacctggccaacatggtgaaaccctgtctctactgaaaatacaaaaaccagctgggcatggtggcacctgcctgtaatcccagctacttgggaggctgaggcaggagaatcacttgaacctgggaggcagaggttggagtgagctgagatcatgccactgcactccagcctcggtgacagagcgagactccgtctcaaaaaaagaaagctgagctgttagcagatttgccattatctttcaatttgtagagaagtgtgagaactgctttaagaatttgtgatcagcagaaaatagaaattctatttaaacatgataaccatccttcacatcaatttccagatttgtactaatttgagagataactggttaacttgcatgtgaattaggaagtaaatcagattactttttttttcaactgctttatcatgacttaaagcgatgaggaatttgtaaaaaacaatgatttttccaaattgatcagttcatccctttgaattgttcttttcatctggataatttcttgatcacttataagcaacagacacatgatctgtctctcattctttttctcttacacatacacactgacatgtactcacaacatacacaaatgaacaccctccatcaggaaacaagctactctgatatttctaaattcactccacttgcaagaacaagtcacattgtcacgaatatcctaatgatttggttaagccattcctatggcctgtagctttaaggggtagactctttcattggcttccatggaaacaatacaaaaatgcggccctctccatgtaagcaaagacacaacagagagcaatctgtgcatttactgatgttgaatctaatttacgctgtggagtttgttatttaggagtgaaggaaggtggaaggactgaaatctgctggtgttcccgtaactgagtgcctacattttaaaggttttattctttttttctttttctttgtgttaaccactagacaccccctcacactgctagtgcatttaattatatgtctgcttaaaagttccagagactggccaggtgcagtggctaatgcctgtaatcccagaactttgtgaggccaaggcggacggatcacctgacgtcaggagttcaagaccagcctggccaatgtagtgaaactccatctctacaaaaatacaaaaattagccgggcataatggcgggtgcctgtaatcccagcactttgggaggctgaggtgggcggatcacctgaggttgggagttcaagaccagcctgaccaacatggtgaaaccccgtctctactagtaatactaaaattagccgggcatggtggcgcatgcctgtaatcccagctactcgggaagctgaggcatgagaatagattgaacccaagaggcggaggttgcggtgagctgagatcgcgccattgcactccagcctgggcaacaaaagcaaaactccgtctcaaaaaaaaaaaaaaattccagagactaaatcttgaaacaatacaaggacctgtggaaatctcccccacccggagcttgcttcaaggctgcagttgagcccaagatgatgagatgatgcaggcccatttaccagatgtggcaataactcaagccactcggacaagtcacacagatgtacactgcctcaccccctgcacggagggtactccacggcaaaacttccgcttcttaaacccttgcatttcgcttggaaacttgaagtggttccattaagacaagagcctggaccgttttctccacggctagctttggtttacagtacagtcactcttctaccatacccccaccttgctaactggtttggcaggcagcaaacggttgaacctgcatttgtaacatttccaacaatatttcaccattattttttaaatgttaaaaaattgatatacgtattttggggtacgtgtgatattttgatacttgaatacaatatgtaataattaaaagtaattaggatatccatcacctcaatcaccattaatttgaaagacccaggatacctggtgcatgcctgaggaatctagtgtcccatattagtagctgcagaatttttactggatgagttctgtgttgtaattctggttgtagttctagctgtctaattctgagcctggatcccaatccttctcactgattataggagctaatccccatccattaaatgaatgtcttttgttcttaaactaaaaacaaaagaaaacaagtccagaagtagtggagcggtagaaggacttaacatttaagtacttgagtctagactcagatctgggtttaaatcctgcccgtgcccttgctgatttgtacagtatgtatactaacacctctaagggcagggtctggcctttaggaagtgatcggtaagacatggaggttcttattaccgtttagacagtcaagcttgggaggagccttggtaattacatccaggttcataagatacaattacttggaacgggatgctttgtcttccccagacaattaagctaattcagtaaaaagtatgcagggcctcacaggtgagaaggggattgtgatgagccttggaaaccagaatcaacaagaagagttcaggggtgtgtgtgtgtgtgtgtgtgtgtgtgtgtgtgtaagacggagtctcgctttgtcacccaggctggaaaacaatgtgtgtgtgtgtgtgtgtgtgtgtgtgtgtgtgtgtgtaagacagagtctcgctctgtcacctctgcctcccagttcaagcgattcttctgcctcagcctcccgagcatctgggattacaggcgcccaccgccacggtcggctaatttttgtgttttcagtagagacggggtttcatcatgttggtcaggctggtctccaactcccgacctcaggtgatccacctgcctcggcctcccaaagtgttttaaaagctggcatgcaaaatcttatttccagagagtactgccaccaggatataatcctaatgactacttacctgtttcctgcttttcatatctttgttttcaatttcaggccatacctctttttagggtcttttctacccacccatgtctttgtttatagacacattacaaactattctccatggtgagcattcctctccaatggtatcttcaggaaactgcacttgttataagaatttaggccccagtgcttctctagtctctgactatattcagttgcctttgataaatctggttgaaagtgccctaggacctgagatgcatggctaatggtagctcctagttcagtggaacataaaaaactgactcttcaggctaacttcttaatattcatgtcctaaatgggcgctccggggtgactgatagatgctacccaagggcaattcacacatttggatcttgtttcaaaagtaatatctaggagtgatagagttagttaataaaatataggatacccagttaaatatgaattttagattaaaaaaaaccaaaaaattttgtaatataggcatgtcccatacaatatttggaaacttcatggcccaaaagtggagctgacagagctttgggttcagtctttccagagctttgtagtttgcccataatagtctacagaatttgcttgaccaggatttgcaggataattacccaaacagagcttccctacacagcagtctagcatctacaccaaagtaccagttgtgtgatatactgatataatgagaaatacactgtatatttcgtcttcatctgggtcctggacagaacttctaaaaccctcgtaacttcttaagtgataagagccatagaagtagtaataatatttggatatactcaaatatattcaaatatatatagaagttgtaatatttgttttttgtcctcagcttctgaaacagctcagaaacaatattggtgaaaggggcatcttttgttattcagaacaagcccctttcaactacacttgaacttatgttaatgaggtgacttttagaggatgggaggctggttgccaagggaaccttgtgattagggttggcattttgcgtcccaacaactcacctccaggagggtagagaggctaaaggttgagctaatcaccaatgtaatgaaatctgcataaaaaccctacccaaagaagttctgtctccacagggacagacgctcttgtgctctggacccttccagacctcaccctatgtatctcttgatctggctattcatttgtatcctttaaaaatatcctttgtaataaattggtaatgtcagagacgtttgaaccacagcgacttcatcttgaataggggatgggtaaaataaggctgagacctgctgggctgcattcctagtagattaggcattcttagtcacaggataaaaaagaaggttaccacaagatacaggtcacaaagaccctgctgatacaggatgtcataaagaagccagccaaaacccaccaaaaccaagatggctacaaaagtgacctctggtcatcctcacggctcattacatgctaattataacgcatcagcatgctaaaagacactcccaacagtgccatgacagtttgcaaatgccatggtcatgttgggaagtttgcttatatggtctaaaaaggggagggaccctcaattccaggaaatccctgcccctttcctggaaaactcatgaataattcaccccttatttagcatacaattaagaaataactacaggtatattcagtcaagcagcccacaccactgtgctctgcctatggagtagctattcttttattcctttactttcttagtaaacctgcttttactttatggacttgccccaaattctctcttgtgtaaggtccaagaaccctttcttggggtctggatcaagacccctatctggtaacagtaatagtcagtaaattgtttccttgggttgtacaagttatcctagcaaattactgaacccgaagagggggtcataggaacctatttgtatccaagttggacagaagttatgggtaacctgggaacccactacttgtgactggcatctgaggtgtggcagttttgtgggaccgaatccttaacttgtgggatgtggctacagttccaagtagatcgtgtcaattgaattgtgggacatctagttggtgtctacaggcaattggggaattgcttgttatgaaaaacacgtacacttgggtctcagaatgtcagaagtgttgtgaaggtaaaggaggttttgtttgtttgtttgttttcatttagtttgttaaatagatgcccccagagtcttcctagtgcttgtcctacaccaaccccacctcctgccattccccaaggaacccctgagtcttctcatagtttagtaactaaaagatgaatgcccagctaaatgaggggacttagtaacagctgtagccttaacaccagtgtccatcctgactcacggatgccaactcccaccaattatttcaagtatgagatgttttacctttcatcacgtactaatgagagtcagtgtagccacagaaaaaggcttaagaaagttaacatcctgattgtgacgctgcaagtcaggtttaaaactggaagcacggcagtgctggtccaatgtctcaggctgatcaatatattgcttagagtccaaagcccaccagaggaaaggggtttttgtgagctgctagtcattaacagcaggctatttttttcttctttttttactttttgatttctgtaagctattgggaaacaggtgctgtttggttacatgagttaagttctttagtggtgatttatgagatttgcacccatcacccaagcagtatacactgccccaatttgtagtcttttataggatacacatttgttctaaataagtagaatcctttcagatagaaaccttacctagaatatcaatatttaaacatataggagtcaaatcacactgtccaaagaggggagaagggcttgaggtgaggaaggaaacacagggcccaaactataaaaactgttgattcagaaaataatctaaaaaaactattttagttttataattctgattaatgaaaaactaagcaacatactaatatatactgtttaattacacagtatttatatatacaaatatatatatcacatgtatttatacatatattaaaattatacatatatacatatgcataatttatatatcatatatgtaatatataaatatataaagcccataaaaggctagttcaggaaatagacatttttcatctagtgataaatatcaaaaaacctaaaaatacttatagaaaagaatccacctcctagaattttatcataaggaaatagtcctaaataatggggggaaagggtataggaaaaattgtatttgtagtcacgctattttatttctaaatagtggtcctattccaaaactggaaacaacttcaatatccaataacagagaaataattaaataaattttggcatatcatttcatggaatattcatcacttaaaacacatctgtaacgagcttgcaacagcctggataagcagtttaagagtaattgtttgaaagagagaggaggagaccaggtgcggtggctcacgcctgtaatcccagcactttgagaggctgaggcaggcggatcatgaggccaggagatccagaccatcctggctaacacagtgaaaccccgtttctactgaaaatacaaaaaattagctgggcgtggtggcatgcgcctgtagtcccagctactcaggaggctgaggcaggagaatcgcttaaacccaggaggcggaggttgcagtgagccaagattatgccactgcgctccagcctgagcgacagagcaagactccatctcaaattaaaaaaaaaaaaaaaaagcaaaaacaagacgaggttataaaatctggcatgcttttatgtttaaaaaaaatctctcattgaaaaacaaaccatacttagtgaaaaaatacaaaaaaaaatttatcaaattgtacagtcgtctcagctgctaagattatgaggtttttttttcactgtaactatgtatttcaaattttctataaggattgtgtaggatttttataattgtaaaaaattaagtaatcatttaatttacagaggaaaaggaaaaccagaaatacacagtttagccaattttaaaaaacacataaacacagtattttttaaaaacacagaagaaaaagaaagtagcttttcaaaatctacttcagcacttttacactgtaggcctgctgtttgcggcaaatgcaacttaaagtaattgaccaacagatgtcactgttacacttcctactttaagcatctctaaagacgcacaactttatatatgggaacaaaaccaaaaactttactaattctcatgtcatctcctgcaggactgcagctttctcatctttcagcttcatttctaaacctccttttgtaatatctggaatgttgaatgctgttctaaaatgacatacagtgaccatggttttatggttatgaaaaatacagggttctcctgctctttgattgccacccatgtgaacatcacagacttaacccacactcgtcaaaaacatggttccaggtctgaaagtaatgagccggagaacacaaggttgtcaacaggcattaaagttaatggctaaaaaaagaaaaagtgctccttagatttgtggtgctcacctcatctgtgacaggaaactggatgggtaaagagggattgcagagaatcacaataatctggtcaatcctaccaggccatctaaatgtggaagtaggtgaaccccagcccagtgctttctaaggaggagtcaatacttctgtgtcaatgaaaacaagaatgaataagaaaggagaaggtagctggatgtggtggctcacgcctgtaatccagcactttgggaggctgaggcagggaacatttttgaggtcaagagttcgagaacagcctggccaacatggtgaaaccccatctctactaaaaatacaaaaattagctgggtgtggtagctcacgcctgtaagcccagcttctcaggaggctgaggtgggaggaccgcttgaacccgggaggcagaggttgcaatgagccaagatcgtgccactgcactccagcctgagcaacagagcaagactccatctcaaaaaaacagaacaacaacaacaacaaaaagaaaacagggaaggctatgtttttctgaactaaaagtagatccatcatttgatgcagcaatccaactactgggtatctacccagaggaaaagaagtcattatacgaaaaagatacttgcacatgcatgtttattagcacaatttgcaattgcaaaactatagaaccagcccaaatccccatcaatcacaatgagtggataaataaaatgtggtatatatttacatatatacatatacacatatatatacatatatacatatacatacacacacatatatacatataccatggaatactaagccatagaaaggaatgaaataacgccatttgcagcaaactgggtaaaatcggagactattattctaagtaaagtaactcaggaatggaaaaccaaacattctatgttctcactcataagtgggagctaagctatgaggacgcaaaggcatcagaatgatacaatggactttggggacttgagggaaagggttgggggaagcgaaggataaagactacacactgggtacagtgtacactgcttacatgatgggtgcaccaaaatctcagtaatccccactaaagaacttattcatgtaaccaaacaccacctgttcgccaaaaacctattgaaattaaaaaaatttaaaaaatttaaaaaaaactgcagaggttattaaaagtgaacaaaaactttaaaaaagagaagggaggtggttatgttttttaaatgcattatcctatattctgcagattttctgccaacctagtcacctgttatttgagcagctggagagaaaggttcatgaatatggaaggaaggcagggtattcggatttcacttgagaatccagagcatatcagttggctttacatatgttattgacaaatttttagtaaaaggatattaagaagtgactagcaaccagtgggtactcccacaatgagagatctaggctgcaaagctaatgaacagagcgctctgagaacactcaggttaaatgacaaacacagtcacttccagacaagttgctagttactttctagtgtacaaatttcagatcaccaagatgcatcttcattttctgcagcccactgattttttttaaacaatgatccatacattaaatgcagctttatatacacaatttacattaaatacatattaaatgagcctctgttgaccacaaagaaccacagcacaatcaccaagatttctacttacatggagatccaagtacaattcgctcctgtttgacttctccctttcctcatgaagcaaaaatggacaggctggtcccgctctgtagcccagaacccacgcgcctccatctctgttgggaaggtctttaggtgtctgctcattgaagccgtcccagggaaagccctcagaggagatacctaaacaaacacagagaaggccatcagtgacatggcagccaaataaataaataaataaagccatatttggggaactcctacatagacttctctatgctagctcttactttgctttctaagttatatttttaagagactgctttcctttaaaagtatttctcccgacaatttctagatcacaccaacaaaaatttacaacatacgccctcatcccccaagtctattggctgtactctatgccccatattcttgcttacaggttgcatgggtcattctatctcagcatgaaatcagaggagctaggggacagaagtcaggaggtctggcctgctggctttcctacagttcctaaacagcgtcatctgagccaagtcactaatgtgtgtgttctccagggcaggaactgtgccttgttcatcttcatttctgggaacagaatcattatgcatggtgcataccggacttggacagtttgttgaacgagtgagtagtgcatgagaaacccattttggattcgcttttgtcatctctagaatcaaaggtattagtctagcttattctaacctaaactataggcaagtttaggtttgccataggatgataatcattaactatgtgccagacactgtttttagttctgttcaatttttatgacaacatatagttaggtatcattagtgttctcattttaaatggggaaactgaagtacaaagaagttaagcaatttgctcaaaatcataaaatcagtaaatggttaagctaggacttgaacccaggcagttaaacaatagagggccgtgcttttaatgaccacactatggcctctgcctgacattctattcttaagatggcaatatgtgttctataacaaaaggattttacggtcaagtaagtgtgagaaaagctacatactgtatctcttaaagaatcatgattcatgttagcatattaaagaccttgggatgccctttagtacagaaaacctaattctatataatagggttttccaaacttatttgaccacagaatccatttaaagggacatctgctaaacatgtcgcaagccacttaatgttgtactggacacttctaatgtttcatacagcactcaagttcctagtcctcttttaattcctggtaagcaaccttggcaaaattttaagccactaggcagaagttaaaggtttaggctcagtgtattttgcaatagagatcactgttgaatatacgacagagtgtttattacacataatccctgtaagagtctatttggcagtcacccaaagccaaccaatggcttctaccatgctgaaacctgacttacacgaaactagagctgagagtaaaagtcagctcagaaaggaactgcgagatagcatgcttatattagagtagcattttagaaggaagaaaatttgaaaacagctaaggtttggctgttgtttgcctgtttggtttattagttttcaatcacacttcagaatgatgcaggtcacagtgtgtctatagttgccctctagcaggctgtccacaaaacacctttctgcaaccactgagaaaaatgagagtccagggcttccccagtctatgttccccctgcagacacagttgtctagaagagtatacccaggctcttccttcatctcggtcagatcccttagaacaaagtgcctttccactcaatccccttgctacccactgtctacagacagtcttctggcctttcatttagggtctcacatgctttagagtgacccacttctagtctcaagacataggaatgaactaatgcctaaaggaacctcagggagaaggcactctgcttagcacctttgctttatgctcatgttgactctgaggaagatagtactgcttatattttaacagatgaagaaattaaagctcagacctcctttgacttctatttatatggctcatcctcctcctggactatttctattcacctttggcataaattttttaaaatttacagtatactctcactgtactacctcatcttccaagatgttttggttactaatcacatccctcattttaaatccctccacctttcatttttcttttgaagtagctgctggctttgggtaaagtttgcacagaataataaaacaatataaaacataacatatataatatgtatcacaaaacacaatgtacaacacctgaggtaagacatttgtatcatcagaggcacattgtctggtgagtgtaagttcatcatttaggtacaagagagtgaaacattcccataacaacaaggatttggggtccttgaaacacacatgcatgcatatttatgcaaacacacatgcaaacccctcacacacctgcagtggctatccaatactgcattaatgaggtgaggtgtgcaatccaattcactctctacgcagagcaaaaacaatgtcaaggtgaaagttatcttctttctggaaatggttttagttttaaagagttaatttctgatacctaaggtttaaccagacaatatccctatgaaggaaacatgcaaggtaaaaccatgatgcataataattttggcaagaatcatttggacagaaaaggaccataagtaacataaaactgaaataagtaacataaaaccattattctcaaaagtctgacaaagtaggttaggacaaatgacaaagtcaacattctgacgaccacaatgtatttataaaataatttgggaatggagagttttagtaatacaaacaactttttttcagtcaaaaataaagcacgtctgtatttattaaaatgggtaatacccaagctagtctctccagctgaataaatttaataaaaagagaaaaaaatcatctgaaattagataaatatattctgtcaaaacagtcaactgtcatttaattttccgacacaaatagatttgggggtgttagatctttagagaatattttgtgaaaaactgaatcagtcttatcagtttaaacatgtctttccttttcatgtgcatactacaaacctgttttgtactcagtattagttattttgttcctcaaagacatttcaacagtttgatcgatcacacatacacacacaggttatctgtacagctgaccacggttaatacaacgtacagcacagtcacagtaaaggtagggtgacttaccttggaaccactttgaaagtctgtgcttttcaaagccattcacatgatgagctgcacttcctgatgctaacctacaacatcagactgaggttttgctgtcaattatcaaaacaacagaagcagacagaatgcaaaggtaataatatgccatttaaaacaggaggcagtgtccacagctcatctttccaaaatagaatcagtctgtctagcaggggtacattggattattgttcccactgtttcactccctccctgcaatatgatcacgcacccacggccttttctggtctatttcccctgccacgtgacttcctttggccatctgaatgtaaacaatgtgacagtgtgccaattaaggctgtaagacgcacggtgtgttttcatgccccgccctgtgcttctgccctcaccatgagacgaacatggtcctcgggagcttcgaatgagacgtggaacatctgtcccaggcacagtcctgcaagcctggagccaagctcagtcaaacccaggcccaatcgagtgaaccttagccaactcccaggccagtacgtaaaaacaatacatatttattataagccactgagatttgaggcctatttgttgaaatagttgcctcatacactatcatgtctgctcccactagaagcactgtaattattaaagacattaaaccttttcagctgagggcttaaacacaacagtgtttttgttttgtaacttgtactgaaaaaaattattcaatgcactgcaaggatctgaaaaatcaagtgaaaaactcatggcacacccatttactcattcataccaagattcatgcacaaactacattttattaaaaagttatttaccagatattgtctttaatcgtctaagaatatacatataaaaatataccaatttcctaaaggaagtctgtgaacatactatataaccagcagatctggacaaaagtccctaagggacaaaattacagtgccttttaagctgtttcctctaattctcccatcataccaagccctcacttgacagcaatgacgaagtggttatgcatccagaaagaggagagaaaaaacaaaaaccctaagcttaaaactctcctcagttttagctcctgtgttgtagtgcccaaggcactacataaaataaaccctaagaggtaaagttttctcagccgtgaatatcagaactgatatgtacaggtagacatatcttccattatgttattcaaacgtgtacttaccagcaagaaagacagcaatctagatgtacagctaatggaaagtgacactgctaagtgcttgtggagtggatgtgtggctgtgtgtgtaatcactcatgtctgtatctaagaagacagagctgtggcaaaagtatagtctcatggctggtatctgtcaattagagatcaatgctcactaatgcaactgcccccattttcattctcagcagtgttaaatgacacaatgtcaccaaaccacctaggtagatacaattctgagaaggtgtggtatctatccaccccagcctctaactcctcactgggaagtatgtggggagagaaatgatgaatgagcaaagatggacaggcggaaggtgtggccaggcagagaaaggctgatggcaaatcaaaaagtagcagagagtggggagcaagctctgtaagtctgaacattgatgaggaaagcatccatagccatcaggcaactgcaatgtagtttgcatttctaaaatcatgcttaaattcaaataaaataaaacaaatttacagttggaaagaatcttgtatatctccccacctacatgctcattttatagttgagagaaccaaaacccatgaagattgcagtatttccaacatgcccagctagcagcaaaggcagaactaaaatctaagttctttatgctatttagagaaagatattattgccagtctccagatgagaatattgagggctaagagagaagcagacgtgaacaagttaagagcgtgggtacagggctttaacatgtgggctaaattcctggctgtgacctttactaattatttgaccttggtgaagttaccaaaactccctgagtctttttccctcatcaataaaatgaagataataagaatatgtctgatattgaactaggctcacaattattttctttcagaagacttttcctgggctgggggatagatagatttgatgggagaagcaagtaatttcctgttttaagtaaagaactctatatacaatgagggcatatccaacatcacacagtcatgtgaaaggctatttttcttttgtcagagaagataaggagaataacaataaagcttataagaattcagttgcactgcagtgcagcagatcctaaatctgttcatgttccaaaaatagaattcacgtcatcaaatgcaacagctccaagtaagtggctgatcatctctggaaacaacagctcctcagggtcgttcatagataccctatgatactccttcccagaaagtcaaacataggagcctagagccatgaatggaactatttatagtcatgcctttaaatgaaatagcattttaaggaagtatataaatatctctttgattattttattaacctccttccacggttttctcctgtgaagaatactagttgagggatgtgtattactcagactaggaaacttatgtgtggccatagttacactggatattttaacacttgaaaaacaggggcacagatgatgctaacaatggatagagcacctaggtaagtcctgatgcagaaaagatcaaggaaagaacaaatttaggagattgtaggattcactgagacattaaaagcctccgtctactcccagataataaatgctcaaaacattagatgttagtacttcaaatacttaagtgatcaaaaaattttagtatgtttggttataaagaatatgaccgggtgcagtggcccacccctgtaattccagcactttgggaagctgaggtgggcagatcactagaggtcaggagtttgagaccagcctggccaacatggcaaaaccccatctctactgaaaatacaaaaagtaactgggtgtggtgggtggtgcctgtaatcccagctacttggaaggctgaggcacaagaattgcttgaacccgggaggcagaggttgcagtgagccgagattgtgccactgcactccagcctgggcaacagagtaagactgtctcaaaaaaaacaaaaagaaaaaagaaagaatatacttgcttgttaacaaaaaacatgtatatatatttttgagatggagtctcactgtgtcacccaggctggagtgcagtggtatgattacaactcactgtagccttggcctcctgtgctcagcaatcctcctgcctcggcctcccaagtagctgggacaacaggtgtgcaccaccacacaaggctagtttttaatttttttttgtagagatagactcttgctgtgttgcctcaagtgatcctaccaccttggcctctcaaagtgttgcgattacaggcataagtcattgtgcctggccccaaaaatattattgaagaataagaatgcaaaaaaaagtcatatggcattcattacaagtaaatttgaataacattttcccttttatgtcacattattccaattattatgaggatggttgcaccagtgggaaatccaactcttgaagacatatgatgtaattactggttgtcttaatagctaaggaagtaaagtagagaaaaaattacaaaatactaagccctggattatgaaatatataataaatgatttttttaaaaacttcctttccaaaaagaaatgatcctagcaaactcacaaaaaggaatatacgtaacaaggtaaataccaaaaaaaaaaaaagaaggcacatttactattaaatgtgattgagcatacacaatacaattaagagactgaaaatacaatatggctctgagtgtccttgcaacatagtgagaatgaaaggacattctttatttcattcctatcatcaaaaggaagaaacaagctgatccctgatggctgacagaagtttttgtgatataaaattctgagaaaaacagctgtataatcttagttcccacctttgccttagctccatcccaggtgtttggtctaacaattatctttacacaatattgttgccagcactagagccaataaggctggtctagtcgtctgtcaataacctttgcccttctaaccagaaaagtctggatattaccttgattgcccaatgatctggaattaaagtgatgaactcttcatcagagctgctaagaaatggcctctataacacatccagattcgtaaatcgccaccttttgcctgagtgtcttaggcaccagagttttcctatctcccttcctccaccagtcattagtactgagaaggagtcctgtactttactccagcaccggatttatcactttctctcccaacaaatctacttttttttttttcttagacagggtctcactatatcatctaggctggagtgctgtggtgcgatcctggatcactgcagccttgacctcccgggctcaggtgacaagtgatcttcccacctcagcctcccaagtagctgggaccacatgcaccaccatgcccagctatttatttttgtatctttggattttggttttaccattttgcccaggctagtatcgaacccctaggctaaagcaatccgccagccttggctttccaaagtgctgggattacaggcatgcaccaactcgcctcgctgccccatttttatttacacatacttcagactggttgataatgtcccataggtcactggggctctggtaatttttttcagtccagaaatcacctcagtagaaagcataggtagccgggcacagcggctcatgcctgtaatcccagcactttgggaggccgaggtgggtggatcacttaagctcacgagttcaagaccagccttggtgacatggcaaaaccccatctctactaaaaaaaatacaaaaatcagccaagcctggtggcctgcgcctgtggtgccagctacttgggaggctgaggtgggaggatcacttgttacttgagcctgggaggttgaggctgcagtgagccaagatcacaccactgcactacagcctggatgacagagtgagaccctgtcttaaaaaaaaaaaaaagagagagagagagagatgggctaaaaggagcagaaaaatacttaaagaagtattggcttcaattttccaaatttgaagaaaattattaacccacagatcacagtagctcaatgactccccagcaggataaatacaaagaaaactacaataaataaactggaaaatcagtgataaaaagacaattataaaagtggacaaggaaaaaatattatgtatagaaaactaaagaatcactagacttctcagaacatgcagcccaaaagacagtggaaagagaactttaaagtgtcgaaaccaccttagggaaaaatagtggggaggagggcagacagagagataaacagagaacttccataatgataaaagagtcacttcatcaaaaagacataacatgcctacattttcattatttgtacctcgcattaataacagaacttcaaaatacatgaagcaaaactatcagaactgaaataattacataaatagacacatatttggagatgtcaatattcctttcttagtaattacaacagcttgacagaaaatcagtacagatatagaaaaactaaacattacccatcaattttacctcacatttataacacactccattcacagtaactgtagaatatgtatttttgcaagtacatatggaatttatcaaaatagaccgcacactgggccacaaaacaagtctcaatgaatttaaaaggatcaaaatcatatgaaatatattcattggctacaatggaattaaattaggtactgataacagaaaattattcggaaaatcccaaaaacttggaaatgagaccatacacttcaaaataactcataggtcaaagaagaatcacaaaggaaattagaaaatatttggaacacagctaattcaataatcagagagaaactgatagccttacttcatgctgagtgactgtcctcccccaatagggctgatggcatttctcctccggactgggggagatgtcaggcataactgatgcatgattaactcatagcaaagtggattcagtgaccacatgcttcctgaatgctgaatgctgaggcctgagctcccacctccccctctctaggcttccagaacacttgtcttctctaaaactaggcacacactacaacattattctgagagaaacatgaccagctcaagagaaagaactgggagacaatgacacaggaggttcctcaatcaacagccaggcctgatcaccctacagtgatgttcaaatccagtattcttacacaggcactcagggctttcagttagctttttagtacccacacctcacgcaggtagacaaccaatgattatgagacagcggaggagaatttctaacataaagagcaggtaaaagagtaacaggaggatgaggttgtgtcactgcatacctgctgaatcaagattttggagatggctactttcttctaccaccacagctcttactacgtggcccttttccctgcctctagttcttgccaggttcctgtaatactctctcctccctttccccttcaggcctaaggttggtaagggctttctactgttgctagttcctcggaagctcacaagcccatgcttgttttctggggcccttcaatctccacacaatctcttcagttattttcattttaaactctcttgaatagcccaggcgtggtggctcatgcctgtaatcctaacactttgggaagctgaggctggtggactgcttgagcccaggagttcaagaccagcctgggcaacatggtgaaaccccatctacaaaactccatctacaaaaaaaagacccaatctacaaaaagttagccaggtggggtggcgcgcacctgtagtctcagctactctggaggctgaggtgggaggactgcttgagcctggaaggttgaggctgcagtgaggcaagatcgtgccattgcacttcaacctgggtggcagactgagaccctgtctcaaataagtcaatctatcaataaactctttcgagtgtactgtgtgtcaggactctgactgacacaataattggcatcaggaatcatgtttatttcctaccttctagcacttctgtatgtatcactaaggcatctagggtgattgctacatgatgctcaccatgctcaattagaataatagcagcaatgtgatgtgccagtataatcttttgagagctatcaagatcagcaaactcctttcagaatgtatcatgaaagagaataggaaaattgtcataaccctaaaagaagacagtgatggtacagtgccgttctttccaggatgaattgatatgaaaataaagcatttgtaaatcaataaatgcatattagatttaaggagctgtgttgatatatttggtagggataccatatctgaaacagcacctgcaattggcatccccatttatgtttccaataatccagtcattctctaaaagtcatctagttttctcactaaacaaaaaggaatttaagtgggaatatggtatgagttaccatttctgcatttttccaagctttgaggtagcataaatctctgcaatttctccagcacatgtctttctcccagaatacacagctgtgggactcaaaagaggaggtgagactggccctttttactattatacctaataaatcatttgcataacttttgcttcctgtcattgcaactttgggcttggtgggtttggaggtcttcgtgtccaaaagaggaatgcttccagtagggaacttagccatcattccactcaacaggaagctgagagtgcttcttggccattttagtttcttatacattagagacacatttatttagttttagtgcctaacgaaatgaatctttttggtagaatagaatattttgaactgagcctagagtcttaaactttcacagtaaaaaaaaaaaaaaaaaaaggtaggaaatataaaactgcacatttggaaaaataatatagtatatgaatgcctcaataaatgaatgtcctcatatcaatattaagataacacagggaagctattgtgaaacaaatacactcaaaggtttctggtaaaggagtaaattggtctacaactttgaaaagatatttggcaatatctgaaacgggggttgacacctatgcccgaaggccaaatacagcctactgcctgttttgtacatttttacatttttaaaggaggaaagggaggaggaggggaggggtcaagatggggagagggaaaaagaggaagagaagcagttgcagcaacagaggtcttacggcccacaaagtcaaaaatatttactatttggttttacagaagaagttttcaaacccctgttctaaaatattaaacatattcatatcctttaaccaataaaaatccacttgtgtgaatctatccttctgtgaatttaagtaaatggaagctaatcataaagaatcatcatcgttgttatttgagatctattacaaatatacaaggtatccaccaaaatataatctatgacagaaaaaagtgggaaacaaaacaccatcgattgtgatatagtcattactgtggaatattatataattatttaaaatcatgtttccaaagaatatgtaatacataagaaaatgttcacaatatgacatcaagtatgaaatacaattcttaccctgattttaaacacataaaagagatcaaaatgttagcaacaagtttcttctttatatttttctgtactttctaccgttttttcaatggactttctaaatttcatttagaaaatgaagcaactattaattttataatcagaaaacaataaaaataagtaaaaaggtagaaaatggatttgaacaagccttaaccaccaaaggatggtaagacactgaaaatcatctgtaaattgaagctgcatgtcgagccaaatctggcactgactatctgccaatgatgtattatttcaagatgtgcaagttgagtatactggaggaggttggcgatttggtaaattcagttaatggtattctaatttcaaactatacttacctacataatcctgtaatctaggggtgtctaatcttttggcttccctgggccacattggaagaaaaattgtctttagccacatgtaagatacactaacactaacaatagctgatgagcttaagaaaaaaaaaaatcacaaaaaatgttttaagcaaagtttatgaatttgtattgggtcacattcaaagctgccctgggataggagttggacaagcttgctgtaattcttcatggtaatccctgccccctaactcaaatcccagtctgaagcacaaaataaattctattttaaaccaaaaatacagctatttttacctgccattctttggcagcatgagatctaacaacaagagactttatgtcattgttttaaatcctatcccatcggtcctatgattatgacatttcccttctcatagaccttcaacaacttcttgttgcatacagaatagaacccaaattctttggttggatagggagaccatttatgcttggctttcacatattcttctgaatccccatctataaccccacataggtatcccggcttccagctgtactgggctgctttccattcctcataatacacttccttgtctattcactttatttggactgactgtataccagtatctgaaagacaagtgctacccatccttcagcaccctccttaaatttcaattcctctaccaagtttacttgtgtcttccaaactaagtttatctccccttttctattcttttgggtgtactctgtacatgtatgatactacagcatgtgacgctccgttatgtgctaatttattttatgtgtatctgctttaccataaagctgagtcttcagaggttttcccctatatcaggacctgtgtctttgtaagtattactgagcaagttccagaagcattcatactcaaattcaaagacataatttcccccttaattttcaatgaaagaaggagctattgttgaaatgagaagatgtgctagggagggatgtaaatagaggagtaaaacattggggagcagaaagataaaagttttctttcaaactccaaagctagactattctcataaaactaaatttaagtaaatggaagctagtgttccatcaggtagaaggtgaacccagtcttaagtcacccctaaatgaccagatttcttctctccatccttcctcattctttcttcttttcctctctccctccttctccctgtcttctctttcttcttgacaagcaaagattccaccataaatttaaatgatattgggtattatggagaccacaatggcaggaaaagcccatggagtttgcctcgtgggttatatatgactcatgagcaaacacaaaggaaatgatgtctttctgctttttaatcctttcataaacctcctaaagttgggagacagattatggaaacattgactgacattggttttatttcatttccacaagatgaaaatttataataaaactttctcatatgggtattcagtgtaaagaaatgtacttttagcaaattttcaaaccatggaactaattaggccttctctgatattcctgtttaaaatagatgtctccagtggttattttcatggcaatctgatttttcctccatagaatgtctttaatttattttttatttgtctttaggatgcaggaaaaggcttaatggggcagaaccttacttgccttctccagtaccaggcactccagcatctgacacagtgcctgtgtttagtagatatataataatatctgttgaatacaataattgttgaatatacattacatgaacagttttatgttcagaacatccaggtttttcaggtgataagatctactcttttttatcagtcctaatgaacacttactattgagcttagcatagactctgtagcagaacagttttggtttaaatctcagctccaacctcttactagccaagagaccttggcaatttgtttaacctctctatgtcccagtctcctctgtgaaagggggaaataatggttctcaccttctggagttactataaagattaaagagttaatattatacaatggactcagagcagtgcctggcacctatagtacataaacactggctgttagaattattactctctgctcagtgctgaattagaccctgtagagggcaaaaaggtagaatgagacagagctccatttctccaaaggattcactttcgagttccaatgaatggttcaacaaatgtgttctctaattttatccattgtgaaatatttgaaatgttgtttctcatcctcccttcaaactaaaatataccaaaggagaaaaacaaaaaccctaatccaccaaaatgagcttcattttgttatgtagaagagtatttaaggtgccagggtcttttcagaatgttttgttcagcaaagttatcatggtttctattctattacaccttgaatttatttggtcaagcttaaaattaacccaaatcatctttaatttaggaacctgtttttagcatcttatcactatctgaaaattgcccttttcttccccctgaggtaatttcaaatgttattttaccatgccttgggggcataatcctaccagaaaatacagctccaatttaaaatgcaagtcagaagaaaaatcaatttactaaaagaaaattaacttcatcggcaaaattttcaggaaggaactgatccttaaagttaacaaaatctgtactaagaataaaattgagttcatcatatatttgtcagctgaaaaaaacttttatcaatacagtcaagtgcatgataaacattccctaaaacgacttcaccaaatgataaaatagaaacttttgagactcacattggtaagaaatgataagatgcacaaatttgtcaataatggcttcaaaacaacaaagagcattagactgaactgtatggtgctgacaagtatttcaggagtcatgtttttactttgggcttaaattttacttataaatatgtaagtggactttcttgccaaattttcacgatttacaatttaaaatgagtcacaacagtgacttgttgctaaggaatagaagcaccaaataatttattttctttttatttgaaatgacaattatatgtattactgatagagatgcaggaagtttgaaagccacaaccaccctggtatgtggttggggaaaatgatacaacagaggactcactcagcacaactgaaacatgagatgaacctaagatagcgccagtcactgagaactcaatcagctaaaggaaatgaaaataaaattactagggaagctagtaatacgtatgtattcctgaagcaatgttttccacctaatgtaattctcaaatagttttgtgattttccatggagccaaggattgtgtgaattaactgaaaaagaaaaaagagtaaaggaaaaatgagataatttgatataaatttgtaaaggtattactttactaaagggatttgacactacttgctttgcagaaattaaaatatatcatttctatgttaaaaacaatgctaatttcagtcttaatatttgcaccatccaaagaaagagcaaaaagctgaatctaattggtggtgatttctgtgataagcaataagcaaaagatagaatgaccctctccctctccaagagctctgagaggtggtggagatgccctgggatgtggcactttgcaagctggggagctatctcactacatagtacatgctctggtctgacacaatctctctcactgtcttcaaagagggaatgagcaaccaaagggttaatattaaacatttttttcccctggctgtaatgattctaagacaggtgctctctgtgctctggatgtttcattactaaatggagctatgtccccactggtcagaactggggagcaggggtcatccctcagaattagaaacaaagactttccttgggccactttgagatcctcctgtcaagaaaaaaataaaacggacaataaaagggtaggggttgcaattaatagctagcataatttaccctattaaaaataggattgtaggggatttggtggggtatcagaggaatctagaggataatttagcagaagactcccataatattatctagatggactgtcaatggttcagacttctcagaaataaacggttgtcttcaccaaagaatccagaccagctgaaatgctgcctaaaggcaaggctgacttgaaatgggtaatgactggggaaaggtttacagactatatggctttgagatcaggcggaaaaatagggaatcttgactaaaactgtattttcttatgtactgtttggatatctaaagattaattacttcctgttttctctttcaataaatatctacttttccttttcttcacttttttttggtctcactactgggatatattatttacaataaaagtatccattgattcataaggttataaaatgttgtaataggacaagaaaaaaaaaacttctcagcaacgactcaaagaacagggtgcctatggcatcactccagatctcattactgtctgagcttgtactgtctcctattagtgagaaagggtttgcagttatgcctggtagagctgagtctgctgctctttgatgtgtagcatgaaggggtgaaagctggaaagtaccccttagaatggctgtccatcccatgattgttctgccttctctcggaactgctcccagtacataaggggaggctctgagcagccatgtctcaacctgatctggagtcgctggatctgaatcttataaatggcagaaaatatccaggaacttttgcttatgggattctcagtacttcctggttgccacctggcccaatattactattcaatttttccttgcttcttaacataccataatgttctgtaaataaattcctattttgattacagctaaccagaatccacacacacacacacacacacgcacgcacacacacacagacacaaaacgctaagcaacgagaatgccaaaatttcatttggcattgtctctgtggccttttttttaaagtcagctttcttcaatgtgtacatgattctacaaaagtgtataaacatcatttaaatctattagcttttagaggaattttgagtcattctgatatatccccaaattttcatcatctcatggaacttctcaggagcatccagcagggttgaatgcatactttttcttgaagttccttttcagaaaacactctttccatccaagttctcctgagttcactgttcactcttcagttgccttgctggctcctcatccttctaaatcagtgttctaaatctcagcaccattgaaattttgggccagataactgttttctgtgggaggatgacctttgcactgtacaataggatgttcagcagcatcccttgacctctactcactagttaatagtagcatcccctccccaatcccttggccaactaaaatctctgaaatcgcccctagttgagaagcactgctctaaatgtttcagcaccccaaagatatgtgcagaatcttctctgtcttcattcactccatctgtcatctcattcagtctcagttttaaatatcatctcagctctagtgacttccaaattaatgtatctggccataagctctcgccctatctcatacaggcacccaagtactctactcattgcttggctaatactcattccaaactctttattttccttctaactttgttcttcccccagtctttcccacctaattaaatagctctcagtttctaagattaaaacctgcttcatccttgagtcctctctttccctcacattctgcctaaattttataagcaagacctgtttgctctaccaccaaacagtatcccaaatctgatcacttcacacatcattaccacctcagtctacgccactacctctctcatctgggcaagtggaaaaaatctcccagctcttcttccttcttccactcgtgcctagacacaatactctccacaaagcatgccaacgatcttttaaaaatgtcacaccattcctcagatcaaaatcctccagtggcttcccatcatagttaaaataaaatgcaaatccctggccttaaagaacatcactggacttgatccccgcctatcactttctccccatctcctaacctctcccttacttcattccagccaccctcaccttcttgctgttttgtaatgacaccaacctcattcctgcctttggcatttacactggtgttttcttggctaagatgttccccaggctgttaaatggctgatttcttcacatcactcaagttcaagttcatgctcaaatatccttcgagcagaaaggctttcttgtcactgcctttttgccaacaagctctctagtattttacccatcgtacttatcattacctgaaactaaataatgaatgagtctcaaaatcaactctagcaatgcaagatatcagatctggttttcttctgtatataggtggtactatgatgatccctctttgaagacatttaaataaaatgtaaatgctagtatattttttatttttcatgctggccccttatttattacagttaactctggaagccacagaggtgtgtttgcagatcttctatcatgaaaataacaaaggtttcagtttggatgccgtgttattgggagtgagggactagaattcaacactggcaagaattctgtgccaggttcagctccagtaagaaagagtctcgtgatttctctgggagagcaatgccttccctggcacaggatggatggtggtggggtgtgtgtgtgtcatgtttttaccatcctttgactaagccctctctgttttcttgcctactcattttttggcagttcttactggcatcttcattggcttaactagaaaaaagaaaagatatgaaactcaatcagacaactaaacactgctttggtaaaagttttgatggagggggaaaaacataaagctaaaggacatgctgcaacaatcagtgggtgtgaatcttctatctacatgtctcttactcccatgagtagggaaaggagataatggcacataagaagagaaaatacattcaaaatagtattattttactctccttgccctccaagaaaaaacagcttaagttattagattgcaaggtagataacataattctctaactctgctattaaacaacaagaggcctggagaaactgaacttaaagagaaaaaaagaagaaagttaaaggattttttaaaaggctactatataatgaaaactacccaatcattcaaattcctctccccactcttaagaaaggtcaactgatagcccttggctcctgatgtgtaactatatcctattcctcttttgatgttctcaccaagagggatttaattgccttttccttgattcattagatggtcacttcaaagagaccttcaagaggcaacatttgcccaaacaactcccctgtcttagtaaatccagataaaacccaaaaagcaattcatcctaaatttcacacattgttgtctttggcctctgtcagtgacctcagcctacaatattgattaccactctgcctcccaatatgaatccttcagacaatcaatcagttaccaggacagagaaggagttatccagtctaatactaaaaatgtccccatgcctacaattaacccaagaataaactaaacaacctagcaaacttgtcataactttaccatttataacctatttcttctcccaaaagcaaggaaggcataaaacatacttggtctagagtgtgctagactctattcaagacaaagatggatacttggtttagtaacaaactaaaatattttattaaattaacgaatgtctttgttctaaaatgcaagtaaggtttttgaggttcctgtacaaaaacaacatagaaatccactatagtttccttacttttgtcaaaacattaatagataaatggccaaagggaaaataaaaataaacaaccaatgagtatggggaaattttaaacaccattagtaatagctaaaagaattgcaagccaaatgaaatgcgagcactattcacaatagcaaagacagggaatcaacctaatgtcaatcgatgacagattggataaagaaaatgtggtatatataacaccatggaatactacacagccataaaaaagaatgaaatcatgtcttttgtgggaacatggatggagctggaggctactatccttagcaaactaaggcaggaacagaaaatcaaatactgcgtgttctcacttataagcaagagctacatggtaagaacttatgaacacaaagaaggaaacaaatactggggcatacttaatgggggagcatgagaggagggagagaaacagaaacaatattcgatactgggcctaatacctgggtgatgaaataatatgtacaacaaccccccatgacacgtttacctatgtaacaaatctttacatgtatccccaaatctaaaatgaaagttaaaaaaaaaaaatgcaagctcaaagaacatttcactgtaaatcaggaagtctaaaaccttaaaaacctaaaaaagtaagacagtgcccatggatgtttaagttagcaccagcacttcacctagcaactggacacagcaagttcccattaaatatttattgaatacataaatgggtaagtgcacgaatactcttcaggcaaaaagtatattgaataaaatttggagaaacaatttggtaataaatattaaaataactgataattgtcatacttttgacaatataacgcttctcctaggaatctaccataaacaaattctctaaaatgcaaacattctatgcaaaaatacctgtcagattattaggacactaaaaaaccataagcaagtaaagtgtccagaattaggtaaataatacatagatggtctattctctttgcagaattgttcacaataactgaaacaatatttatgaaaagttaaaaaacacaggaaatgcttataacatgtggaaccaaaaggttatgtatcaagttcaggaaattttttaaagtacagtaaaaagactggaaataaatgtaaattttagcagtaatttttctatgggtggtgataatggaaggtttttttcgtatccttatgaatcttctatatttttctataatggccatataatagttttgtaacaaaaaggtaaaattctgtattaaccaaggagagcattttttgagaatagctattctgtcatgcatctcaaataatatcagtaaaacacgtccccccgcccctcacattgacgcttctttttctttttaatatttgattatattcagattaaatttatataaacacagatcattaaagcattttgatgactaacagtcttttatttaaaaatgcaatattaaatcccaattaaaactattttgctattcctttagccattttctctgttattaaaacaaaaataagaacaacttgtcagtatttttagtccattaaaattttcccacattaaaacaatttttaatgtcttggcatgcagtatatttttactaaccttaaagaagttctaaaaacaactcctttacatttttcaagatgcctttgtacagcaattatgataattattccgagtaaatgagttaacacatgtgaaaaagtgctatggaattataaactgccattcaaatgttagttttacatttttatggtatgctattcctgaccttacattcatttctcatggcatatttccatttccctcacaatctatgagatgattcatttgtgtgttttccatggtgctttgcacatgccctctataaatcacactgatttttaaaatgtacattgtaaaatgctttcaaccctacacaagttaatttaaaaaataaaaaaacttaaaggatcctttgaaatgcaaatcgaaacctcagtaggataccacttcactgggatggctataattaaaaaggcagataacaacaagtgttcatgaggctgtgaagaagttgggactctcacaagattgctggtgggagcctaaaatggtacagcagctccagaaaacagtcttggcatttcctcaaaaggttaaatcaagaattagaatacaactcagcaatttcactcctagaaataaatccaagaaatataaaagcacatgtccacacaaaaacttgtacacaaatgttcgtagcattacgcataatagccaaaaggtggaaataactcaaatgtttgtctacttatgaatggataaacaaaatgtgctatatccatatgaaggagtatcttttgcctataaaaaaatctcaaaaacatgctaagtagatgtggccagtcacaaagaccacaatattgcatgataccacttacatgaaatttccagaacaggcaaatctacggaggcagaaagaagctcagtgataacttgggctggacggggttgtgggaaaatggtgagtgacttctgatggtatgggggttttgggggaggtgatgaaaatgttataaagttgattttgatgatggttgtacaactgaatatattagaaaccactgaattgtacattttaaatgagtgaattatatggcatgtgtattatatcttaataaagctgtttttaaaaagactcaagttaccattttatatgaattggttgtatcacattttactgtaattttttggaaagaactgtagtgttaacaaagtttttgtatctttttacaatttcatgtctatgaaaacaaaaagctatataaataaagattttaaccacagcatttttattggtttcaacttggaaacaatttaaatgtctaataatggatttagtaccatagtcatctacatgataaaatgttaccccttaaaattataaaggtataattaaagagatggtatataaacattagaagtttgaaataatgttaggtggcagtgcataaaacaaaatatttttatataattttgtttccatgacctttgttatttaaaaacacctatctctatgaagagttgaggtggttggattatagaagattttgttgttctgtactagttttcttacataattcttttaattaagaaaagaggaactgttattgctccattaaacaagtactaagcacaactatgcaatgaaattaaaaggttccctagagatgccgaacctaagagcattcggtacctgcagcaaagaatttcaggcactagtgcttagtttaacccctatcataaaaacactccaaagatattagaggcaagaaggtggttacaaaaattccagctcatcaactgactggcctatattctacttgtacatctggtgtattttttcaccactacttgttgagtacgtgataacagtcacggctgcccaatcaacagaattttaggatattttccctgttctgctagagatcacatgggaaatgtgggttgctaggaagtggtgtgggtaaatggcaagaaatgaagggcatttgcagcagagttatccaaatgtcaaggcctacacagctactgggtttatatcgtcagaaaggttaagcctccaggttacagctgccctaggcagtcctggtgtactgggacaaaggggaaggcagggaaagtctaagagaaccttcgctgttaggtgctttgacaacagtgtcttctctattttcttcacaatgcctcagtgtggcggaacaaaagaacaaaatacttatatctaaagtacaaccaaagtgtttaacacccccaaggcatatctacctctcaatatgctgtttcaaatatctgcatttattggtgtaatttggatgctttgtggccaaagcttgacctgtgtactgtgtgatcatttgttagggggttgctcactttctgacatattcttacctaaaggtcagtgggctccttgacatgaattcaaacaacttcagtgaagtaattaaacaggatgagtgttgccatgtatttgtaacgtaggtccactacaaaatttgaattatctattgttttaaactatataagcttatttttttcaattaatagttcagtgatttcattccagcctttctttctttacaaaatttttgttgttgtcttatactgtttatgtaacatagatgtgaacatagggtacgatatagacaattatgcagcctcttttttccaacaacagtttgctcctccatgaagtacgaccctgctcccccatctttagtcaatacctgcgctcctacagaaaacacaaaaatcatccagtgtcagtatacggaggcaccttcctctacagcccacctcataccccaatttaaatagtaccaccacccaccttctgttacttctcccccttctagacaggggccccacgttgaacactgtgcattggattcctggtgctccacctcagagccagcttccatggccacgtcagttctttcatctgtgactccttccagacggtcttacagctgaggcccctgaggtaccagcacacttcaaaacagagccttctttaacaatgaaaccctgactggaaactgcttctactgttcctttaattagccttaacgatgttttcacccacaagtgtgggaaaccagatccttagccacctacctgctccttagctcaggaattgctctaggctcagttatctaaggtccaagtcaagcctcctccccttggcagttctccaagatcttgtaagctggtttcctacccaacaccttctcttggagcagctctgttcagaattgtcagcccggtttccctctgagcctgttctgccgtcaaggtcctataggacactactgctagtgcctgccctttatatctcaatgtgctgcaagattggacaggaggcaccacatggcctcctaggccaggcctatgggttattatttctacaagtccttgcttgtccaaggacgaggaatgaagcagctcaggactctaaagtatagcatcctaaaagcctaacttctggacagtgacataagaagaaataattggcctctggctgcctgaacatttagacctaaacataaatatatgcagaaatgataaaaatatgaatattttgcaaagaatctgcataagtgttgaacatggaatgtgtggccagtggattccggaagcctgtctgtcacatctgttccgtttcagaaacaagtcattgtcgatccaatcatttgaatcatccagtcgcttgtttgtgtacccaagaacaccacgcaaacgcgagtctctcctcgtctcatgacaaaagcacttaggatttccttcccctgccacatgaccaacaatgcaccttcttttggagagagcctgtgggtaaatagtcacaactgctgtaatgtctcctaaactataaactccatatttctcatcacctgacaggtagcatgacccaaatgccccaaaacaactacagaactatcattaaaggaatagaaataatcctactttagctgataaaatttaagatctttgacttctggaaattaacttttttcccctcccttattttgcctatccatgtttgaaaagatgcaagcatctctacgttactgtccagccagctaactgaaaagtttaggggtctggtggctgggcaggcctcagaagataaactgacctgcactgatccttcattcaatatatgatccatgtattgattttatagagtcctcaagacttcatctatcaatcagtcaaaatgctgattaagcacccactatgccaggcacggaatcatatgatacaaagataactaagacaaggcccttgccttcaaggagtccagtctcccatggggaaaatgaagaactaaataaattcttagaatttaagtgttaaaaggagagtacttaagaaataaagagcagagttgcctaaggctgtcctataaggagggtgggaggctaggagtcacaatgggacacttctcatgggaaataatacttgaaggatgaataaaatctaacgagtcaaatcagaagaaacatgtacacataaaagaatgtatgtgtaagaagatggcatattttcaacggactggtatgtgggttgcttatgaaagaggtaggcaaggctcaggttgaggtccttgtgtacagccttgctaaggaaactggatttcatccttaagccccccccccccacacacacacgcacacacacaaacttgctgtcttgccagcctccctcacatacaccctcccccacctctcctatcttttacattcaaataattcttccacaaccacaatacactgagcacctgaaatccagctgtgcacagcacctgcatcaggtaattgtctggaaattcttgcctgtttcctctaaacctgttcttcctcacccttcctgcctctcatatccctaaacctatgctccgctcccatgttgctatttctggccagactttcagttaccacttagaagttccctttccaccttatggcttgactcttaactctttgtggtcatgagattttattaaccttagcagcttccaatgagaggaattctccaccacctttactccaaccagcaaatccatttgcatcattattcatttcaactagattctctcacacacctgcttgcaataatagtaagtttctcaggtagctttgggctgggctgaattaaagaattttcttagggtgaatggggactgtaatcactcaccttaaaggtatatccagaaagactatagagatccaactataaaaagacattcctgagttttagctatgtccctggcatttggatagtactatggttttccttagccttattagtagttacttaaatccccatttatacagaaaaaagatgtaaacgtagactaactttttcactgggattgacctagtctaggaagcataatgttctactttcctttatacctgtttataaaactcttttaaagtatccttggttcacattaatctgtgcttcatccaaggacaagctttggaaaatcacagcagccaagttgcaacaaatccgaggcagccaactgttcaaaccgtgttcaaataaggcaaacgcccagctgtagccaatccagctgtttctatgcctcatttccgttttctgtctataaatgttatccgaccatgcggcagccctgaagtcattctaagcctattcttgttctgggggctgattcaagaatcgttctttgctcaattaaattctgttaaatttagtttgtcgaaagttttttttttaattttttaacacctcccaggcttaaattatttctgctcattatttggcactccattccagcctcttccagcaaaactgcctgtgataaagcagttgtagagaggaaattcatattgaagcccaaacatgattataagatgcgaaaacaaataatactagatatggcttttttttccctcatgagaaatagtcgacaaagtataggccttgaattcaggaaggttactatccatctgactttgggcaggtccttcatagagaaaatggaaataacagagatctttcgaaagtttgttgaggattaaagaaaacgaagtacttgaaacacgttttacagcactcaataaatgcttattattactattgtttccaccaatacaacactaccactattcctatcattaccacaaccaattaagtgtggcactgacccaaatttcagaggagctatggacgatcctgcagagactgagaaatatcctatttgaaataaagttagcctcagatccaggtaaatcacttacatagtgagagcttaagaacaatggaggatctagtttggagaaattactcccctctaacaactctcacggagtccccaacccctactccaaaagagagagagagaaaacaaatccagggtgccactgctggaagttatacgccctcagattctggcaataacaacgaaagtatttgtaatgtcctgccataaagaagacaatgcagaaattccacatctccttaagagtaatctaaaatcttgaaagcatcgaaaccatagctgcattttgattactggcattctgagaaatacacaggggctgagagattgacaaggtagcattcatttctcggcgttttcttatttaactggcatatgctcttgaacatctttttccccacacaagtaatttaaccttaatatgcttttggaaaatctgaactacggattaagctgaatgtttgctccttgcacctcaataaacttacggagtccacttcagggatcaaaatttatagatacgtggaatgagatatttaacaaatgttttgcagtgattccaataaataaacattaatttctgaactgtgcttcacccacatttactagagattaactattatctagcaaacaacatttgtactctcttgatgagacagaaggaacacaaagattaatattgcctcaaaggaagaaccactagagcaaacaatggttatgaagcatactcaggaccatgtagcaaattagtgtttgaactaagaataaagttcagattgacctcgcattcaaatgcctgttcttcatctagtttaggttatgggtgatggagtggcagtacggaagagaaataatactgtttttcgtgttcctagaaagaaaattgttgttaatttgcaaagacttttgcatcaaaataatgatatagtgtgttgtgaatttgcaaaaattttctaaaactgcttctgactttccacaagaagaaatcacatgaattctgagaaaatgtaaatacatgtgcatgtatctctatggaatgccaatacaccacaaaatgtagtttgcaaacctaaacttatataattcactgcctaacatcctccatgggaaactagctttttctgttttagttgctagttccaaccaagcaattatatcgtaagagattttctcatttgttatattaataactttccttatagtttaacatccagtccatttggtacccttggaacagttgatgattgtccaaacacaaaaattctcaggggcatactaagaagtccatctaaatgattagaacaaaccagaaaaatggagatcatggcttcaaataagcaccagcaaacagagaaataggaaagtaaaaaatgtcaatttctcccttaatgctgaaattaattacctttacataatttatttttcctaggtaatttttctaatttcagtataaacttgttgataagaatcaagtgaaacttgtttgacaggaatgagggacagttcctgtaggaaacaagaaatcagaaaatctcttcctctcacatcctaataatgctcatattaaatattaaatacaaaaagcatgatttaaacaatttccatatgaaatattagatacaaatattttcacctattttggttaaataatctagattaagtatttcttgatattgatacagcattttattacatcaacctatctttaaagaatggtataaaatctttaaatttcaaacaatttctagtcacattcatactccaaagtctttatgaagaaaataatgtctataaaaaaagattggccgtaaaccttcctttacaaaaaaaaaaaaaattagacacataaattcttagttttgttcaacataattgaatgaaaatgctaatattcagatggtataatttaaaaaattggagatcagcacccctgcaggtatcaactggaggacatctgaatcaacttatgcgacaaaacaatgacttttcagctagaattcttcatagttcagcccataaaaactagaaagctaaaaacactaagtagagagaaacttctattctgatgatctagttagattcatctctatgttcaatgaacacccttctctctccacctgcaacccagagaacaggcttctgttttcaagcttaccttcctctggggttaccgacctcctgtgccggcacttccaaatcctgggaactgaaatggactgtccatatcttgggctacagtggtagcaggcacccatggtgccaaagggtggggagcctgtggtaaacatgatagattctcaggacagcctgggaggaaggagaatgtgggggatgtgcctcccctgctccatcgcaagagcaactgctacagtgccacccaggaggagactctgccaagcattaatgagtccaccgtccgtacgctcagtgggccagacaggtttcgccactttatagccctattaatgataaaactttctgtaaaaaaccagcactattcttgaagagcttgcttttattttctttctctttcaagggatagaagtgatcactctgttttacaaaagatgttttcagttaaacacaaaacttccaaaaattttttcatttttttgaatcatctctcaaaactaagctctcatattctaaaaactgtttgtactatattcgtctttaaaatgtgttaggaatttcattttcagattttgaaagccagtcttcttctttgctctcataaaatgacctccccatcactaggtttagccttgcatgtaaactatgaaaaatcactgtataattatcttaatgagactttgtgtttatattgtgtcttctatctaaagagctcaaagcgttttgcaaacatgatcttattaagcgtcacaacacctcattcaggaatgcgatggtaaggattattattatcaattttaacaggtggggaaactaagagattagcaattaaatgactcaatttgaggttacaatgttagttaaaggcacagtttgattcaggactctgacatctatttccaaggacatacccaagtgaccaatggagagcagcatagtgaaatgaaaattgtttttcacttctcagaaataatctgttcttttgctctacggctttgaagaacattaaacataaggcaattacaaaataatttgtttacaaaacttggcacaccctgctaaagatagcagatgtgctaactccagtcactttattctccttgctgaccctttccaagggccatcatcatcttccaggtcaatggattaggttaccagttgtgcccatagtgtttacagagtggttagctactgcacttttcctacacaccggcagggaagacatgttcaaagttagccatctagtgcatgtttattggtggacattccagcaacaaggaattgtataatccaaaaaatgagaaaacctcatgtcgccaaccccagagattactatttttttatgtggggatatacgaacacacacgtagtgataccaagatactgttcggcagcttttgttgtcttttcgtgttctggtattcctggatcattggtgtgtcagttcatatatatctacatcattcttttaagtgactacatacccattttacagacatatatataagatatggaaaaatttattctacctattacccttttactgcacatttggtttttttaatcctatgaacattcttgcatgtttatgtatttttaaaagtatttcttttgaatctactttccatttttttacaagctctccaggactctttcttctgaaaatatacctgttgcactatacactgaactacttatagtacagtaagcccatcatcttggatgcaaagtaaattcacctcttttcctcccattgcttcttgatagaggttttagtcttaattataggatagtactctgccttcattcatataacccaaaaatgtaaactggagaaccttccacatgggacagatgaaaggttggctagatgatgttgtaacaagagtatacaataccccatctatgatttacagtctactttctccaaggacttagatcaacaacaacaaaaaattaaactcttgccttttatcaatagagcagtgggtcctgtgtcttgaaacaaaaagtattctgcaaataaaacttcatcatatgcctgattctgagtttcaataccacaatgaccaattactttgtacctctgctccctcagaccacatggcggattcagggtcacattcaatgccagtgtcaatattgtttacaatgttctggactgtctataaattgagagcacaaagggagaaactcattccctcatttccagtattacatgtagttctatatgatacaaaggtagaaatcatttgtctattacaccatttcccagtaaagtacatagttgacaagttggttttgttttgtttgttttgttttttagatagtcttgctctgtcgccagggtagagtgcagtggcgcaatcttggctcactgcaacctccacctcccgggttcaactgattctcgtgcctcagcctcctgagtagctgggattacaggtgtcagccaccatgcccagcttctttttgtatgtttagtagagacaagatttcaccatgttggccaggatggtctcaatctcctgacccctcaagtgatccgcctgcctcagcctcccaaagtgctaggattataggcgtgagccaccacacccggccaaatttttgtttttctgtttgtttgaattttaggaatttgaaaacaaaaagaaagcagtagacttagagccacaataagaaaaatctagaacttaattaggtctctctcattgtgttaccaattaattcatttattcatttaccaaaagtgtactgcaagcaaacaatatgaagaggacacgatctctactttcaaggagcacaatacagtcaggccaatagacaaagaacagacaaataaagaatactactctggaagtgcaggaaagggcctgggaacttttacagttaactacacagtgaaacaaattatcccttgtccacggaattaagtgcaatgttcttaggtgaaacctaaaagattgaaaactctgacctatagtcaccaaaaaaagtgaataagctaagtcttatttattcttgtcatattccaattttgtgtttctactccgtaaaacgttgttgtgttccgcaaattcaagtaaccatgtaattgtgctttaaaagaagaaaattttttaacccaggcatgtattaaacaattttctcccaaaaagtacatgcctggtgggaaagtaaggtaggtcagagtaggttttataaaattagtattggctttagacagtacacattggctcatccttttactgctcagcccacagtacatttcatgtataccttctagatgtcccaagtatttaaaatgcaacaggataaacaaccaggccaatattctgacatcaccttctaaacagtaccactagctaatgcagcagtaataaaatctaatggccactagtgacaggtacaatgtgagagagaaaacttggagtttgtgtcaaatctaggaacactaaattggcacatgctggcctatcctactccaggtttgctccttcaaaaagctaatgatgtgtgtcaacaaagattgaccacggcaacagattgctgccattattctgttacataatctgaaagaagagggaactggaatatttcttatatataggaatagaaagagattgacatagtataggctatccaatcttgataaagcaaaccaacatctatgcagcatgtactatgtgccaggcagtgagctaaatgctttatatatacatggcctaacaatatcctgctaggtaattaatgtcacaaataaaaagacaggccgagagaggttaagtaatctgaccatgttcacacaactaaataggtttacagcatctccacatccttataactaaagcccaaattgtagaatcatctagaatgcctttctttcaacgtcatatcgtcaagccttgtggatctatttgcgcaatgttttcacatccatccacttatttccaggcccaattcaagtccccatcaactggggatcaccaactggccttcctttttctaacttatttctgtccactctgctgcttaatctttccaaatcaaaactggggtcatgtcactcctttgctcaaaggccttccatagcttttcaccatctactgaattaggtaaatactcctgaatctggcattcaaagcctactgcactatatagtatacagacttggttcaaacaatgtttgttgaatgaatacatggcactaagctaagactcactatctgtggcaatagttccccaaagtagtatcatagcatattaagtaataaatatgtcctcaaaagataaatacaaggcctagaatctatttcaccctaaaaccaagaatattgaggaaaaattaagtctaacatatggtatgggggtacaggttatatagtgagggttgttgatcaaacagctagctattttatagaatgcatgttttaacacagattaagttttccaagacatgaacgtcccttccatgaattcctcactccaacatcagcacattgcttcctccatttggccttttggctccactacgtaaagtttcttagttagaacttcttgtattacaagtggcagaaatccaactaaactggcttaggcagaatagaatttgttcatataaccaaaaagtccaggattacaggcatggagctcaaatgatataaggaatctctctacatctctcgattctgttctcccctcatggtatcaaagataatcattacaacttcacaattagattcttccagctcagtaaccatagctactaagacagtgtcccaactattccagcaaaggactggggaactactctctagagtataacttagaaaatgtgcccgtccataaacagatcacagtgaccaggtgacgtgaattatcattcagtcctgggttgaggatcatctctagatccaatagatcagcttcatcctaaccatgcagagtgcaaagggtgagacgtggcttttcaaaagaaaagtgaggtgatgttaaagacaaaaaggaaacagatgttatgtggaggaaaaaaacacattgacattcactgtagaaaagttctgagacataaaagtgagaagggggtctggtcagcgtcttgctgtgctgttatagcctctccgggctacttctgatcaatgagtaggaccctctgtacatttcaccccccttgccattttgtgcctttatcagtaaagcttcccatggccctgccattcagcagaggcggcagctgcatgaccttcttaaattactgcttgggactgagcattgggattgctttaaagctctcccaaagtgatcctaatgtgtagccagggttgagtcatcggagtaggaaagcccttggtcttcaccatcagcatatacaaatattgcattaatcttctagaatgtatttggtatctaataatctgtgttcttttcaataaaaatatctgagattattcctttcattttcagaaactgatccacaaagtctggaaggagagggaggaaatctcacaaatcagacactaaatagcactcctttgtgctccttaattttggattttgttttcttttttgcatgggatcaattcaatactagatgaaaaaaatgcttttcatttttctgcatttttttttttaatttggaacgggaaacaaatcatagagccttgtttggcacaagggcaaatgttaaagatactatgtgccactcccctccactgaggttttgatttctttgaaatcagaggcaattcaaatgaagttatattcctggaatgtataaaatcccttctcgcatccatgtctactctatcatggaatgcttaaacaatttaaagcgactgagtttttccaccagcccctctctgtgaaataacataatgccttagaacattacatctagggaggccaaatgatgcggtagaatgcagagtttgaatccctgatccatcacttactgtgaatcacttactcagcttaagaaggtcacctaatttttgtcttccataaaatggaggaaataacctctctcaaagactcttgtaaagtttagagataatacatagaaagcttctgatgcatagtaagccgtcaagaaatgttagcaatcatcatttaggaaaatagtttccttttaaaattcagtcttgaaggttagttctagttgaagaaaggtagactcttcctagatgtaccagtgcactaagacaatatgtgtagaagattatttaaaggaaatatctaatggggttatacaaattagttatgtctggtcttcaaatgaacccttctcaaatttggatatctaaattacagcttaaaaaaattcagaataggtggggcatggtgtctcacacctgtaatcccagcacttcggaaggccaaggcgggcagatcacttgaggtcaggaattcaagactagcctggtcaacatggtgaaacctcgtctctactaaaatacaaaaattagtcaggtgtctcaaaaaaaaaaaaaaattaagaatgaagtctgttaaatggccaactttgtatggtgaaattttggtaaaaactcccactgttttagtgactgagcccttcctattttcatgtagttcatcaagaatgtgcttcatcagtaatactaaatctctaaatgtttaacttctcaagcatgactgattggctatagcctattgaaaagtgccaaatttctttctaaaaaccatctctaacaattcacggttgaaggcttttttgtgcagtaagtcactaagttaggaaagtggcttctaaatctacacatgagataacagtaataccaaactcacagtgcagttgtgaaaaacagataaggtggatgaaagggctttgcaggtgataaagcactgtgtaaatgttacgcttttgcagctgtggctgccacagctgctgactaaatgagtttatccccggtcatgaggagcatacatcctcattagagacatggtgtgttattaagcaccacctaaagacagagagttttcctagacttcagagaaggaagatgggtggaaagatcaaggaaacaccactgtgaggcaggtacggcaccaggccctcatggatgggcaacagtctaatagagaggaggcagaaggtcactgtgggcaggcagtccagcagagcagcacgcagtgtgcaccaaaaggagcctggaggcccagagcttctggagggtgagaggagaaggtgggtgcagagggcagagtggatcccataacgtccaaaattttttcaagacagaccaactctacatctactcctcttattcgctgagtacctccaaaactcactgaaaaactccatagatttagctgaagttcttagcacttctgcccattcttcaatagaccagaaagaagaaaggaagcagcaggaaatgggcggaagtgttaagttgcaaatcctggcagcatgcccagaatgggaccaactcagcagacaggaagcgaaggcaataaaagagcaatctacgctacaggcaggctggagcagaaactcgggaaaggagggaagacagattactggaacagccagtttgcagggccatgaaacccgaactcttttcgatccgccttcctggcgagtcttctggctctgaaactttgggaaggaaaactgatacccataaataactgtggctgtataactgcaaagtgggataaacgtttcatcttgattaaacgtaaggtgactcctgacaaagaactgtggttggctgactctgtggagaggcttgcaagatgctgtcatgactacatgtgggagtttgagaaaactgcaagatgcatgttgcaaaaagacatattaagctttctgctgttttccaggcactgtatcaggagctggttgggggagtgatgaacgagatagcatcctgttaacaagcagtagcagacttcccatgttacattctctcaaacagagaggaggtcaggccagatctgtttctcctcaaaaatataatctcaagaaaaatcaactggtcggatcatcactacctaaccacagatctccctccttattcttcacaacaagaatccgtcaaataagtaacgtcatggttaatgctcctccacattcaacctggaccctaaatccctctaaataacttgactctgttcatacacagaccacccactttaccagtctcaaaggatggaccagaacaactatttccttgagttaatgagtgaacctacatctaactgtaaataaaacactaaaaataggtaactattacttactaaatgaaacccaagtgtaactttccattaaactcaacctgaataaagtttttaaacagtgaaccttttaaaacagaaaccagtctgtaagcatcctaaagctagtcaaccaagacagaagttaaaacacaagtattttccaatcaaactcagcaccattccaactgaagcttccacttggggctgtgaaaccctctttggacgtaagctatgctgaacctgtggtttcaggcaggttatattgtaatgataggggaaaccaatgccacatccacttgcagtgtctgtagagaactacatcttgccacacatccaagatctcattcctcagtctccctgaaaaattctgttggtaagagagaagtgagacagtgctgtttccgaggaatcttatgcctctctttattctacaacaaatggagacagatggaaatagaagaagaggcagcaacaggacaggagaaaggaaagaaaggggaaaggaaggtaacagaagggcaacgggggaaggggaaaatagacaaatcatagcagaatgcccagacacgacacaggtcaggtgacagaaaggacaaaaaagatgggagaagaaaaccaagaatgaggccagaagaagggagaggagacaccatggtgatgggagcagtagagagtgtaacagaagtaggatggagaaataaagcaagcaaacaaattgctcccgggaaaaaaagcaaaaagcagacttacgagcaaccaaagaccataatttccaacaccctcagagagcaataattagaagcgcaacagttgggaatttgaacatggctgctgactaggcccgaccatcaacggggtctgattccgggcctgatccttgacgatctcaaggattcaccagcctctctccgaactccaactgcccgccatttgttcatcaacaaaatcattctttctacctcctaaaagaatttttattcctatgacattgcaaggtccatttataaaaagcctcatgcaagttctcagagtcattacactgagaatgaaacagcgtgatatgttaagtaaacacataccgagtccggagtttcttgcttccgatgcgttcgtggtctaacttcacaaacatacccgcggacctttgcggcaagtgttacagctcttaaagacggtgcgtccggatgctccggtgagtttgtagtctcactgacttcacgaataaacccgcggaccctcacggtaagtgtgacagctcttaaaggtgatgtggtgaattttaaagcccttaaaagtggtatggacccaaacggtgagcagcagcaagatttactgtcacgagcaaaataacaaagcctccgcaatgcggaagacaaccggagcagactgcagaggcctgcgtgcgtggccagcttttattcccttatttggccccacccatgccctgcttattggtccattttacagagtgctgattggtccattttacagagtgctgattggtccattttacagagtgctgattggtccatttttacagaatgctgattggtgcatttacaatcctctagctagacacagagcactgattggtgcatttacaatcctctagctaggcagaaaagttctccaagtccccacaaaacccagaagcccagctggcttcacctctcaatattttaaagctcaatgtaactcggagaaaacagcaattaagtaataccacaatgcagttagctaccagaatttggggacaggaattgaaaccactcagtgaaatctagaaatttcagattataaatatgtgctttaaatataaataatatagtatgccatacttcttttccaaatgaggtaaatcactaaacttaactgagctgaaataaatctgaggctggtgtagcaatgtgtataaataaccgtggtaagattaccaaaacactgttgaaatctgggtatctttgagagctttctcagtacctgcacatgggtaagttgaaatacttctatttctaacatacctttcaactgacaggttaaactggtatatgctgatgcccacttcctggcatgcatgccatcccagacacctccataagcatgaccttatgagtctcacaaccatccactgtcgtgggtgtcaccccaatcctacagatgaggagactgaatctgagggtggctcaggtcacacagctgatcactggcagagccaagatatggacccagggctttactccaagtctgagacattttgtaagataaccagactgcctccatggctcacacctctgaccagaaaagagttgactagcaatttttttttttttttttttttttgagacagagtctcgttctgtcgcccaggctggagtgcagtggcacaatctcggctcactgcaacctccacctcccaggttcaagccattcccctacctcagcctcccaagtagctgggactacaggcacacgccaacatgcccagccaattttttttgtactttagtagagacggggtttcaccatgttggccaggatggtctcatccatcgtgatccacctgccttggtgatccacctcgtgatccacctgacctcgtgatccacctgccttggccttccaaagtactgggattataggcatgagccacagcacccagcctattttttcattcttgatccaagttcctgcaaattcagaaaaccttcctcttatgccagttaagattgccctgctagcattttctttctattttcattatttattataactatttatgtcattgaggagaaattcgttgtgttcagaagactgtacagaactcaaaatattgccctacatgtatatacataaatatacacacttcaaaactaaatatatagacaatttttcaaatgcttaaggttaagaatcagttttatgaaacaatgtagaaatatcaacagagattgagacaagttgtgggctgcactgtagtttattatagcaaagatcagcaacctaagaatgagataaggaggtttaaaaaattaaggtgatttcatccactggagtatgtgcaaacattaaaattaattttaagcaattttgatgacaagaaaatgctgtgatataaggcaattttgttaataggtatatgcattttcaaaagcccaaatcattaagtgataatttcagagttttagggtttggagcagtttttatgtattagttttaaaaataatttgagtctccagtatgtatgtaataccacactgaatattattagagtctgtattcgtttcagagtcaaaacacttacatttgcttgtctattaagatgttttgatttaattttatttattttatttttgggctgttataatttttaaaacttgtactgagaaaaactagatgggagatttggttctatttcttactagctgtgtttctttagccaaggttacttcaattctaggcttcagtttctacatctgtagagcaaacaatacttgtgatggttgtcatagagttggtaggagaatcagatagaataatgtctatgaaagagcactgtaaactgtaaaaagctgtattaggccgggtgcggtggctcatgcctgtaatcccagcactttggggggccgaggcaggtggatcacctgaggtcaggaatttgagaccagcctggccaaatacaaaaaattacaaaaaatacaaatacaaaaaattagctaggtgtggtggtggacacctgtaatcccagctactcgggaggctgaggcggaagaatcacttgaacccaggaggcagaggctgcagtgagctgagatcgctccactgcactccagcctgggtgacagagtgagactccatctcaaaaaaaaaaaaaaaaaaaaagctgtattaaaatcaggatgtgcagatgtgcatggttattatttttattgacttttatggctctctttctgaacaagtaaatgtcagctgaagatggaaacaagtgttgaaaacgatctctaatcataactagtcattgatatactttctcactgtgtgtcagtgtggcccagaccactgcatattcttcatgatctctcacaaactgtgaacgtaataatatgcaacaccaagtgcttgctgcaggaaatatccttcaaaaatacaactaccccactgtgagtttcatgcagagagataatatcactgtaggccacctcctcaaagcaaccagcccgagcagccatgaggataggccatcaggaaactgatggggaggggaggtctgagccctggaaaagtgcagtacaaaggtgtagtcaacacttactaggtaagtggcctctgagggcaatgcagcctcaagtgagtgaaacatctctaccatgctattaaatgctgtttaagtagatgtgataaaagcattttaagatccccaaagaaagatactagtctgaatagcacggatcattatttttccacacctgctttgaccctctctacaagaaggagagaacaagaacaagataaaggcagtcaagtcccaggaagtgccccgaaatgacctttgccttcctttccacctggggcaatcattcagaccagttaggcaaaggatctaaaataacatcttccacagctggcttggaagaaagtcaagaattttcttttccctcctttctttattcccattactcactctctaagtcctcagcttgtctccccttccccctcttccttctttcctggctgtaatatgcttgtctcaattctaataataccaaatataagcagctgaatattttcaataaatcagcacttctccaaaactactcaacagcttcagcttctctataaccacacttctcattcccgctctcttgtactactgtagtctatcactttcaagatgaaagaatcagctagtctttctcagaactcagcacgtaggcttcaggcataaagaagctgcctgtgtgcaactggctcctgtaaggaatactatatttctttccaatgtagcccacatcatgtcatttggaaaaggagcctcagaccagagctgatttagagctctgtaagtcacagaaaagtgccaggtcgtttgcagtattaatattatatgcatgtattatacccaggatactcaccacacctaagagcggagggaagaattgcaacaggaacatccaaacctgcagctttccagcctattattcttcttggtgagacataaacctaaaagaacttcgggggccttggtgatttgtttcctaggaacacctttaatttccttttgtaatttcagacagcacagccacttgaactcttccatcactgtctctagctcctcccatgcacatgcctgcctggacctgtacctctttgaccacatcttcaagatgtctccacaataatccaacctggagaagtccagaggggttgttagtctgtgagcacacacccccctctactggacaaaacatgaagaaacatacatgcctgggaaaggaccacagaattctggaacagaaaggaatgcctaattaactgccctcgctttgtaaaacccaggcctacagaagtgccccaagtcacagacttataacagggatagggggccaagcactgcatctctttgcctcccacatcaggcaccatcactacatagaactgtgtgtccctcaacagttaactcacaaggaagaggggattatgcaactgagttcatggggatctttaggttatgagttagaaccctcccaaggcacagccatcaacaaagaaggagagtgtgtggttgaaagaacagtgcgctgggagtcagggacttggtctctagtcccagttccagcacctacagcctctgcgactctgagcaagacacagtccctgagcttctcagagatcagtcttctggtctctaaggaacctctcacaatatgaacacagatctatggttctctgtaaatggctgggccaaagagtacgaacagggccatagaaactgtagaagaaagagcattaactggagtgctagagacctgtttcctaattctggctctggtgcccattagctacttgacctaaggaaagtcactctctggaactctggcttagaaatagagatgaggctagatgaccttctcaaccccacagtttctgtaattgtggctaatgataactgtaagtatgaatgctttcttcaaaggatcctaaagccacaggggcatgttgatacatctttgggacaatggaaggaacattaacgtttctacccgttttataataaatgtaactaagggcaaatatatcaaactatttgctcagagttcagaaaagcacaattaggtgtgccgacttccaacctgtgctatagatgaaacattagtccaggatactaagatcaaaccacaaagcttttataagccatgccagccatctataaaatgataagtagacctaataaattacaaaattagataattaattctacatctcattttattttttatttatttattttgaggaaaggtctcactctcccaggctggagtgcagtggcacagtcatcgctcactgcagccttgaactccctcaggtgatctcccacctcagtctcccaagtagctgggactacaggcacacaacacatgcccagctaattttttgtattttctgtagagatagggttttgccatgctggtcgggctggtctcaaactcctgggctcaagtgatcttcctgtctcggcctcttaaagagctgggattacaagtgtgagccactacacccagccaatttacaattttaagtgggattatagaaaataacataacaattaaataaagagacaaaactgtggcaaggatgccactggatggcccagggatgtctcaggaggcagttgtgggggaggatgctgaggtaacagttccacctcacctcaccccaaattacccagtgaacaaccatctaaataaaaagtgtgtgtttggcatgtaaatgcagtttcaaaacaagttctctagctgcctcatcacctcaccttgcacctggctgctgcactatgggagttctagatccgctagacattaggggaaacagtagtcgattggggtagcctcacaaccaacgtttgggctgtgggccacaaagtcaagtggagagcaccgaaaggagaagaaagaaaagaactatgatcctacaagttgcttaagctctctgacattcagctatctcactttttctgaaaaatttaaaaatggaaggccaggtgcggtggctcacgcctataatcccagcactttgggaggccaaggtgggcagattacctgaggtcagatgttcaagaccagcctggcgaacatggcaaaaccccatctctactaaaagtacaaaatttagccaggcgtggtggcttatgcctgtaatcccagctactcaagaggctgaagcaggagaatcgcttgaacctggaaggtggaggttgcagtgagccaagatcgtgccactgcactccagcctgggtgacagagtgagactccgtctcaaaaataaataaataagtaggaaaacattttgagttacaatgtttcacagctaaaataaaggtagcctatacatgggaaatattttgctttttgagtttctcccttcatattatcttccaaagccccgctttttttggtctcccaaggaatgttttttaagtgtcaaaattcacacaaaatgtttgacttgcactttagatgttaaatatacaactatttgaggatcttgcgctagaaggttctctacataaattattttttcaaaaggccagtgtaaccttttgagagtctttatcatctcaccctttttctgaagtcctgttttgtaaaaatgtgcccttagaaataaagagaatattgattttgcaatgttggtacaaactggacaacagcaggaagatctcaaaataagataagccactgcacagcacagcacagaataacccagttagggaggagaatgtctgctctgtcagtctgtcttccctggcactgcttctcgctggcatcaagtaggaaagatccctttcagcttgacacaagtatgcactgtccttctgaaatatgagaaaagcagttccctcaggaacaaggaggcctcgtgccagaggttagtgaagctggagaaaccgagagcttggctggcaaggactgtgtaagatgggactctctctgttggaatgctagtggaatcagttaggttacttccccaaggttatgcaatgttcttaaaatatactacttaacactggatagaattcttatcgtgcattgcgtaccaatactaactgttctattctatgaaccaaaaaaaccatggaatgtcttttcccatcacccacatgccctgctgtacatagagtatacaattggctgattatgttttggtcttcacccttctagaatgagtgtgagctccatgaggacaggaattagctttgcttttttctgttttgcctactgctctgtctactatacttagaacaatgatgaatatatgatagggattcaataaatatttgttgaataaaaaatgttttgaatgcttttgtagatataaatataaataatcagaatgatggagctgtgttcactacttaagttcagagcagatggcttcatggccactgaaattatccccatgacatcacaatgtggtacaaagggaggacacaggatttaacatcaatgttgtccctctgctgtttacttagcaaggtaccctctctgagtcttagctccatcctcactcaaagagagatgtcattatctgcttcagggacaggactgttaaaaattgcacaaaagtatatgtcttggagaggtttaaatttcatgggagaatatgaaaaacacacatttttatgcatatatacagtctacccacgtagacaagaaagacgtataaccataaacacagagacagacgtgtttgggaagagcttcaaataggactatggaatagttcttaaactcccacttcctaattttataacagatttcagggtgaaaatgtctaagcaagtggttttttttgatgaaccatgttttagttatttcctcctaaaaacagaagcaaggatcgtggtaatggctctacagggtttggctctgaaatgtgtcatcagtcaagataaatttgtgctggtcaatataaccctaaaaacaatgttttctctttaatttctatcacctgttttaaaggtatttttatctgctatattgaatgcaagtcccttaaatgatttctggaatgaggtagaacataaccaaataaataattttttaaagtagacagaaacatgccaggcatggtggctcacgcctgtaatcccagcactttgggaggccaacgcaggcagatcacctgagatcaggagttcgaaaccagcctggccaacatggtgaaaccctgtctctactaaaaatacaaaagttagccaggcgtggtggcgggagcctgtagtcccagctacctgggaggctgaagcagaagaatcgcttgaacccgggaggcagaggttgcagtgagccaaaatcacaacactgcactccagcctgggcgacagagcaagaccccgtctcaaaaaaaaaaaaaaaaaaaaaaaaaaagacagaaaaacataccctccccaaacagggatttttaagagaatctgataacaatgtatgtaaaagttctgggtaagcaatgaagtgtgtacccacagatgtcactgaaattggtggttcttattcacagctggctttcagcccatgccacccttgcctttccccattccctgttgccatgggaccttcactgttgcctgcactcagtagcaaagcacctcttctacatttgcctcttctacttaagaggccagggtaggagttttagaagcattccagagttccctctgcctaccttgaatgagaagggtagctatatatatttctaagaggaaaaaggaaatctgtatgattccaaactaatcccaaagagtaagacatgactgatcagtagagccccagattaatgagctcagaggataatgtttaatgatatcaccaaagaagtgtccacatttcttcccaggagaggattctgatttttattcagattccatacaagaaattacttttcctaccaccaccggacaatgtatttcctttcaacatactatgtaaaatgcttgcacatttctttacactggggtatggcttctctacatgattacagacatcagagctaagaggggagcatcaggtactgcggtttcttaaagaacccaccaccatacagcttgcccaacaaattgcccttctgctgtgttccaggttttcaactcatcccctgttacaaggcacagtcatgaagagatgagggactgcagctgcagtcggccagacctggtgtgactctgggttctgcctcttattagctgggtgacatgggccacgtacttcacttctctgactttccattgcttcctctgtaagatggagataataataactattgtgtagattatggtttggcttcaatacaatatttgtcaactgtccaagtcagtatctggtacacaagaataaaggactgctgttgctgttactgctatttgttaaccagtatccataagcacaactgcctgctatgacacaggacaacgaaagtgatgaaggcacatgagcagataaaataaacattggaaaaggcctccaggaaatgctctgtcagcaggaacactatcattgactgcctgtacttgagggaatcagatttctatcgagtaacctaaagatgagtaggtgaaatgtatcaccgactcttggctcctgggctctgcagctgttgctccttatcctcactagcttcattcagtttcatttttcttcccttttgctaatgcaatgtggcctatgcaggtgtccctatattcccatcatctcctcctctgacatctctccccaaggacagtctggcacgtccctcaacgttcccagcgagatactgccaccttcctcttgtctaacctctcaatgtgggcatacagaggcttgaattatcctagcaaactttgtattttcatgggttactagataacctgactcctcctggaagtgaggatactattgctgtcttcattaaaccaggtacacagctttgaaacaaagctctgattattctaaaacacagggttcttctaagtatgagagctatgatttagggctccaatctggctcagatatcggttcacatcatcatgctatgtccctcccagcatgaagagatggtggccatagtagtgggagaggaaaacaaagggttcagggcagaggctaggagcagcatccttccaaagtctgctctggcccttcactatctctgacctaacctcaaaatctccttgtatttcaagaccctggagaagttcttcatgaagtaatgatgagtaggttcgtctaatctcttctggtgaatggaggactaggagaggatgagaggcacactggccataccaagcccacaattttccagtctggggatattactaatgatattttaataattatgtaagattatgacacgtaacagactatcataacttaattaatgaaaaagtagacgtttaatgtattttcgagaacttcacctcttaatccatattgactatgagtctaataattacattgcactgaaatggagttgtgtatccccttgaattcaggtgctaatgaaaatctattataaagtttatgaagccaccaggcaattgcttattgaggaagtttcaagggttccaaaataaatacctaaatagctgttgttggccgggcacggtggcgcacgcctgtaatctcagcactttgggaggccgaggcgggcggatcacaaggtcaggagatccagactatccaggctaacacagtgaaaccccgtctctactaaaaatacaaaaaattagccggtgtagacacacctataatcccaactactcaggaggctgaggcaggagaatcacttgaatccgggaggtggaggttgcagtgagctgagatcacgccactgcactccagccagggcgacagagcgagacttctgtctctaaataaataaacaaataaatacctaagtagctgttgttattgaaactcaatgtcactaaagatccaaataagcttcgtgttccctttaaattggtagtaggaacagaatgtggaagaaaggagagcatcaaaattcaagtcagaagatccggcatattccaccaatagacagttacagtacttcagatggaacctcattttaatcatctataacatgaagacacagagccaagggatccttttcatctttactatttaattatcattttaagaggcgacaaataccaactaaatcatatactcctatgtggagtgtgtagaactgccactgacttttttaaaaaagatatgaaaaatttcaaatgtctttagggtgtatgtttccaaaaatttaaatttcctgagggagagatattttattttttaaaatatattaacatattttctctctctaggcaaagtatatttatttcacttttttaggattaaaaataaatcctgatgatgccactaagcagcaatatccctgaaagaaaagcaattaacaacaaagacaaataaaatttattttgtccctatgcaactttccacctatggttaaacacacacacacacacacacacacacacacacacacacacacagcttatccgtttatcccctttaattaaattgagagcgggaaacacattcaaccatatgctgcactgcaggtgatgaacaattaagaactcttcaaaaataaagttacccttgaactaattttagtggtacatcaaaaaagaaaacaaagcaaccattacagagcatctgaagttcagatcctgttttgaaggggtctgctctaatggaagagccactggggcaaggaacgacagattcccccatccgatgttgattcacgactcaggtatcagacactacgatcaaggccacgtgcacacagagaaacatatgattcctgccacccaggagctggtgatctagtgtcagactcacatgtaaacaaataattacaacaatgtaaagtgctttaagatggaagaagcacaaagcaatatctggaatataaaaaacgaaatgcttaactctaaccagagaagttggagagctttatggaaaaaatgacatgtgtgctaggtcttgacagatgagaagtttatcgtggaaacagcatgtgcaaaggcacagaagtaaaggaaggaagcaaaaggaaggggaagaaaagaaaggtagaatataaatttgaaaaaatattttccaatctaatatgtataaactaggatcttattttaattgtcatattcctaattacttgtgaggctaagtatattcttatatactgaattcatcattcaaactttcttataagtgaattgactatctcctttgctcatttttttcctcctgggtagtttgcctttcttttattaattgatatgatttctttacaaatgttggatgctaattatcagtcataatagctacaaatatctcctcccagcttttcttcttactttgttaaatgatatcatctgtcatagtcaaatgcttttcctttaattttaattttatattatttaaatatagacaaattcaccagtaatcttcattatgttttgtgcctttaagaaaccctttcctaatccttccatattttcttctaaaagctgttaagttttccttttcacatttcagttcaaaatccacctgaaatagatttttgtgcatggcataaggtacatccaactgttttttttccccatagggataactaattgtcctagcatcattcatcaaataatttatcctctcccattacaaataatgggagctgttatgggtaacataacgtcacccatcacgggtaggatcccctggaaaatagaccctgaaaagagattccatgcagaaggtttagtggagagtgctctttggagcaatacctatgggaaagtgagggaagcaggattggagaagatgcaattttgacagaggcctcaggtgataatgtagggagcatggagactgggatggcccttcagaactgccctacaaaaggcaatggtgctgagcttccgtactctcacacacagataagtcattggtcaggcctgcgcttgagaagaaggtgtaatcttgggagtacctccccccttgcagctgagtacctccccaggaactgccctctgcaaatgacacttcagatggaacctcaaaatggcagaggtagctcccatttggagagggcagttcctggggaggcactcagctgtaagcctttggctggcaatgctcccagcagcggagagaacagggtgttagtcttgcaagggggatctgggtggcgcacacagcatacactataccaacttgctcatgtatcactttgacattgtgatacatgggctacgctgtttagtataactcttttccccatgaaataattttcagatatgtttccattctggtcaccaacacgtaatctaatctgtcaataatgcccttcaaatatgtacctataactataccaacaactccagattcatcagactctataaagtacagaagcacattttctcccttgatatgaatatctatttctaatgtagcctgactttttgttctcaacagctatacattacccaactggctcaaaatcaatatgctgtcagctaaaacagaaactgaggtccctgatgtcctttacctgtaagtggatagtttaatctcaatgcaggatttttccattatcctcttgagtttaatcttgttccatttaacttaggaaaatttaacaagctgtgattctgtcacctaacacctctcgctgtttcaatttttctctaaatttgatacaggatgccaaaaagcttttaaaaagaaaatcccatgagggcagagagcagcgatgaggcttgtggcatgccaatgataccctgacttctacttccactctcagaaacccatcccataacccatctgtaaagatcttgctctgctaggtaatattaatagcaggaattttttcagcatattaatataatgacttacagtgagttttgtacatagcttttggaaaccaatcacatgacctcaacttacatttgcattatacacaagttttctagcaacagtgcttacacagaagggaaacttccatggtgggcattaggcacccagctggtgagccttgcagaactccctgaatcacagcctacaagagttacaggtccctgcctggccttctagttcaccaatgtgttgggctataaaatgtaccttggttcagacgtgctgtcctttgatcatggataatgcaacatggttaatctgtgaccagtgaagtacatgaaacattaaaccgcctctggtttctgtttcaagtttgatcacttgactgcccctcagtaactggattttacaatgaagttaaatctcatttaaaaatgtaaagctgtctgttctggtaaagccaatcatatgttgtaaagttattccatttaaaagatcagtttctttgttccccaaaggtttgactttgagtacccaagttccatttaattctactcacatctctgagtacatttagattcccaaacccatgcagagatgaatagtttcaaggttagttaaaaataaaaaaagcattttctagcaaaatagggtaacagcatctaacattgataataatcacatgatatgacatgaaaccagtttcattgtttaacataggaaaaatgtgaaaaatgtgtccctgttaccagttttcagactaagttatctcatcattaatccatccatttattcattcattcaatagaacacttactgagtatatgtcattggtcagtttcagtaactgacccaggtatacaatgatgaatgtgataccattgctatctttgaggagagatttttttaaaaaccaaaaataaagagacatctgtttccattttgaagtgttctatcactagcagaaacaggttccaaatgaagatgggacaccaagaacaaagcaaggcaaacccattttactctgctgggtggcatgtcagctgcaggaattcccaatcatcctgtctgattactcctaaggacaatttgtcgcttgcagccactgccttatcactgtaagttggaaggttgtttttaattaaagtcaacaatcataattttcttaaaagaatcagtacctattaatttactgtttatgaaactgcaaagcatgcatccaaagtaaaagataaggtcctacattcaaaagcttgataagagctaaagattaagttctttatcacagaagaatcgctgagttaatattataaaaatacagatgagaggcagataatatgtcttgaggtccaaaacctatcgccttgatagaaatatgatatggaaatcagtagggacaaaattactattagatgcagaaattgagaacactttgaagagagaaaatgtgacttcacgtgattcagaaatgattgggaggaagaaaggggacctttgtttttcttttcttttgctctttcatcctttaagatttcacactgaaatgacattagtagtcagacataccattccaattcctttctgacttgatttaatttagaaaattttaaaaccctgatttaattcaaaggctaccgagtgagccagtttgaagctagacactgtggggagtacctcagaggtatcctatacgatctctgccctcaagtttttttattaatgcaaattaggtagaaatccaatattaggccgggcatggtggctcactcctgtaatcccagcactttgggaggccgaggtgggcggatcatgaggtcaggagatcaagaccatcctggctaacacggtgaaacccccatctccagtaaaaatacaaaaaattagccgggcgtggtggcaggtgcctgtagtcccaggctactcgggaggctgaggcaggagaatggcatgaacccgggaggcggaacttgcagtgagccgagattgcgccactgcactccagcctgggcgacagagctagactccgtctgaaaaaaaaaaaaaaaaaaagagaaatccaatattaacctacacaaaacaataaaatatcgataaagatgctatataagtaagtgccttaaaaaacaagcagcaaatgtagcagctttaatcaagaacaaatcagcaaatccacatcgaataaacaactcattgtgagctattctttgtagcatcatttcatcattggaaaataccaaaaggagtgggattttaaaatcctttctgcccctatgaaccagcaatgatgtgtaattataataaagctaattttaaaaagtgctttatgaactattttcattgatattatttcatttgattctcaaaaaaccgctatgaaatttgacataattccttccagcaactgcaatcaggggagtaataacaagctaaaaaatcggtatttcactgactctaccgattttggtgcttccctctcccccacaccaatttcccctgaatcattctagaaatcatgtgtgctcgtggatgtaatccttcctcctcatcactgctttcatctcttgcttcggctgcacaaggtgcctcttgatgcttccaaaatgggcaccagggctgctgtagtcaaaggtgccagatgtgttgcccaaggcacaactgcctacctctcccgcttctccttgggataagacaaaatctcattcattctaccatcaataaaaccacactggataaaatctagttcattatgccctttcacaccgtgcttccatagcacctccaatagggacactgcttccccaagtctgtacatcctgttatgcagaatttgctttcaatgtcctaaagaaattttagtaacattactctttaaattttcacactgctttttttatggcagtcctctctccctatctccaggcatgaatccatggggctggcgcaacagaaaatctggagaacatacgtcatgctattttcagtgttgtccctccccgtggtagccgctaccctcggatgtggctcaaattcttgctttccttaagatgagctttgtcctgtgatgatcatcccagccctcaagcagaagactctggacgggcatgactgtcaaattatccagacatgcccagacaagtctgaatcctagggagaacatagctgaggcccaagctgcacaccttatttactctccacaattcctctgggctcacctggaaaccaacagctttactcagtcacaggagcacttctgagttctccctctaaacacaaaactgaaactaaagacttgaacgttttagaaaaaatacgtgaaatctgaatgaactgatttgtgactttattgtgaataaaaccgtattaccatgaattttttttttttttttgaaatggagtctctctttgtcacccaggctggagttcagtggtgcaatctcggctcactgtaacatacttctcccgggatcaagagattctcgggcttcagcctcccgagtaactgggactataccatgaattactaatacaaaaatctgaatctcagcgtttgaagtcctcactcacttgcttagcgtgaaacccagtcctcaagagaggaagtccctacctctcttgaacagctcttcaatactgcaaaactgttgggcttctgatgataaagttctttcatttctttttgccaaagctccttcttcctcaagtgtaggggccctcccaggaggatgaggaaatgtttgtccaagacattctggcccagaagtgttctctcttggtacttttccttcagtagtttgttgttcctccctattatccaacatcgttccaggacccctcaaatccgtctgtatcccatacatctctgaattccaattctgacctgatttcaagttctttcctataaggctctgagccttgtttcaatgtactggaacaatccatgactgtgaaaaaaaaattcctagaaccttctatgagagggaagaaactccagaacatgccatgataggaggctgagctgccggggcacacagaggaactccaaggggatggtatgacctaatatcacagcccaggggccacaaagatacattagatatggtctgattccaatttcaaaattatctaacagaagtcactatccctgtaagtgatcagaaagcaaatacagtgagatcggcaccacagtcatttatctgctcacagctatcaagaggaagggggtggggccgcagtggtatctgctgttttcaaaaagtgctttctcaggattccctaagaaataaaacaaaacaggccgtggctcacccctgtaatcccagaactttggaaggtcgaggcgggcagatcacgaggtcaggagttcaagacgagcctggccaacgtggtgaaatcccatccctactaaaaatacaaaaactagccagatgcacacctgtaatcccagctagctgggaggctgaggaaggagaattccttgaacctgggaggcggaggttgcagtgagccaagatcacgccactgtactctagcctgggaaacaagagcgagactccgtctcaaaaaaaaaaaaaaaaagaaataaaacaaaacatacgctttcaatattcagtactctgctttatcagtttgatataatacttgtaatccaattacaacccgaaaaggttgtctttttctcatgtcccaaccaataatgacatgaggcagagtgttgagttaacaaatatatccaatgaattattctctaaaatttaatatctatttattttaaaaatagttttctcttttacatttatcagtggctgttacttttaatcatggtgttattctgctatttctacacatctttggaattatttcggaaggctgtgcatatagccaaaggccacagactgccacccttgctttatatcttgtactctgaatccaaaaatagagacaagtgaaaagcaatccagtggaaggtgttatcctcaaagcataattcaatcttaatctggggaaaaatgcacaggcatagagctggcttgagattttaaaacatcagattctggccatggtcctggcctttaaatcacattcccctttaaaaagcaaaacaaatgagaaaaatactcatttattttatacagaaactgaccttaaaatacaaattgttcattagtagaacatttatttcgtatttcacatgccaatgagctattcttatttgagatcattggaaaaggcactctttaaaattctctttatgctttacacaaaaagcaagcaggcacaatgggatctcaaacactgttaaattttaagagctttgtgtgttgttttttgaaaaaaaaaatattgtttctgaatccatggactaaaaatcatattaccaggacttctaattcactttctctttgtatgaacttttaacaataaaaagatggtcaacctaatcaaatttagaggagaaaggtcacatgagaaagaaataaaacactgtaataatcatttaagtattaagattaccactgttctataacaaaacatatacccatataccacataaacacacattcttctttcccctgttgctcatttaaaattccatcccatctttcacatccattcactaataaatcggagggaaaaaactgtagccactacttccacttccttatcacctaccttcagcctcttataatctactcatagacgtcattctaccgaagtaactccctcaaagagggttagaagcaacagtattttcctgttctttatggcataattcatccccctcatccagactcccattggctcctccagatccactccccatttttctcaacctgctcttggccctggaaggctgaccccgtagaccacagcccctggcttggctcctttacactctgctttctggttggttcagttagaggaggtttacaggaagtggtccagaggagggtgaggccaggatatttatccccacagcttcctctccgctgggtgtctctaccagaaaccactgttcctgacagagggtcccctccattaatctcccctgtctgggctccagtgaccacgcacgccttcccttgcgccttcagccttgcaggtatctgtttcctctcaggactgtgagtaatccaggggcctctctgaattgctttcttccgttggtttctggattatgctctatcctcatcctatccctacctcctggactagtgctttttgagcatggcttttacaggtctctaacaacctacatttccccttgtaacaatgatatattctcaatgctaaaattcttgcctcaaaggacatggggaaaacatagaaaagtgtactttagctataattgtactccccacccccgaccccacacacaagcactctaggtggtgaatttgtttttttcttaaaaaataaaagtagttaaatcactcttgaagaatcataaaagtaacatattcactacaaccagagaaacaatataaaaatatgtaaagagaaataaaattaatgcctttctccaatttttccgcatctttctctttcacttcattccccacctccactgccttgaccctcaataaggaatgttaacagcctggccagtgttcttccacactcatctccatgatattcgaacctgtaccaaacatatatatttatatattgggaggggtgatagttgttttacaaaacctgagagcattttatgtattattttataactcaaatagatacaaatctagatcagtactctgaacagcctcataatattacagagcataaatgcacaatcatttatttaaccatttctctaatgatgaacattcaaattttttctagctattttttgccactacagacaatgctgcaataaacatccttatgcctaatttcttattggtacatatatttatgtaagctaaattcctaaaagtgggattgccaggtcatagttacacagagttttaattgggatcctattactttctcaaaagtgcatagcaacatactttatgtcaacttaattcctgtatttgttttatatgggtagaatatggctgatgcaatttttgagtcctattttccctccattaattttagataattttctttgtactacatactttctgtagtaaccttaaatggctgcatatgtctattaatgtcgtgacgcttctttacaattttattggaattgcatcaaaccttaatattaatatgggaagagtttatatttacttcccataatgtatatccacagagacaatcaaagctttgacagtagtattaggggtttacacatgtaaataaaatttatttcatgtatgcctcttaactcttaataagttgacattaattacatattttcatgggcacaagaattgatcaagagattctcagttctcaatatcaggaagaactatgcctggagcatatgcttccatcaccacatcagtgacttcagtcaaaggaaaacaaccacaggattactcaagagcatactaaagattgggcatttcccaagtatggtgagccaagctccctgtgattcttctggcactaaaagggtttactttgaatcaaaggtaaatgaaagcaagcaaaacagaaaggaatcctagcaccaagctccaaggacactgctttgcaggctagcacaactagagttcctcaaggtttgggggaagaccatactccacaaaggcttgggaacattccacatcagtctccacccgccaaataaaatactataaaaccaatctccaggttggtggtgggaggaggcaggagaagaaaaacctgactaccagttcttgttagtatattctctattttatcaccactatgtggtgataatggagattcccatgcatcatccttgaaatgagaagttaagaaattacaaacccaacagaaggtgcatcgctggcctctgtgacatccttatgctacatcctgcatgaatggtaatgtcagctttaactgcttagtcttgtaacaaggataagcgggtttcactggttcctgggaattactacttgcctctaacattgaagagtcttccaactggaaacagatctgattacttttgccagacttaatctctttcttaagcagttaatgagagctttcaataatcttaatgacatcacttcaataaaaatacctagatgttatttccacaggaaataaatgtccacagaccataaacttaatctggttaatagctaacctgggagaaaggtgggagttgggttcagataaagggacactgtagtgtgatggtaaatgaattattcacccctctttctggactgctggcaactctctgagccctcttctgggtttaggtgggaagagaaatgaagtgaaagacaaaggtagctggaagcaggaaacttctccctgtatgggcttcccagctgcagggagtcactgaagggttcagaatataaagaggactcacagcgacaggaaagggaaaatcaagagagaaaagggaactagacagaggatacaaatcaaaggtactatctggggaactccctccctcatgcctttcaaagtagggccaataggaggtaatggctggaggccctataggaagtctccacagtagagaagttacccatatcaaaaaaagctcttacccacttctactctccttcccttttccagcttcttcttttataaggttagaagcacaggagatgcttacagttcttatgactggttcctgaaagtgctgctgaagatcccaatggaaggctgaggccaaagtaaagggaatgttgagtgattgcacggagaggccaaaggaacatgtgatcatccattcaccttgtcactcagtgggctcacggtcagtctccaacagaaactgaatgtgctctgtgtgcctgccttgatccagatacactggagcttttatgatatttttcaaatagaaaaagggcaaaataataagataatcctacattgaggaaaaagaggatttactaaagagcaatgtatttaatgcacagtttctgcagtttttggagttaaggcagctaagatattctacactcttgcctccagaaatctctctcttaataatctcagagagtttccttgtcaagtgtttctaagtcctcagcatccgacaggagaaagaattttcatcactagggttctgcaatacatgatataaaatctacgattctgtgactttcctggtgaagcatattggttatgaaagtagaaaatcttatcaaaacaagatttattgcaaaaaacaagatgaaaagcatttaccacatttttaaagctctaccccctggatcaatgatctagagagatttataaaatttcacaagttcaaaatgaccaaaaagctttgaagctcctcttccctagatagatattttttatctcaaaaattgcacttgatgtttgctctaacctgtaagagactgtctatcatattaggagctattccctagaaaaagcattgcccacatgctgttagaggagctctgaaaaagaacacataacctgcacaatggcatataaaaccctgagattctggccacaacagcctagaaaatgtaatgaataccagagcagtgcttcttttacacagtcttttttggtcctattgaatccacaaaattattttcatgtaacattttaaatcacattaagtatgtaagtcaaatgagctctttagcaccttttacataagaaatgatgctataccagtaacagtaacaacccataagtaaaagatacctacggaataaagtcaatttgtgcttatttgggaaatttaaaaactgtaaaaaaagaaaactttgaaccaagtttcttcaaattagactgaattccttcctgttctgttaaaacacaaaagtttttgtcataaaataatagcacttatcgagatgattactaaaaacaaacaaacaaaaacctctaactacagacataagtgaagacacagcgtacttttgcacttctgcttagagaatccctagaatgactccagcagcatgaatggcagaatttaggtcaagaggccaattacccagtgttaccatcaaaggcagggacaagttaccacttctctctgcctgttcctgttttcctttgagagtcactgttacgcaaccacagaagtaactttagaggatgccaaaaaaaaaaaaaaagaaagaaataaaagacattcacaaagtcctggaagcaactatacctctgaaccactaggtcaaaaccatcctaatcatctccacaccccgctgttccactccccgttttcttgctacaaagtgaagtaataggcctaggaattttggtccattgttaatcagtcagtttctaagtagcacaggcagactgatagttccccaatcagccaagaatagattcaaagcatcttaaacagagactaacctggaggtgactggtgctggggctcagctgtggtcttccctggccccaagctcttttccaaagtttccccaggcaccaaccgaggttggcctgctctgaggaaggccgggctggctcctttggtctccgtgacctttgcagaggatggtggctccaaggtgtcagcagagacgcacccagagaagacacggctctttctacaaggagagtcattaagagcagcttccctctcaccaggcaatgcagggagccggaggatcctgtgatgctgctgagggctggggagccttggagacagaggcgagggaacaggtgacgtctgtttgtgtgtgctggactgcgaggctgaattattaaacaccttgccaagagctgccggtgctggtggggatggcttcttcttatcacctctgggttgtgaggagtcaggacctactttgtggggcagatccagaaacaaggacttgtggccaccaaggggcaacccggctctcctcttgtttctcgtttctgggcgagtgtgagggacactcgtgtggacagggaagcccagtcttttcccctcaggggcttcatctaacttctcactctctatcaccttcagggggaccttgttcacggccccctcggcactggccgacacactagaaatggaggctgtttccccggctggcgactgcgatgacctatccccttgccgctccttgccctgccgcctggagccatgagccccagcctcagctcccgggagggtgagcaagtcggctttgggtacaaactcagcgtgggctgctgggcgaatggcaatcgtctccttacccttagaatgcgttttaactactctttgtacctgggaggacaggtcctgaactttggccaccactttggagacaggtttctgcttgcaagtccgcttagccggcttctccatctcatccttttctgcctctggatgcttctcagggtcctggtgactttcagacaaacctgtttgctgatgctccagcccgctcggcggcctccgaatgccatcccctcctgcctctgtggagctgcagtcagggggcagcacttctcttccaagcccagtgtccttgaaagccgtctcaaagctcccaaagccaaggtctgtgtctggcgtcttgggaatatctggggggcagctctctctcctctgcagggagcaggcaagtgccccattcgggagcagatttcctttctcctctagtacccaaaggttaggccttgttctagaaagaggaagggagtggctggaacagatcttgtccttgcccatcagaggagctgattctcggcctccacgcccttttcttttggtcctcttctgtggaagggccccaaagctctctctccttccactagacctccgaggctttttgttcccgtgggtgctcctcttattgagagggcccacggggagctctccctgccagtcaccagcactctggaaacagtcatcctcgggggccaggctcacggacagctcttgcagcttcccctcctggttccccatcgtgatccccaggatgtggtctgagctcaggagattggttagcagtctctccctctctgttgtgagtttgtacagctcagttagaatgtctttcgtgggagtctgcttgaaaaatatgtcgcctggatgttcgtccggctcctggctgaggctgatgatgtctgactcctccctgacttggtagcagttatgaaaacctttattggatctgtctagagttacagtgcccttgtatgaaaatcctctgacttccccctttggaagacagaagctgatgtagcagagttccgtaatgggcttatgcaattggagggtacaatgagtgccttccattatgcctacctaattattcatgccttggagatgccggtttgtggtcaggcttcccaggctccagtggtgaggcatgtgatggtggctatgcagagaaagcagctgacagtcatctccagcaatgagactgcctgttagaggaacaggggaagaaagcagcttgtctaacagagtgcataaatcacacaccaacataaaatcaaagcataaccatgacttatccttcctctgtggctgacctcaacaactcaaggaatcagacaacagccagatttcaatctcttcctcactcccaccctactcctgatcagtagaacttttgtataactgagagatgggaaagtcctctcatttcacccccaggacaaaagttccctttccctacatggggactcactgtgcagcctggatcaggtctctcaacttctctagaccttggtttatgttcttctgtaaaatagagctatcataactcccagaagtccttatctagggggctttgagatccttagaaaacacagccattttcataactcatatttggaatattactttgcaaaggtagatcgatcaagcctttttaccctctaaaaaccaccttcaagatctgagctcaaattatcgattcaacttaaaacacaatgtgaggaaagatcttaggccccaaatttggtgtcaacagtaaaaatttcaatgtaaaagtttaaaatttaaataactcaagtcttaatcaagttttgctgttttcttttttatttattttttgttgttgtattgccttcttttttccttcctgttgtctattcgaagccaaatggaatgacagaggaacagcaaaaaatctataaggaacggctggccctgtacagatttttcaatgatgtcaccacagaaacggctgaaatgtcacataattagtgaaggtggctgcttccttgtgtgatatgagggacctcagaaatgtctctgtggctaccatccccacacacaaactctatatttctagtttcttaagctattgcccagtcttcaagccttccttgcttaaaacaagcaccgcccacaccctgggaatgataacacaataactattcattagcccttgatatctttagtgaattattttcctcaggttttttctaactgcttctaaatagcaaaaaagctacataaaagtatattttgagtgaaggaagagagaaaggaggaagagtctggtaaaagtaactccttgaggaagagagtgataaaatgacagttatgaaaattgcagatatctggtcaaaccagaatgccaggagaccaggagaggccttgcctctttcacaattgtatatggggctgttctcactcaagtagttttttttttttttttttttttttttagatgggttcttgctctgtcgcttaggctggagtacagtggtgcaaacatggctcactgccgtctcaacatcctaggctcaagtgatcctcctgcctcagcctcccgaataggtgggactacaggcacgtgccaccaccacccagctagtttttttgtattttttttttttgtagaaacagccttttgccatgtttcccagggtggtctggaaatcttggactcaagcgatcctcccacttcagcttctcagagtgctgggattataggtgtgagccactgctcccggccgtatttttaaaacttttctaaaatgcttattgctagcattttctaaagatgcacatgtgtagggatacttaataattattggtaaaaactcgctgcatgtgtccaagaactcacttaggaggtagtctcttattgtgtaatttataataatcagtaataaaagcaattgcaaagctgtcaatatccgctgagcactaagcattaggagttcaattaatgaattctcagacaaactgaagggaagcagcagatgagctatgctgagttttggaaaaatagaatgctctcctctctcttcaagcatcattttcctctagctgttctcatctcctcaattcccatggattaggagtagtgtgtgatgttgggggaggagtgttaaaaattttcagaattggctgggtatggtggctcacgcctgtaatcccagcactttgggaggccgaggtgggcagatcaccaggtcaggagatcgacaccagcctggccaacatggtaaaccccgtctctactaaaaatacaaaaattagctgtgtgtggtggtgcatgcctataatcctagctactcaggaggccgaggcacgagaatcccttgaacccaggaggccaaggttgcagtgagctgacatcgcgccactgcactccagcctggtgacagagtgagactccatctcaaaaaaaaaaaaaaaaaattcagaatctgttcaaagtcacagtttatgctgtaatttcaaataggaatatgactgcgtattctattccctaagagagggaatttgtatatactgagcacatatacacttatattttcattttgttatctcatggaatcagtacatctccattttacagatgaggaaactgaaattcagagataaaggaatttgtctaagggaatatggctcagaatatgcaagtttcaaacccagatctctctcactacattgcttcataggtcatgttgctcttcacctactgccttctactaacaaactggttttccatctaatttgaatagaggagttttttttgttgttttctgttttttgtttttttgttaacttggtgttacataatttcttaacaatgtctcacatcttgctattttaacgctcacggaggccaggcgcagcagctcacccctgtaatcccagcacgttgggaggccaaggcgggaggttgcttgagctcaggaatttgagaccagtctggggaacatagtgaaagcttgtttccacaaaaaaagagaaaattagctgggaatgtggtgcaagcctgtactcccagctgctagtgaggctgaggcaaggggattgcctgggaggttgaagctgcagtggactgagattgcgccactgcaccactgtactccagcctaagtgacagagcaagaccctgtctttcaaaaaaaaaaaaaaaaagaaaaagaaagaaacaaaaaccacactcattggagagcttcaacatgtctgatcaggtaaagtgctgctccctaaggtcatcccttaaacaataaaatctagaaaaagggcaccaggagttcactacagctggtataggcagtaaaaactcaatgaagattctaatttagaaataaaagaagagaaggactgacataaaggctatatcctttatgagaattacagacatgtagtgcctgtttacaggattaagtacttttttcccctggtctttataagtcttggttatgtaaatggagaaaatgtcatggttagaactctatatgttagtcacagttgggaaactcaagtcaaggtttagaaaattataacattggattttatagcaataaagccacaatgcaaggcataaagctactattataaaaaaaaagaaaaaaaaaaagaactttacactattgcctcatccacccagaaacttccatacagaatgctcttaccacacttgtggtgcacatgtccggaaccaaagaggagcagaacagaggaagaaaaaagaaatgggagtttgtctcatgatcttgggactacagttcctttgttctgggccctgggaagcagtatgttgtaagaaactttgtactgaactagactaaggagtttcactatcccaggatccataggagccaatgaagaatcctaagctacttacttatacttgttataaaaagattacttcagaagtaaagtagagagtagacaagtagggggtaagactagtggtataaatcacttagaaaggtctttcagtattccagaaagaagcgatagccaaaaccaaagcagtagcaatgtgatggagaagagatggtcaattttaaaagatagatttcaggccaggcatggtgcctcatgactataatcccagcactttgggagcctgaggtgggtggatcacttgagttcaagaccagcctgaccaacatggtaaaaccccatctctactaaaaatacagaaaaaattagacaggcatggtggcacatgcccgtaatcccagttatttgggtggctaaggcataagaattgcttcaacccaggagatctaggctgcagtgagccgagattgtgccactgcactccagcgtgggtgaaagagtgagactctgtctctaaataaataagtaaaaattaaataaaaagatagaattgaaagggtctggtggttaattggatatgcgtgacaggaaagaatttggtttcatgatttcagatgtaggtgactgggtagattgtggtgccattcacaaagataaatgcacgaagaggaataggcttcaggggaagaagatgaattcagttgtggaaatattgaatttgatgtatcggggaataatcaaacaaatatgtccacaacactgctagatgcaaagggatagagaatgagatttaggctaaagttaacacatttagaaggaatcatacagtatataaggtgtttcaattccatgtaagataaagtaagtgcactctatcctagctctcccactgaatgtaacagaaaaaaaacaccaatataaaatgcatggagcagctatttgaacactctaaaagtaaatggtaacaagcaggttgatgaggaagaccaggctttgaagtatcaaccaactgtaaagcagctaactttctcaactttgtccttcagtagcccctaagcctggactcaaatgtgcctgaaacatggcagtgaatatcagcacaaacagaggaagatataggaggagtcctgtaattcagaatcaagaatagaaagaagttttcttgttggcacctaaaactctgagggaggagaacatttctctatgattagaggaactgtagtcccaagatgtatgggggaaaaccctatttctttttctctcactctgttctgcctctcgttgatttcgggtgtgggcagagttgcaggaagtttgcagccaaagagttggagggttagtagtcctagatttctagttagaggactgaaatcagagcctcagagagcccagaagtatgggaaagattatggagaaggatcttagaaagtgacccataaagttgttcatggatacctgaattaaccccagcctgtggattgtggatctgaacttaaacaccatacgaagggctttgaaaaaaaatgaagagataagacaacttcccagggcctaggctggccactgggtggcacatacatgggatggaacactgcaaaagctttgaaaatggaactgacatgaaaaccacaacccacaggaggctcattggaactggaggactgagccaaaccaggttgactagctggttgtttcaacaaaaaaggatcttccctgagcaaatgaacttcaacctcaaccctctagagtgttccatgtcagaagaaggctttagaccagggcaaactcttctctgtgacaacccattagaaagtcagaatgcagtatggaatcatcacacatatttttcatccaagaaaccagaggaaaaagagcagtaagtcctaagagaaaaaaagcaaaaggacaggaaatcactgtgcattggggttaaatacactggcattgcaattccatgctgagttcacaggactatttcaaacagcattgcctcattctacttggactcaaatgcagcggctctgcagaggcacacactaaattatacatcttaatttggcctgtgaagtgacctgctctggttatgttcaaggtaaaagcactttgcttcccagggagtcttcgtgtcttctatttcctctgacaggctccaggctggcattctgtctatgacaacattgcagcagtgatttctcccttgattctttttccaataaacaagtagattacctcactctaccccaaatggaaatatctgttctgcctcatcctaatgagaaatgattgccttttagtagatgctatctattgttcatagcatatttcaccaatgctaaaaataagattcaagaattagttgtcgtcattctgtctgctgacggcagacatcctaattgattttggccttaaaaggccaatgcaaagctttctttgcctagtcattggcacagtctttccctgtgactccatctgagcccaacacggctaagacagattacctgtattccatttctaaactggaaaatttttattagttcagtcaaattcacactctacctttcacaccctcctaagaccaagagactgacttttatgaactcaatcaacaagtttccttgccctgtggcttctactagatttagccattgggaaacagtaacagattggagggcagatggaagagggctcgggacctttatcccctgactccctatctcctgggctatagtttggtagtaggcgtgccctctaatgaagaccacgctcctctggggtagttctcctccagctgcagctgctttctctgagtaccattactgccccctccccttgctcatttagtcctagatggctttgaattctgcctctcctgtgtgattttggacaagttattgcctgcctttctcctttccatccaccctgggatggagtgcagctttttcaaagagtagattaaaaaaacaaaggaaggctgggcgcagtggctcacgcctgtaatcccagcactttgggaggctgaggcgggcggatcacaaggtcaggagatcgagaccaccctggccaacacggtgaaaccccgtctccactaaaaatacaaaatattagccaggtgtggtggcgagcacctgtagtcccagctactcaggaggctgaggcaggagaatggcgtgaacccgggaggtggagcttgcaatgagacgagatcgtgccactgcactccagcctgggtgacagagcaagactccgtctcaaaaaacaaaaaagaaaaaaaaaaaaaggaagttctgcaataggttaatggctcttcttctttccatggagtttttcttctctttgctttcctttttgtttttcttctttctgagatagggtctcgctctgtcacccacgctgcagtgcagtggcgtgatctcagctcactgcaacctccagcttctgggcccaggcaattctcctacctcagctcctccaagtagctgggaaaacaggtacatgccatcatgcccagataatttttgtatattttgtagagacagggttttgccatgttgtgcagcctggtctcaaactcccgagctcaagtgatctgcccaccttagcctcccaaagtgctgggattacaggggtgagccactgaggggtttttctttaaacaacctccacactgtaggagtaagaacgtaggaataataacaaaattactacaatacacagcagaaagagacctataaggtatcaaagaacaaatcagaggagttaaaaaaaaaaaggagagtcaacatcatgtttgtagaatcagaataacacttcaggcagaagaaagcattttaaaatagcccctcattaaaatatgggccttggacaggtagagattaagaaaatgaacttccaagaggaagaaacgtaatacaggactgagaaaacaaggattttaatcaggttggtaggatattaacgctatcttcatagacaaatgactcatgaagccatggatgatttttgaccagggaagcagtatgttcagcactactcttaaagattaagtcaaaagtaatgtcagaacagattggagtagaaagagaacagacagggagtcaagaatgaggagctggggacaacatcaaattctgcaaagaggtcaagaaagaaacaaattaaagtgttacaggccgggcgtggtggctcacgcctgtaatcccagcactttgggaggccaaggcaggcagatcacctgaggtcaggagattgagaccagcctggtcaacatagtgaaaccccatccctactaaaaatacaaaaactagcttggtgtggctaattagctggcacctgtagtaccagctacctaggaaactaaggtgggagaatcgcttgaacccgggaggtggaggttgcagtgagccgagatcacgccactgtactccactccagcctgggtgacagagtgagacactgcttcaaaaaaaagatatgttacagacagttttaggtagcaactttagtagagtgagagaacaccaaactaattatattacaaagagtaagtgagaatgctagtggttaagacaagaaaaatatgagtaataacctgtaccggtatttgctattttggtttcttgtcttgtcttttctttttttttttttgagactgagtttcgctctcgttgcccaggctggagcgcaatggcacaatctcggctcaccgcaacctctgccttctggattcaagcgattctcctgcctcagcctcccgagtagctgggattacaggcacgcaccaccatgcccggctaattttgtatttttagtagagagggggtttctccatgttggtcaggctagtcttgaactcctgacctcaggtgatctgctcatctcggcctcccaaagtgctgggattacaggcgtgagctaccatgcctggctgttttgttttgttttgttttgttttgttttgttttgtttttgagacggagtttcactcttgttgccgaggctggagtacagtggtgagatcttggctcactgcaacctccacctcctgggttcaagtgattctcctgcctcagcctcccaagtagctgggattacaggcagccgccatcatgctcaacaaatttttgtatttttggtagagatggggtttcctcatgttgtccaggctggtctcgaactcctgacctcaggtgatcctcccacctcagcctcccaaattgctgggattacaggcgtaagccactgcgcctggcctgtttttgttttttttgagacatggaaaacagaagtatgttttcagtttgaaaagaaggaagtagcaaggaaggagatattgatgatacagtgaaaaatggtatgaaacatgggaaaaaaggcaccagaggaagaagacatgggctcaaggacacatggggaggaatcagccttgacaagaaggaggatggtttcctactcaaagactaaggaaaaaagattattatgagatagcactgaaattgagagagtttacttattttctcaatgatttttgttttcttcaaaaagtctgtaaatttatgattttctttgcattctaacaatgtcacaagaaggaaagcactaaactagagtttcggaggcaaaattctttcctgtgaaactatgatttgactgtgagaccaccagcataagctatgtcttattttaacatatgggcaaatctctacaaaaatgtagaggacaaatttcagccaatataactattttagaggacgagtttctggccaaagtcacagctggttattaaagggaaaaaaagggctcctttttgtgtacgttttttcattgctgttcattttttgacctacaaaccaacccacacagatacccagatatgttaacaaggtgtgcgcattgaagattctctcaaagacgtcgaggaattctttctttgcctctcccttaccttttcaaagcttaattacataaagaaaaatgagtattagctttccacatgatttccatgaaaattagatattgagatcctcaacacatcactggttttacatcactatctggctaacatcatcatctacaggagatgtatgagtatgcttaggaaataagccctttccccctgatttaatttttaatttttatgggtacatagtaggtatatatacttatggggtacatgaaatattctgatacaggcatatagtgcataataatcacatcagggtaaatggggtatccatcacctcaaacatttatcatttctttgcattacaaacattccagctatactgttttagttatttttaaatgtacaacaaattattgttgactgtaatcaccctgttgtacaatcaaatactagttcttatgaattctatctaactatgtttttgtacccaccgcctgatttaaaaaaagaatctgtagataggagattcctactcgttgaacatttaaggctttaccaacaatggtgacagcacagcatctcgctaaaggtgggcttagtacattttactttgtagttagtaagacaaagagagcttccttttcaaatatcgggagtatcttttttagatatgtgaacacattctgtggagtttgcttttatgagaactttatatcaggaacaatggttgcatatgttacatcaaatttgcattttctgattaaggaagctgctcttgaacaatggctttccaattagagagcacaaggggtttaagtaggtttttctttcttttttttgagacggagtctcgctctgtcacccaggctggagtgcagtggcgcgatctcggctcactgcaagctccgcctcccgggttcacgccattctcttgcctcagcctcccgagtagctgggaatacaggcgcccgccaccacgcccggctaatttttttgtatttttagtagagacggggtttcactgtgttagccaggatggtctcaatcttcttacctgatgatccgcctgcctcggcctcccaaagtgctgggattacaggtgtgagccaccgcacctggccggtttttctttttaacaggcaactgcaaagagacgattgtaaccccattttatagaggattgaggatgcaggcagggtgctttgatggtactctcatttttaaaggtctgccacacagtacagctctcaaggaggaaggtggggaccatgggggctctccaagacaaagctgatctgccatctctcccacttccctgatagccacatctgttgacagaaaacctattttttggttgttgttgttaaaatgtctgttcatttataaacctagtaacatggaaggaaaacctattttaattatctcacattatgtgtgtttcgattttataaaatactggaaatctttttataaatcacagtaatatgacatctgtttaaaacgtccacaaaagaagttctttggtttgaacttccatttgagccaaaccaccatcatgtgaggcagacatagcagatgcggttattgtcactgtatacccaaggaggctaaaggagacaagaaatttcaaagcgacttgcccctggtcaaacaactagtgagcaatggaactggactcaaatccaggtttctggactctccgtatgctgctgtttccactaccctagtaccactggcactcactttttctttttctttttttttttttaaagaaagaccaatgaaacaaagtgccatttttaaaaagcccaaaatttaaaaatgtattgcgggataggattttaaaaatgtattgctggataggacttaaaatacaatatagtactatatgcagtgaagcaagtggactcaaagccactactttgtaaagatttctcatttaaatataattttattaaatcttgaagtagataccttctaagaaaaaattcatatcccatcaaatactcagaatcctacaagagatcatataggcaacagtttcacaggtgtgtttgcttcctttttgctttgttgctgttgttcagggagagatactggtattagagttttacaaactcttctgtttaccatgaggatcaaggaaggccctcttcatcttaatccagcgttatttcacgaaatccatcctaagagttagttattttgaaatgcacttcgtaaaataccagtgaccatatatatagactgcttaaacagaaagatctacccagggtagaaagggctgtgtaacccagcaagggaagcactgggccatgagttggaggcatgtatcccaatccaacaagggcaactggactcaccactgctgtatgccaagctcatgtgtttcttagtagactaatcaaggggcaggaagatagcaatttgtggacaagcagtaaaaatctagtaaaaattaaatatttaggtgaggtaatgaaatgagtagattcatacttggttaagaaggagaaagaaagaggagaggagagagatgacattagccaatgatatggtttggctgtgtccccacccaaatctcaccttgaattgtaataatccccacgtgtcatgggcaggccaggtggggataactgaatcatggtggcggttttcccaatactgttctcatggtaatgagtaagtctcatgagatctgatggttttataaatggaagttcccctgtacaaggtctgttgcctgctaccatgtaagatgtgcctttacttctcctttgccttcaccatgattgtgaagcctccccagccgtgtggaactgtgagtccattaaacttttttcccttataaattacccagcctggggtatgtatttattagcagtatgacaacagactaatacagccaacatttcatgaggtcttaaccagtgctaggcctttggctaaatgtacaccatgcctcattcatttacagttgacctttgaccaaagcaggggttggggtgctgactccctgcctgcacagtcaaaaatgtatgtataacttttggttccccaaaagctttactgttaatagcctactgttgaccataagtcttactgataacataaacagttgattaacacatatttgtatgttatatgtattagatgctgtattcttctaataaagtaagctagagaaaagaagatgtcattaagaaaatcacaaggaagggaaaacatatttattctttattaagtggaagtggataatcctaaaggtctttatccttattgtcttcacattcagtaggctgaggaggagaaggaagaggaggggtcttgctgtctcagggacgacagaggcagaagaagtgaaggagaagggagggaggagagacaggcacacttggtataacttttattgaaaaaaattcacgtaaaaatggatccactaagatcaaacccgtgttattcatgggccaactgtaattctcatagtcctatgagtgggtactaataattcttccattttacccatgagaaatcatgtaagcttagggaggttaagtaacttgtccgaagtcacagagttattcagtcacagaattggaacttgaatccaggactattttaaaagtctctctgagtaaaagtgacaaaatactgcatttcttaaaacttcagggagaaataatgaatctgttatgggaggccatcagggggcctctaatataaggattattttgcttctcttcagaaaaatatggttaacagattgtgtttattaagcaattaacactatgatctatgtgccccttgatcagaatataaattaatccatctagaagcaaggacaaaaaacacataatgtttgcaaaattcctgttaggaattcctctttgtcctgaaagtatgttagtgctcatggtttaaggtttctgtcagagcctagagaagaacttgtcccacaataccccagagagagtgacaaaggttaaaactggacatcaccattaagtttgcctcaagtcaagtaaaagaattgtgactgaatttcagtttctgccacaggggatatactaaaaagggtcaaagtgtcaaagtttgacgtggtcctctttgtgattaggaggttggctgtggctgtggacagttggtatctgctcaagcatttaaaccaaccccaactttggcacaaggctgcaggttctaaaggtaatatctaaaccagatctaactagccgctattccttgatattggaatttaaaataattaaagtctcagtcacaagtgctaagacgagatcctctaggtcacagcagccacagtctgacccaaagggcttagcataaaaagtggtgccgccttgggatgaacaatacacagcttcctcttaataaactgagctgctctgggaactccccatttgattgccactcacaatttcgatactttatacaaaaatctcatatccacaattcctgcagttggagatgtcacgatagttctttcacaccatttacatacaagtttagaagcatttccagatgattccacaaattcattctcaacagtctgttaattgagctcaatagaaaggcaaaaacataaaaaggacattacttattagaatgactggcttgaaaagaataaaggggaatataaatatacatttatgaaactaataaaaaagccaaagctttgttgccctagataacttgctatagcggcctcacgctgcttctagaaatctactatgctcctaggattcaaaacacatcctcaaaacacataaataaaaatcctttgaaaacataaaacagtttaataaaaacaatttctgaatttgacattgctaaaacttcaaatttgattgaaggaataaatatacgcaataaaaaaattcaaacggaattttgagacaaatggctactgttgagattcctaatgggaagaagggtaagtttcttcctcttccaaaaataccagggaatttctgggaattaaagaactctgaacacagttctaacatcaggaagattttacattgtttacggcaaatttcaaagacactttgaaataaaagcaaatatataataagtatagcaaataggtctgtaatgagaaggcgctgggcccggagatccagctttttataaaaagccttttttttttcttttccttttttttttttttttttttggtaatagccttttccaaaaagttgcagtcagcataaattgcaaaataaatctgtgaaccagatgaggccactattgagcatattatttattcttttgtcatcagattaagtaatattttctaaagtagatacatacttgcataacaaatcacttttccagttggatgattctgcagagattaagaggtcaggattaccaagaatatccttctcaaaaagcccaataccatcagaagaaagacgcatttagctgcatttatttaagccaaataaatttatatcaagtctttcttctaaaaaccatgttttgtggaccaatagaactgaatggagaacccagaaataaattcatatatttacaatcaactgatttttgacaagggcaccaagaacatacatcagggaaaggacacccccttcaatatacagtgctgggaaaactggacatccatctgtagaagaaataaactagacttgctatatctcttgacataaacaaaaaatcaactcaagatggattaaagaattaaacgtaagacatgaaactagtagtggaaaacataagggaaacacttcagaactatggactaggcaaagattttatggctaagacctcaaaagcacaggcaacaaaaccaaaaatagacaaatgggactatgttaaactaggaagcttctgcacagcaaagcagagtgaagacacagcctgttgaatgggagaaatatttgtaaacttttcatctgacaagaaacaaacatacagaatatacagggaactcaaacaactcaacaataaaaaaaaaaaaaacccgttgaaaaatgggcaaaggacaagaatatttctcaaaagacatacaaacgcccaacaggtatatgaaaaaatgtttgatgtcactaatcagggaaatgcaaatcaaaaccacaatgagatatcattttaactcagttataatggctaatagcagacaaaaaaataacagatgctactgagaatgcagagaaaagggaactcatacactgttggtggaaatgcaaattagtatagtcattatggatgaagatatctcaaaaaaagaaactaccatatgatctagcaattccaatcccactactaggtatttatccaaaggaaaggaaaccaatataaagaaaatcagtataaaaaagggatacctgcaccctcatgtttactgcatagcaaaagatatggaatcaacctgtgtgtataaacggatgagtggataaagaaaatgtggtatatacacaatgaaatactatctggccataaaaataatgaaatcatgtcatttgcaacaacatggatagaactggaggtcattaaataagccaggcacagaaagacaagtatcgcatgttttcagtcatatgtgggagctaaaaaattgatatcatgtaagtagagagcagaattatagtttccagagactgagaaggggatgtggagagaggggaatgaaaaggggtaggttaatgggtacaaacatacaaatagaagaaacaagttctgatgggcgacagtagagtaactatagttaacagcaacatattgtatattccaaatagctagaagagaagatctgaaatgttcccagcatgtagaaatggtaattgctcaaggagacagctgtcataaatatcctgacttaatcattacacattctatgtatgtaacaaaatgtcaccatgtatcctataaataagtacaaatattatatgtcgattaaaaaaacttgttttggaacattaaatgtttcaggaaatgccaacatttataatataagtaacttcagggcatggaaatttaattccagcaatggttcttggaatttaattattaatggaggaaaaatgaactatgggtttttttttaaatcttaatgttgggaggtaggatacaacatttccctatttcttttcttcagtcttaatttccttcccagacccaaaatctcattactgcagctacagttagttcttgctcaatctaagatgtttcaaagaaaatatgtaaaatgctattcacaaatgcaattagaaatgtgatcacttatacaactgtgtgtacatatcactaaacgccattataatgtacagccatgaatagtatttcaaacacaatgattcgaattaaagaaatgtgtttttggccgggcgcggtggctcacgcctgtaatcccagcactttgggaggccaaggcgggtggatcacgaggtcaggagattgagatcatcctggctgacacggtgaaaccccgtctctactaaaaatacaaaaattagccgggcgtggtggcgggcgcctgtggtcccagctactccggaggctgaggcaggacaatggcgtgaacctggaaggcggagcttgcagtgagccgagatcgcgccactgcactccagactgggtggcagagcgagactccgtctcaaaaaaaaaaaaagaaaagaaagaaatgtgttttctatttaagacacttatggattttatggtattaatgaaaatttgatgtaattactaaagtactaagaggtggaatgggtggacttttgtttcaatgatcaacccacatactaaatggaggttccatgataaagttaagcagagaccattggtatactcagttatctggaggaggaatagcaagacgaaaaaaggtaccacacatgcggtgagagtgttatgtggctcttcatgagtgatgggtacagccatctgcacagggaggagcaacttaatcaccaagggatgggacagaaaggggaagaagtgtaggatactgacactggttatgtggtttgacacagagttggaaattctttatttttcagctcctttaaccccggcaatgtaacttctgcctcataaggttgttaccttcactttatggatcataaatggattcacaagaggttcacgagaaggaagtggcagagttgggcttcaacacaaggtcaatgtagtcccaaagtcaatagtcctctaagtatagcacactgagtagagattaaagactgtcaatattctagcttatcagaaagtgtttttaaaaatagaaaaaaagaaaagagaaagcacaggatttcagtaatgttgcagaaaatatgaaggataatgaatcaaagaatgtgactttaggaagaagagaatagggaagggagtgagagggaggcaactgttagaaagcatgcagtaagcacaagattgatcttgccagaggttttctaatacaagggcaataccatataacccacagaacaatgacggagcagctgaagaacctcataataaagttgttgtatatcatggtgacccctgtgcctgaccccaatctgagatatccagtctacttctttgtgaaactgatgaataaggaatcctttataggtttattacacaactagataggcagggagacagttttgagattggaagtacaaggaggaggacataattggttacaagaacctggggaaagagggaaagttgtcagtaaggtggatgaggtgagagagaaagataaagacaatgaagaaaaacagtatctggctcagacagaagaaagaaggtagaagtttctttttcttagtgtttgtaaaaaactttatgagaccacgaaaccaagcagtgctgcttcagggcccaggtgagaaagcatgcttggtgttagagaagggaccattctcccccatgccccatctacttcattccctaagaactcaaaatggtcattggaaaagtctgctgtaaccagcatagcaccattttaatgcagggcaccagaggccagaacaagatgctgtgaggaggaggatagaggaaaatatgattggtccaattggtgagcacaaatgaaacttcaggaaataggccgggcacggtggctcacgcctgtaatcccagcacattgggaggccaaggcgggcggatcacctgaggtcaggagttccagatcagcctggacaacatggtgaaaccctgtctctactaaaaatacaaaaattagccaggcgtggtggcaggtgcctgttatcccaactacttgggaggctgaggcaggagaatcgcttgaacccaggaggtggaggttgcagtgagccgaaattgcgccactgcactccagcctgggcagcaagcctctgtctcaaataaaaaattaaaaaagaaagaaagaaagaaagaaacttcaggaaataaccgaaggagcttttaagaggtcaattaaatcctatgtaaacaggaaagaactaaggttcaatataatatgtattattattattaatgtggcctcactggaacctataaacaacaatttctgggttattaagcttatagaggatgaagaaggagtaagtgacacagaaaaggatataaaaaagaagaagctcaatgaaaaatatcattttcttttcccaaagaaaagaaaagaaaagcaaaaacatccaaatgaaatgggtttctttggaaggtttgctatcattgaacattttcaagtgcatgttgatgactaattgacagaaattctaaggaaattctgtttccacagacctgtaagtccttcttaatacctccccctctcagattccaatccattactagatccgattgattttacttctgtgtgaaagagcatatgcttggatgagttggccttcagaaccgcttccattctgagccagtattttgtgtacattatgttatacaatcttcttgaaaaggcaaagaatgtttgctctcttaagctgtattccataatactccaaatcataaatttttcgtttcaaatacaaagtagaccccaatcatcaacatttttttgattcagttaattagacaattccttagcacacataatttgatccactgatacttaagggatcaatcaagtgtttctagccccaatactagccattatattcttgagagcataggatcatattcagcatatatgatgtagttttccatgttgccagctcccatactgtgaatattaccaacgacaagatccctgtgtaacccatatttagacttatagaatagcgggacaatcagaaatctttccgcatttcacactttagtgtttccaacaagccaagtgcaattcttcaattacatcaggatttctttttcaaatctgggtgccaacccacagggctagatagggaatttgttacactgagaacttttagaaagaatttttcttatcacatctgctttaaatagtaaaactagtttcctttcagaggaggaaacgatttttttttttttagacagggtctcacccaggctggaaggtggagtgcagtggcatgattatggctcactgcagccttgacatccgaggctcaagcaatcctcccacctcaggctcccaagtagctgggactacaggggcataccacaatgctcagctgatttgttttttgtttggttggttggttgtttttgtttgtttgtttttgttcttgttttttacagccagggttttgccatgttgcccaggctggggtcaaattcctaggctcaagtgacccgcctgccttggcctcccaaagtgctaggattacaggcgtaagccaccatgcccaacctgaaggaattattctttaagagctaggatttcaattatggagacttcctaggttatttcaagggaaagaattgacattctggaagaaaacctcctcactcttctaagttttaccatctattttcttctttcactacctctattttgaaagaaattcaagaaggtagggagcccctatttctctatatctcttcccatttcctttgcttttaaataaagaaatgaatcttcaaaaactaagcttagaacactttacacagtgtgggctatatattttctggcctgacaactgctaggtatggcctcagtgaagtcaaaatttagtgcccattaaagcagagaaaactgaaaaacagcactcttcccatcccacacacacacttagaagaacttttcacatggatgccaaaatcatccaagaaattctcacccatatattgttcccttcaaataaagggttctgccccagtcaaatattttttattattgtcaaagttgaactgaggctacaatgcctcaaaattccataatgcctcatactttcttaaggaacctcacatacataattttatttaaataagcaatttatccgaatattgtagcaagatcaatatgtaaagacgtgagacatgtgaattttgctgaagaaagtttgagagaaatagtcggttagagggccccaaagcaaatggtacattttccttttaaaaatcattcctgaggccccctaggtgcagtgtctcatgcctataatcccagcactttgggaggccgaggagggtggatcaagaggtcaggagttcaagaccagcctggccaacatggtgaaaccctgtctcttctaaaaatacaaaagttagctgggcatagtagcacatgcctgtaattccagcactttgggaggccaaggcaggcagatcacaaggtcaggagttcgagaccagcctggccaagatagtaaaaccctgtctctactaaaaatgcaaaaattagccaggcttgttggcaggcacctatagtcccagctacttgggaggctgagacaggagaattgcttgaacccgggaggcaaaggttgcagtgagacaagatcacgccactgcactccagcctgggcgacagagtgagaccctgtctccaaaaaaaaaaaaaaaaaaaaaaatcattcctggagttcccactacttgtcagacattttcctccacactatttcacatggataatttgtctttaagcacctctaaccagcctctttatatttcctttcttctcacttgtaatactttctctttcctgtccctataaaaattcactcaattcactctaaaaatatgactagatataaatcatttcattcttgactatatatgttagccttcacaggaagattatcattttcagggtcaccctgtcggtggagaatgataggttgtgaagtcaattaaaggaatccagcttcacttaaatagaagtattaatatggtcaggggtcttcgcagatggcaaagtcctaatgcttctacctgcagctaagacactgcttaagaacatcaagagtgtttctatgctttggttctcaagcaaaagatgaaggaacagtctatgcctttaaataattaagataattactgctgcttagtgatcactcaccacgtactggccactcttccaagggctttacctgttttaacacattgatttttacagaaaagcctgtgaagtaggtactattattatctccatttacaaggaagaagctgaggcacaggagggtaacttgtccagggtcacacagctagtaagctgctgagctgcaatttgaacccaggtgctttgacccagagccctggctcttgaaattccttacaggactgattggggacaataggtcttattcagaaaacaggcctactcatttactaattcctcttctttaggtcatagaatatggagcactcacaccatgtacaactggtctaagactgatcagtcttcacctgagatggtttctaccagggcagggcaaactaagaaaaaagcagtgtcagaaggcttggactcaagtccagctttgccaattactaacagtactcttgtgcaagtcacttaacctcattgcacctcagtgtcctcatctgtaaaaaggccttttgttctccctacttacagtgcaattccatagtcccccctgcaaagaaatgaaacccactcaccaaattacttttctaggtagacagtaaattcagcgcacaaataggatcagaacccagatttccagagccaaaagagataccacaagacagtaaggggtgaaaacaggcaaaggaaatggtgtaagaaatttagatatgagaaggctgggtgcagtggttcatgcctgtaatcccagcactctgggaggctgaagcgcatggatcacatgaggtcaggagttcgagaccagccagaccaacatggtgaaaccctgtctctattaaaaatacaaaaaaaattagccaggcatggtggtgcatgcctgtaatcccagctacttgggaggctgaggcaggagaattgcttgaacccaggaggcagaggttacagtgagccgagattttgccattggactccagcgtgggcaacgagagcgaaactctgtctcaaaaaagaaaagaaatgtaaatatgaggcgggtacgggcaggaagaagccaatccttcatcaggaatatgaaaactagaaaaaaagcaaatgaagtgtcaaaaataagtaacagcactgaatgtaaaaaaatttaaatgaatgaaaaatgaatgaactaatcaatgcatgttatttccacttctattctagaagaacattcactgttagcttaaatgagacccaggacacagtcaccgcttcactccagcacttccaaggtttttctttctgctttgatccaaacgctatttgcacttaacatgtaccatctgaggaggtgcctttaatcactccctcctggcctgtgtataaaggcaaaaattttcaacttgagactgtcttgggcttttatctgccagtctcaatggtttatgatgtctccatatcctgctctcggtctcaagtctgtttagctacctctgttagattgttttgtccaatcctaaccatgcccatgaacttacacttttggtttccttgaggcctattcctcatagtcttgaaggcaagggtttccctccctccttaacccctagcacagctttaggactatactgcctcggttaaaatcccagctcttccacttagcacattacatagttaagtaatctttgtgagccttaatttctaatccctaaagttagtcaatacctgatagatacactggcattcagaatacagtgactggtacatagtaagtactatataagtaattgctactattatgtgcttcagatcctcattattcaagaatagaatcccaatacaccctgccttctattggcaatgaaccttttgcaatgtattgttcctatttgattaaagcctctctaaagggaagactgtcattgtcaccatctttgtattcccttcagtacataaaacatgacacatattcagtaaatagtggattaaaatgtaattatctaaagatacaaatccaacctgcgtctctgcctgaaaatccaagcatattattatttgtagccagcaataatgattaatgacagcttgatctttactttccaataaacacaacaattaaagtagacaataaaatcataattaggaacaaaattggctttccaccattagaacatatatcaaggagagaaaaatatgaaaagtataaaaattcaataggagaataacagaataaattgataccaaactttccattaaaaatcaaatttaaatggcagtaggaaatgtgaaaagtaaagaaaaaattttttaatgctctcagagactaaacaagggaaaaaaatggatctatgaaatgttgatccatccctgatagaaaaatgaaaggtatgatttcaggattctaacataaactgaaaaaaatatatttttgctcttccttttgcctgaactgccccagaatctttatgactcaatctgggggtacctttagatatctgctcaaatgatgcctcattagaaaggcttccttggtcacccaatttaaaatagtgcctacggccaccgtcactgttgagtccctttccctgaggcatctgtctccatggaacttgtcatctgccacattatatttctattggttacattctgtctcccctacaactatagaatgtaactgtcatgaaaagagttttgttcactgccatgtcctatgtttcagagattaactagaaaatcatgggtgatcaataaaaatctgtccattgagtgaatcacttattaatacaaatattaacaaatatatatggaaagtgtttaaaatagtgcctggcacataatgggcccagttagctatttttaataggaatagaaatagtagcattccttccttgcttctttttgattgattggtaagaaaagtcttctgccttgagtgactagaaaaaagtaggaagccttagataagtaaggagctgggaggcagctttgaaatcaggagcgtaaatacttactttatttaggggacaactggaatttactaatctgctctgtagtacagcatgggcaaagagcagctttagtggaattaacataacaatgtgggaggaaaaacaaggcaggaatcagaaccctgtgggtgaaaacattgcacaggagcccagggccagagcacagcgtgtcagtgaacagaagctgctgccatgatttagtccaccttcttacctagatcagccttcgcttgggcagggtccagatgcggagatgtgaaaaacgtgatgccaccaggcctgtgtaaaaaaaaaaaaaaaaatcaaggctcacctgaagtaatttgcacattaggtgtgtatgtgttactgtgtttcttatatatattaggtggctaatttgaaggggctttcagaaattggggatcacaatgctgaccctttaaggtcttctggagtaagtctagggaacagacgatcctgcctcttccgtgagataaccctaatctcccacctaaactactgcctagcatagggtaaccaaccatgctgggttgcttatgattgaagagtttccaggattcagacatttcagtgctgaaaccagcaaagttgcaggcaagccagtaccagttggccatcctgtatccttgtaagcctgcgtatgctcatctacttagtgttcacactgcaatgagaacaatcatttaaaacaaatctggccacatcgtgcctcagctagtcacacacagccagatcccttcagaggctctcctgctgccttttttttttttttttttttttaagacagagtctcactctggttgcccagactgaagtgcagtggtatgatcacggctcactgcaacctccccctccagggtttcagccattcatcggcctcagcctcctgagtagctgggattacaggccaagtgctaccacgctcagctaattttggtacttttagtaaagagggggcttcaccatgttgtccaggcttgtcttgaactcctgacctcaagtgatccatcacccttggcctcccaaagtgctgggattacaggcatgagccaccatgcccggcctctcctgctcttaaggcagattttagcccttatcatggcctgaaaggctccgtgtggtcaggcccctgttgatttttccagcttaatttttgcatcacatcacagccagtttccttttgggggctcacatgaggccactcccttctgctataagggttccttgcatgatgttcctcctgcatggaatatgatacccatctctctttcacatagttttacttctaaaaatttttcagatcattttactcctaaactgttttcatatagtagctccataactgtcactttttctgagatgtctctcctgcctcttccgagcagacaaatcctcttccatgccctttgggagctgcagccactgctgttggcgcccaccatatactcttgacatgacctccacacacaaaagctgctcgctgcaaacacctgtgactttctgcccgatggctttcttactgcacgtggaagcaccttccccagcacacaggatggtatcagatgagattagagcaacaggtaggagtcagatcagggaggctttcggggctgtgatatagagtccaaattttattctaagttcaatggaaagttattggagagttttgcattgcggagagacaagatctgattatattcttttcttttcttttttctttcttttttttttttttttttgagatggagtttccctctcgttgctcaggctggagtgcaatggcgtgatctcagctcactgcaacctctgcctctcaggttaaagcgattctccttcctcagcctcctgagtagctgggattacagatgcctgccaccatgcctggctaattttttgtatttttagtagagacagggtttcaccatgttagccaggctgctctcgaactcctgacctcaggtgatctacctgcctcggcctcccaaagtgctgggattacaggcataagccaccatacccggcccgtgattatattcttaaaaggtcactcagactgctctatggaaaatagattgtgaaagggtacatctggaagcagagagaagccagtcgggaggttagtgtagtaggcaagattatttttctagctggaatcattggaagtacaactgaaagcataataaaaagtggctttttgtaacagcagcaggagccttcaagtctagggtcagctaagaaagcaacttacctgagaggtcctctgaagtctggctcattcaagtgggttcttagaaatgggtgaaaatcttactcttctcatgcataaagcagggataatgaaaaaaatgtttgagaaacactgttctagaatctcaggcaggctgtaggctcatttttagggccatccattgctcttaagctggcctggaatggcccctggcctccttgactaatcgccctcaacctgccctatcacctcacatttcttcagctctgtacagacactgactaattcacctactcagtgggaagatggtccagtcagataaaatggtctattttcaagtcagcctctctaaacacagatactcctgtttggacaccctcgaagtatacaagtgaaggaaggaagtgttaggagttacatagggtgatgcagataccatgcatctcagcgggatctctccttccaggtttcatgcttctctttctgcccaggcgccatctacctctcactggatgaattcctatgtgttcaacagagcccaaccacaaatgtcacccaccctggaaatccaggaggaaaaaaatttattcctttttttgagcatctaaagcactctgtaaaaatagcattaacagctactattacttgagcacttgtggcagggattatgataaacattttgcctgaattatttcatttaatttccccattgttaaccactttttacagacaggaaactggggcttagagcagcgaaggggcttgctcagtgtcagaaaactaataaatgatagaatgaagattcaataccaagcagcctcttcccctctagaccttaaatacactgtcctatgacttacaccactgtgttataatcagcagctcacgtgcctctttcctctattacttccaccataaatgaccaaggcctgctgtcatgaaaagagaatgacttacaatcaaaccctgttgtataactttaggatattacttactgagactcagcttcctcatttataaaatggagaaaacaaatgcctacctaataggttgttgtcaagataaaattagatagaacttttaatgcacttaccacagtaagtggcacataaatgctcattcaattaaacaagtattatttgagggcctgtggaatgccagtccttacgatggacactgaggatagagaaataccaaaatgtctctcatggagctaacacatgagaaatttaatatatgttgattgctcttacttcttgaggacagagactgtgtgttactcaacatcgaatttctatagtttaatcatgcctagcaccgagtagacactcaataacatttcagtgaattagtaataatgggttacataatttcatacacccaaagtagtggggattatgaatgactgtttcaaattggtgggttgacatttatcaaacagtaggaagaattgaaagcaaagtacaaaaatagcatacccagaggttgtatgcactaaattcatttaagcatagagttactactaaataactttcaaaatattctcaggacaaaatggaatgttataacctgaataatatagaaataataacacatctaatactcaggaggtggggagaaagggtggggaggatgtttcaaaagtgttactctttcaagaaagaaagtcaactgatactgtctaaagaagacactaatttataaaaacagcaatataatcacaatgactttaacttcatgatttttttttggccagagaaacttttaaaaaatatatgtatctcaaggatatatcttgaaataaggtaaacttattggtttcaccattcttttagtttcaattcagtttctttttattgcttgaaattcaagaaaaactaatgtattgttttcgttataaacagcatctctattcatttttataaaagcatttctacctaaacatccatgcaggtagattcatagagagacagacagacagctgtctgaaatgatattacctaaggttaacaattggaatgatagtatttgagatttttaaaatttatctttgtaacgtaatgccttatatgaattcttgaaaccaacatacatcattttttaaaaaagtatttcctactctttctaaagaaaaaatatggcaagatatagttaattcttcctggtaggaatatagatcattgttattttcttcttttccacatttcaaaaatgattttaaaaaatttatatcagactgtacatccataagtaaatttcttcccttttaatttagatcttttttttttcttttttttttttccctgagacagaatcgcactccttcttcacccaggctgaaatgcagtggcacagtctcagctcactgcaacctccgcctcccgggttcaagcaattcttgtgcctcagcctctcaagcagctgggattacaggcgggcgccaccacactcagctaattttcatatttttagtagagatgggtttacgccatgttggccaggctggtctcaaactcctgacctcaagtgatctgcccacctcggcctcccaaaatgctgggattacaggtaagaaccaccgcgcccagctataatttagacctttttttacttatgttgcaaatcgtatccttaaaattacttgagaatccagtttacaaagcggaaaagactgtattcttttgaatgctctttataaatgtaatccacttaagtaaatgaagagctgatgaatatgctacgttatatgtgtgcttatattgttaaaggtttttacatgaagagagattatgaaaagcttcacgataccagactatgtctaatggggtcattaagttcaggattttcaaactaagtggatttccttgtccttcttgtttaaagcatgattattgaaggttagcatctgcttgctgtggtaagtgacaaactagagtaatccagttctcaaccccaagttaagaataataatttaaaatacacaacagttgcatagtcgtaatgttttggaggttgtcaataaaatacctgagccacctgtttaggtgccatggcaatatcttttttcatttatttgggaaaagtttgggagaaaagttggtagtcctattggttccttaaaataattcaaggaatctattgtttcctgtagaaattcagtattctctgggttttgtattattatattaatattatagaaggtgttttctatttgagtaaaacactgcctgtgaaaattttaattaccgttaattccaatttagagaatagaaagtaaatttttgtttcctttactttttagagaagtcttatttcaatgaaaatttgtagtaatttttttttaataaagtaagaattttttttttttttttttttttacacagagtttcactcttgttgcccaggctggagtgcagtggcatgatcttggctcactgcaacctctgccttccaggttcaagcgattctcctgcctcagcctcccagttagctgggattacaggcacgtgccaccacacccagctaattttgtatttttagtagagacagggtttcaccatgttggccaggctggtctcgaactcctgacctcaggtgatcctctcacctcggcctcccaaagagctgggattataggcatgagcccctgtgcctagtcaggaagaagttttttataaattatattcatgaaatgctttcatgcctattgaattctataaaaatgcaggttggaatttctagtctacaagttaataatagtcatagggaaaatgatggaatcttagatttaaagaaaacttagacattattcatctcatcccacctccttcccaaggctgggccctctccttcaatgcaacctttgtgaatggttctccagtctcaccttgagctcttctattgcaaagagttctgtgccccaaaaggaagcctcatggccttccagacagctctaaatgtaaaaaaaaaaaaaaacctctccttttctaagtcaaaatctatttccattcatttattttcattggtgcttttttctcacttccagagctgcagtgagtatatccaactcctttcctgcccaatggccctttaaacacctgaccaccaatcatgtttcctgagacactttctcatgctgagtaaaccatcccaggcccttcagcaagccctcaaatagaaaagtgtttagcctcgaaaatcctacatatttctgactgttctctagtttatcagtgaccctgctacaaaacagtgctgacagttttaaatgttcctcaaaaaaaaaaataaataaaagtgaaagttttgccaggatcacaaatacagttcttgcaactgtcactttaaattattagaaaaacacatcttaaatagccagattctatcttactatctcttcacctatcttaagtttcagtttcctcttcatcatgtttttctttctttgcaaatttgaagaccattcttaagtttctcttggttgcgagcaaatgaaactgattttggctaccttaagcaaaaagagaagcatattgaatctcatgaaattcatgggcagtttcataaaatcagagaaagagtagaaaggccaagagttggaagaagagaaagcagaggcttccagtggcctcctgcatcaggctcacaggtatctccctggagcacttctcttactgcgacttaactccagtgactcttagtcaatgcagtccttcaacccaaaactccagttttgggaagacattccatctggcccaccttggatcagatttccagatccctggtttaactagtcctgcccaggaacagagtcatgtctacagggaccccacacctatatattggggtcattcccagagaaaagaaagtagatatgaacaaggcagacatccccaattgctgtacttctaaaaaaagtaatattcagaaacattgatattaatctatgtttacttttatttctccttgtattttcccctttgcttaacccccactaaggcaggtattagaattggaattcattgcatcaggagaggtatgtggtaaggagaaaaagataaatagcctgtgattattcctagattgtgtttctcaaaattctaaactcttagaacacagggaatttcttgaagcatgtaaaaaggagtgagatttatcaacacaaagagtcctgaagaaccctgaaaaaagaattatctccccagggctgttgggaaaggaaggcaagaggcttgtggatgctggaggaaggacacccaggccctacttcctggcagtgtccccagagaggtcacaagaccctagagccctgcgtgctatatctaggtaagtaggaaccataggaaatgtcaacaaaagaattctgtgggtcaagctccaatgggacacagccacagatgactacaactgagagagctgggagagcagaattactgggtgctacagagtaacccatgcattctgatgcctcaatgaccagaaggtccctcttcccatgccgtggcactgtcagtcccctggagccttgacacaactctggggggtggtataatactgagaaggactgaggttaagttttccacttttccagaaagaaaaggcttgaaatagaaatgaacatggtttctaaaaaataaagagataattttcatatacctgtctttgtagatggagactcttatctgcaaggcttgaatgaaaatgacaggagtaaaatgaaaattgagtagttctgcttccttgctctctgtgaatttggcccatctttttcaagcagctggatttgtacatcatgcactgattgaaatgctaaaagccctctttttaaaaagtcaactttggccgggcacggtggctcatgcctgtaatcccagcactttgggaggccgaggcgggcagatcacaaggtcaggagttcgagaccagcctggccaagatggtgaaaccctgtctctactaaaaatgcaaaaaaaaaaaatcagccaggtgtggtggcgcacgcctgtgatcccagctactcaggaagctgaggcaggagaattgcttgaacccaggaggcagaggttgcgttgagccaagatcatgctgctgcactccagcctgggcgacagagggagactttgtctcaaaaaaaaagtcgagttagcatttttttcaaatcctcttgttattcatgaccttagtgttcctgaagctgttgccctgggtccatgtcatacctttctatacatagtcttagactatatctccctttcctctcttctgtgtgtttcttccttcttagatgtggttcaggcagaaggtccctgcacaactactttggagtcttcagctgtgtctcccttttgctttatcatttgccaagtttgtgactatgatatcagaattttgtttttcttaataaattctgttaagttcctgaatttagctaatggtgctgcaatgtggcagctattgatacattttaacaaaagatgaagaaaaaaaaaaagtcaagacctagaaactgagtctgagagttgactgccttcattttcgtaggctgcagggctgttacttcctaaagagaagttgagtgatgtaatgaacaaagcccagggagtcaggtgacctggatctattcttggctgtgccactgaccgtgtgtgaccttgggcaagtcacttttaatctcccatctcagttttctccactgtataactagaaaaatatcttgtcacttaacaagagaaaatttgggcataagagttactgttgcttgctgcttgaaaaaactttaaggtttttttgtttcaacctaccacagtcttccttaagatggtgtggtatcatggagtttcagttcttcaaatatcgtgaaaattagaattaaattgttttcggaggttaaaattaggaccagttgaaaataaatcagagggtgatcttaacacaaggccagtacctccattatgtgtgatatgttttattcatatttacttggggttggatgggtaggaaagagggaaagcccggctagtctcctgtaagtagaaggtagaggatgctacaatagaaatagaaataaagagagatggggacattggcaaacaaggacaggactgatgccaattctgtagatgaaatccattttctgcagaactgtgggcttttaaaaaattatttgcaaagctctccaaatatgagctaggcttagaaaattttctgaagtggctgccttcatctaaaaagagaaaggagaataattctaatgcctaaaaaagcaactcttgcttttcactatattcatacccagcatactgaactttatttatggtttatcctgctttgtaagtttaaaacatgataaagccaggaacgttctctgtggcttaggcttactagagcacagatagaaaatagaatgcaagcctagcaggtacatactatccagattccattgagagccggccccgtaagcaaacacattaatctctatgatccttgatttcctcatctgtaggagaggtacagcatcatttacctacttcacagaggaaccagcagattacataaccaaagaaaggaatttaagtcttctgtattaagccaaggatggacacagagaaaacatacaactcatgctcacttgagtcttgcccttggaatagactttgaggacatttttctcagaatagagcatcaacaaactacatggactccctggtgtaacggtgagaaatcagctttattaggacgcacagggctgagaccatagggatgtgctttcggtcagtgaagagatcaaagcagcaatgcacactttgaaaatggtaacaaagattttactcactgcctcttggggactgaacacatttaaacataacaatgtttgctcagttgtaattctcacagaggaggaagaccattaaacactgtggcagcaattcttcccaaatactttctccattctggctcagcaatccttacaatagcaaagagcaaaaaacctgctctttaatacttagaagtattatcttctctactgagaagagactgaaaagagttcttgaaactctaaagaagagattttagagaacatgagacagtgctacagtcacctgtgtgctgctcaaaagatggcattcattcaatttcatttgaatttcatttgtgcaaatattaaggttttggaaaccatgaggtttcccaaaattactatggtgagtgaatcaccagggagggcttctcctaataagtagacagttctctttctctttgagaggtccatatttttccttatgtttcacggaggacatcattggagaaagcacctaggcctagatgaatgtggatagatactcacgtgggggaaaaatggaaaaacagggcaactatggctaaaggagtgtttaacaacaagcactgctgtctgacgcatttctagactactagtcttcagatcgtatcatgttctctgagcttctttaacaaaaacatgaactagagcactcatactggaaggcctgtggcaggggtgtgagtactagtatcctggcagcagcatcataaaggtgtctcctgccccacttttacagccttgtctatcctcccagtcagcattctggcggtccctgctacttctccattaatgcccagatcctgatgacaaacatgaacgttaaaaagtcctggctggccggacgtggtaactcacgcctgtaatcccagcactttggaaggccgaggcaggcagatcacaaggtcaggagatcaagaccatcctggctaacacggtgaaaccccatctctactaaaaatacaaaaaattagccaggcgtggtggtgggcacctgtagacccagctattcaggaggctgaagcaggagaatggcgtgaacccgggaggcggagcttgcagtgtgttgagaccgtgccactgcactccagcctgggcaacagagcgagactccatctcaaaaaaaaaaaaaaagtcctggctacctccaaaatattttgcccaatagcctgtcacgtggaagaccacagtaaaaaagcgtttcatttgaaaggtgttcatcattagcagtgacctatgacactttagaaggaagagataggcatagttcgaataagatggaacataaaacaagtcagtatcaagttaaggaaataggaggtgtgttggttaaagaaaaaaaaacttaactagtagtctgcttcctagagagatgcattacagagatcatggtcatttcaggccagtggggaggtaaggatgtccacaaggaggaccaactctcttctctctccctcatcctcaaacatgcactaaggcagtatttgctgaaagcgtagataagcacagaaatccaggttactctgggagattgtttacttttagccagggaacttgagaaacataagtgagagggaatgctccatttctcagacccttgcttttatgcgctgacaaggtaaagaggtttgtttccttctttacatctccccgctttagtaattactattttgcagagcatggggttgatgctttgtcagcacttcagcacagacactaaatacagagatgcttcagttccttcacagtgccagcctgttggtgcaagcttatatttgctgcaggagaatacaattcccatggtttagcgtctctgcaagatcaggcaaatcagattaacagctgtaattctgtcaacacaggctgggacctgttgagaattaagctgatatttaagacagagactatgtacatctaaaaataatagctactcttaaaaccaggtcccaaaaagagattatgaatagcccctaaacgtggtcatactaccaaccagtagcatcactgcaagatatgaaatatccattatgaacttttacactgatacgaataaagttttaataagaaaaccattaaaggcaagatcatctaaagcacaccacagcttgggatggtgtgcatgaatccaaaactttaacgtaaaactagactttgaggcatggtatatgagataggagagaagcatttctcaattttctatcaaggatatttaccatcatcacatcaagttccagtctgtccccattcctcttcctctgggaacagctccaccaattttatgtctggaaagggaggatgaccaggatatgagacctacccttagacaatcataggtcctatgggaccccattcccttggccaaagcatttggtctaggcagggttaagcctgtgacaaaggcttcatcaatcacagtcaatgcattgaacactcagtgagaaagaagcagtctagaatagggccagaggcctggaaatcttctctaaagctgcatctttaacgtatctcaactaagaatcggctaagtacttgtgaaggctggtgagagaaatgcctgtccaaacacaggtggcttcaatagtggcacccctctaagatgtagtgctataaggaacctgaagactaccataccccatttgcatcagctctgacacctaaaaaggataaagacaatggaaaaaaatgcataatttttaggaacgagactggcctttattatccttcttgactagtattattaatagcagttactataaattccccacttatgtgccagaaactactgagtattttacctatattatctcgtttaatcctcacaccttctcctaagagacaggtagtattatccctattttacagacgagaaattaaaattaaagaggcaagcaacttgcaaaaatcactgagctagtcagtggctggtccaggatttgaacctatgtctgacaggtttatgagtttagccattacaatatactgtctcactactcttctccattgtttccctccattgaggccattgcttctttgttcctgcaatatgtctaactattcattggtcctgctcctggactgtaacacagttgagagaaaggagactagtgtttagatatctgatcaagaagacccgagacctcattgattcattgtggaagcaacatcttccacaacgacagttaatctggtatgcaattctcagctatactgttttccctcccaaaaaagggttaataagtctgtgatccaagagatttgcagtaagccctagaaacagctaagcaacggctgttgaatcccattggtgtgcctataagatgctacctggtgtagagaacagaatataattctctctcctaggaatttagatgcgcccctccgcccccctgccaatacacacgcaagggggcatagcagatgatggcacatgtcccatatgcaaacatgaatagtaaacatgctttagtacagctggagctactgtagcagaaagtcaggttgtctgctactccacctggtcttcttaaaggattgggtctggacattcacctctcagtgactgccactccccatatatatcacaggttcaggctctgcattcagcccattcggagtgtgtgagtgctaacatggaactctccaggagacagcaagcagaaatgtggatgattaaaataaagggttttctttggcaatctcaattgcaaatgaggataaggaaaatcctcccagctcacactctgctcccagctacttgttcttgagttaaatgagggcttggctctggcctcagggggcaagagcactgttcgttatttggtggtgggggagggggttgggggatccgtcagcacttacatgcctttagagaatctgcctttacagaacttgaagagctctgatggaggaacagagatgctgtggtggtagtggccttggaggtggtggtagtggcaatggtgatgatgatgatgatgaaagaagaagaaaacggtgatggtaaatgtcatctataaacacaagcaaaaagcagcaacagatacctttctagtcattgccaaccatagtcatgaagctgcttctgttcccaatgcaatcccattgtggtgctccccctctgcgctaaacacatccagcttcaaaaaaaaaaaaaaaaaaaaaaaaaagctctgcatctctccgtcccccgccctcccgccctcccgccctccacctttcctgtgccaagctgggaatgagactgcactggcgggtcaagggggctgggacctgagagtcaacgacaggagttctgtagtgaggagcgttgggatgacccggagggcccaccaacgtacttgggagcagcttggtgggggagctggaggaaccgacacagaaggggaggaagataagctggcggggtaaatagacttgatgcctcattccaagaaccctgaaagccacgggggaaggcggagcaggcagcctttggtcgggaagaagagacgggcagatggccagcagaacagacaagactctctttacctgaccaatactcgggaggctggtcccgagtcccagctactcgggaggctgaggcaggaggattgcttacggcaacagccgtggcggctgcagcctcgaaggatgctgcgctccagtccagagccaaagcccaaaggggcagctgcgccgacctccaccgaggctccgccccacaggccacaggccccgccttcctagcacgcgccggcctgacgagctgtttgggggaggtgagcagtaaactgatcggcagggctgaagaccagtggaaacgtgcagcggcgcccgaggtggcaggggaggcggggcgggaggcggcggtgcccaatcagcagccgagccgttgggccaggctgggaagcagtgctgtcttttggcaccgtctgatccgggctgagggattgaaggcggtggtcgctaagctaggtctaagacggacagccagggcgacaaccagtctctcgctacgtgtccccagcttccctgtttccgagcgcctctcaaggcgcacgctctggacttgttcagatgggggaagggaactggtctggaactccccactattcccgaggttcccacgcctccagatccggagaggccgtttcgctccagtggcctggcccccctgccccctcagcctagccgttcttgatcgtaagtgctaaaaggaacaaagaaggagaattcaagaatccacacataagcccaaaccctgacaggagccttttcctctcccatctcctgcctacgcttcctcctagtagctttttaactgctggcggttaagttactttgactggtttgaattaaacgcaaaataggtttaggctgagaaatgggccagacccttggcgatctgagaaagaaagactgagtccggatgtcaagaggcctgggcctcacgagggagtttgtctgcttatttgaacacctcagagttgaagatcttgttactgctatttctgtgctggtgaatcagtacagaccttgatgccaaggtactgttttgtccccaagtgtctaatcattactgaaatgaactaccttcaaacctttcctaagaggatttgaggccttaatgtcgttgagatttggaatgtgatttgagtgacactgagatcttttccaagtaggtaggcaagaaaaggcattgtctttaatctgcttttggataaatgcgaactgtatcacccatttggtacttgaagatagaattttgtcctgaatagattctgttttcaaataagtaaatgggaaaaaaatttggaaggtatttttaaggtgatttttttcactattttttttctagaaataatagtttattggaactctgatttattcttaatcacaatattagccaaacactgataggccctttatttatttgtttttttaacacacggtctcactctgtcacccaggctggggtgcagtggtgcgatcttggctcactgcagcctcaaccccgtgggctaaagccatcctcccaactcagcctccaaagtacctgggactacaggcgggcaccaccatgtccagctaattttttaattttttatttgtagggacagggtttcaccatattgcccaagctggtctcaaactcctaagctcaagcgatcttcccttctcagcctcccaaaatgccgagattac

SEQ ID NO: 205 - DNA, 317597 bp, Homo sapiens
  source 1..317597: mol_type = genomic DNA
cagttattcagaattttaagttgaatttatttatactgtctccattctttaaagactagaagtggtttaatagaacatacatgatgtatttgtgtgtatttgtgtcatatgcttttggaaaaagtcacttgtcaattccacaaatagttcttgggcgtctactatgtttaaagtatcttgaagtttataaagatgaatgaaatgtccttgattgaatcttggtgtactaccttgtccagaaacacttgctatttactaaaaggataacaaccttacctgcatatcaaaatcacctggggagcttgttgaaaatacaccggcccaggcttcggctctcagcttagggagattctgataatacgcagagcccaaggtgtgtgtagttttaacaaaaagcttcccaagcgaatctgatacacatctaggattaagaaacactgctttaaactaagaaaggactaactgcagaagttcagccacaagtcaaccagatgtatgcccttaacattcacatgagcagttggctaaagtctcttataaggctatttctatttccgaggtttcagaacgggtagttatagtctgaaatacaccccagaggacagagtcaggtccaatcttttctgtaagacaccttgctcaagactgctgtgaaggaataagagagctgcagccaaagatcatcccaaagtctcccagaacactctatcattatatccatctcacatgaaatatgggtgtgtacattttttccttcactagattggcaagtattccagcgcagggcaaatctcttttttctcccaccaaggaacacaatatcccatacataataggtgtttgacaggttttttttttaaattgaattgaatccttacctagctcctagggtctgactatatatacccataaattatacatctgtttataaaacatttcaatcacaccaaagaacatatatatggaagaaagaacgataaacaagcacccatggacccacccccccgtttatgaaacagaactttgccagtgctttcgaagttccttactgaactagatcttttaaaaacagcaacgattttctgaattttaatcagaaggcatgcattccttcattcattgattcgattccgtcatggtcagacccgcctaccaagtgtcaacatgatatacacgatgtaagtattccactgttggggtgaggagggtcaaaagtgacaatatgctatctccagagactacggatcgcctttgctgcaaatggtcccaacccggcctggcgctctagagcaggcgtggtttctgcgcgcggacactttggagagaaactacgcgtcccggcagtccgcggggcgagtgggcggagccgggccgggggcgggggccgggcgccgggcgagaggtggcattgtgtaggggagcgcggagctgcatttgtctgctccaggtgctagccaggcaggcgcagccgtggccggctagggctggaagtgtcagcggcggccgcgggcccggcagaaggccgagtaggagggaccacgcgccgggggccgcgatctctggcagggggcggtgtgccagcggagcaccatgcacataggcgcccagcgccccaactacccctcccgaggaaaagaggccggggccgcgctggggcggcggagagcatgagggaggccggggggcggctcggcttggagcgctgctagggagcggtgcgcgccgcacacccgcctgggcgcggcggagggcggggagccgggcaggtcgcgcctgcgggcggcagccgaccgccgggagctgttctgatttccgacgcgcacgctaggggcccggagcagcccccggccccggcgcgccgccgacatgggcaacgcagggagcatggattcgcagcagaccgatttcagggcgcacaacgtgcctttgaagctgccgatgccagagccaggtgaactggaggagcgatttgccatcgtgctggtaagtgcgcggcggcggtcgggcgcggggacccggggccccgggccgggcggcgcagctgacccccgcccctccccttcaccccgtgccgggagcgagcctccattcccgagggggaggctcccgctttcccctttgtggccccccagcactcctcttcacccccctggcagtcccccgcgctcagtctctcggggtcccgggatggggatgggggctcagggccggctgcccaaccagcctcgaacccattgtctggctggagaggcacctcacggcgcgtgtgcccgggaggtgcggcgtgggcgtgaagagaaggtggcgcgggctgggaggaggaggtggcgagccgcttaggctttttttttaaaaaaaacaaaacaaaacaaaacaaaacaaaacaccctgagcccctgcggaccatccctcgggcggccagcccgggacctgcgaagtccccggcagatggggcgcatgtggccggccgcgggcgccgcgccgggcggtgagcggaggcgaacttggagggctcacgtcgcggcttggccaaggggagcttccccgaaagggaaagcggagacccacagcagtgcggcgccccggcccttggcgaggagcaggggcatctgaaacccaggccggggagaacctcagcgcgttccctctagacttaaatcttaaaccacaaaaatgtggagttttgcggggacgtgttgcgagctgtcctgactgcacgggcgacccctcccctcctcttgcacgcccagccaggtcccccgctccctcctgcattccgcttctcccagctttccagctcctcaaatccaggactctgaaaactcccctctttctccctttcctgctgggacagtgtctgggcccctcccagccgaggcttgtgctgtgagctgcagagggtgtggcggcttgccccagccaggatctggactgctgttggtcccccagactaccagttttagtgtcccagcctcttctaagggatgttgggagggacacacacaggcgagattgggctcattcctactcctgacacttggacacttctcttttcctagttggttacctctaaactccacaagactaggcagcaagggaaactcgtgatccgggcagccaacgattgtgcctgcctgcgggttttcttttcttcttttgttttcatgaaaacttagaactttggcagaggactcgagttctagatcaaaaatcggttttctgaggtgtgctcagctacaggacgttcaaattgcctgccttcaggccttgaaaaaggaatggtttggtatgggaagtgatgttctggatggcaggttagctgtgtgctctttgggagaactgagctctctctcccgccacctggaaactctggtgtggccgtcggggagacagatgaggttgcttgtgttgctttgcatctcctgtgatctcccacagctgctcccaccgttgtgcaagatgggacactgaaatgaaacggcctaggcataactctcaaggcggcctgggtgcatacttgacctgcttttccagagacaaacgtttttcttcaaaaccctcttcctactagacatatggttcttacctcctggctctggctttttttcctcctggctctggcttttttgtttttccatccatgctgtggtgctctgtgtgtgtgtgtgtgtgtgtgtgtgtgtgtgtctgaatacttgtggtggaggagccagtgacacagggaaaccagtgcagcagccataataataacaataatgcaattaagttctgcttgactaggatagcatttttttttgcttgagctttcatttaccctgctgattaataacacatggtgtgaattaatctttagaaaaataatgtcccatcattaacatggtggatttgtgttcttgttaaggctagcagttgcaaatatagtatttagacaattatgattgtacatcccaagcttcttggggcagggttgttgtggctacttttacactactgtgtgtcgcagttactgggtgcaattccttttaaaattgtttacaatattctaagcctctcaatcaagaaacaaaaacaataccaggctgaccttttattgagtagagacaaagcttttgggggaccaggtcagcttgggaaccctcttcctagggacgcatttggaccattgatgcgttccttgtcccaggtcagctccacttgctctttgacaatctgtgagaggagttgaaaccttccagatcatctccgtgggccaatagaagtgcgcagtgttggtgatttctcttgttttttttttttttctggagttgtgtgtgtgataatctcaactttgcttttcttcatgagttgcttaagaaatcagttcaaaccatttaattgtggacatcaatcttgaaggacaagttttaagtggcagatttttaagtatgtatgtggagggcaatggaaattgtgttggcattattgataccagttcaactttcttgtataataaagatcatacgggtgttttgggaggaaaaccagatagtaataccgtatagaaaagtgtctaagcacctcattgtaagtatggctaacatcaataattaacagactgtttcaagctaggagaacagttcctcccaacttccagctctagaatatttaaggcctcagagagaagtaaacaaaaattaaaatgacaaaagtccattttatttcttgttaggaaagccttaagagagaacaaatctattcaatgactataccctccctccccatcagtttatatgggttaaattgtgcgaatataaaaaattagtgggtatgaatggaaatgagagaataaaagactaatgaattaagactagaggggtgaactttgaaaagtaatctttttaatagaaaaaaatggagttagtgactagcaaaaattggatcccagtgttaggagtttaatcctcccaaggataggtatcttcagtatcattatagtaatagttataaaacttacatttaagggaaaaaattactgtcttagtgtatacatttaaaccatttgcttccctgtattgacctttcaggtacagctggaaggtgagatacacacacacacacacacacacacacacacacatatatgcatatgcctttgtgtgtgtgtatgtgcaatgtttctgttatactctaacctatgtataatttatatggaagtgtttcataaattataaagtcagccacgtacttcaatctttgttcttttaggatgtaaggatgtatatatttcataggtaatattagcctgtgttttttgggggttcttcatatctgtaatagccatgtggccctccattgtatttattaaccattgtctaattttgggggttacatcaagcttgtcaaccactgcctgtgggcctcatgggcccaacgcaaattcataaactttcttaaaacattatgagatttatttcatgatttttttttaagctcatcggctatcgttagtttttgtgtattttatgtgtggcccaagacaattcttcttcttccaagtgtggcccagggaagccaaaagattggacatcctgggttacatacacacatccacaaatactcccatgtcttttatttttaaagatgatgataagaaggtggttctgggtggatgtggtgaacaactgatggtttttgtccgagaatacctgtttctacattagacactgcataatattattcactcatttttggcttgcagtcactgtttacaacttaaaaggcacacccttggatgcctttgttgaagagctatccttaaaattcttttgttgagtttcagaggaaaggacaattttaagtctgtgtcttagctgctgtatcttgtgcaatatcaggtgtcaggcagcactgcaaacagatttaaaattattaggaagtaatggtttagggcagtattatatttggtatcaggaactgctttggtatctgattaatttgagtccatttccttctcattttttttctgcatgtcctgagattgaatgtggtcattttgttttaggaaggagtgggaacattttctgagtatctactatgagtaggccttttacatgttctcatttaatgctcacagtaactaatgctatcagcaatactatagatgcataagtaatgattatttaggctgggcacagtggctcacccctataatcccagcactttgggaggctgaggtgagaggatcacttgagcccaggaattcgagaccagcctgggcaacatagtgagatcctgtctctatgaaaaaagaaaaaaaaagattagccaggtgtggtggcttgcacctgtagtcccacctacacaagaggctgaggtgggaggatcatttgagtcctggaggtcgaggctgaagtgagctgtgttcataccattgcattccagcctgggtgacaaagtaagaccaggtctcaaaaaagaaaaagatatctaagttgcctaaaattatacagttattaaataaccaatctagtctttcagcagagatttggatctgttccctactccccctggcctttcttttatattatgcttccataggcttagaactgggaagaaaaaaagggcctgcgactagcagtaaaaaattcctgtctggttagtgcaaatttcagactggataaagttggcagaaattcttcagaagtgactgaagtgaggtgcatttgaagtttcttctctttagatgtcaagccttttggcatcttcactgtgctcttctattttcaagcatggagttaaaaattgatctggtccaaaaaggtgctcttcagtttttcttttcaaggcagatttgaaataccttggctgaaaagtttgttctccaaatcagaaggaataggcaacctgtcagtgcaacgcatatactccaaatgcgaaacctgtgaaaaggaaaggaaggtcaagttgttgttttttttgtttgtttttctttttgagatggagtcttgctctgtcgcccaggctggagtgcagtggtgcaatattggctcactgcaacctctgctacccgggttcaagtgattctcctgcctcagcctcctgagtagctgggattacaggtgtgtgccaccatgcccggctgatttttgtatttttagtagagatggggtttcagcatcttggccaggctggtcttgaactcctgacctcgtgatccacctgcctcagcctcccagagtgctgggattacaggtgtgaaccactgtgcccggccggaaggtcaagttttaacatttaagtttacttcccactgcaaggtgttgctccctttcagccacttccaaggaaagcacttgccataaagtctgttaagcagatgggcgggtgggagtgtagtgaggccatcagatgctgctgatttgtattctcacattctttctcctgttgtgaggggaagagagtgtggaagaggggtggtggagtgttggcactttgaaccattacagtttcaccctaggcagtaactccctgagctgttttattctccaaagtgggaatatatggttagggctgttatcattatcaggatgcattttttcctcctaataataccagtaaaaactgtgacaatatattggggtatctaggatagaagttgatcaaatgcaaatgtttggctccaggaagagactggcaacagtgtaaagtgatgaaatttggggagagatggtatgcgtggccttaaatccgtaagtgataagaagtactttggcttgtggcctgtcatttagcattggcctgggaggcaggagacctagtttctagaatcatatttgctgcaccaacttggacaagtgaaactctttcctctggcccttggttttcctcctttgtgaatgggaataaaatttggcacaattgttaacatagtcgtgagatgatggaaatcataccacttgaaaacaaaatttccagaacataatacattgtgattcattagttgacattggcttttgaagagctttcaggtggaaatgtgtgtaggggtgttctgtgtggtctaaagagtagaattccccagggtcagtgactgaaagtcatatgagcatagggaaaaatattctaacatgtagagttgttgaaaatggatggtgagttctccgttaaagttattcagataatctgtgtgacaaacactggtgattggaaggccctttgcagcccaagaagataggaagtacattattggctcgaaagttgccctctttgaggtgagtctgcaacttgcaggttctagacatagaattataacacctgagagtggggaaagatctcctggtaggtgcttcctgggcttaaagaagaaaaagatacgtatgggctgatgtttgttctggaaattcatttgactttataagaactgttgcttaaagggtttggtcttaatgaacagtgctcttctttttcatatttagagcttggggaatagggacaaggtaaagtgggctctccagccctcaggtttaagcaagtaatagatgtcaaaaaagtagctaatacaagaagcactgattatagatgattgcccctcctttgcaagaggacgctgtaactggagtacttttaggaacaaagcattgaatccttataaaagaaggaacagcctagaggaacttaggagggaaggtgagttacaagctatacagttgcttggcagatctcatcttgtagagcggctctttatggagtgccactgccatccctgcaaataagaagtgtgtccctaggctttggagtcatggttccttagagagccttcatgtaccttcttagttctcacctacttgaacactggggacagagatagctcattgcttgtcttccctttagaattccatctgttcatactgcagggtgatcttcctccctcctccccagtgaccccttcctcctttccagaaacctgtctttcaacataaatgccaaggactatgcagtttccaactgatagcatataatttggaagcaatgtctaagggaagagctgttaggttggagagctgcctcttgaactgtgatctcaaccaaggcccggagatgtggaccagacgggcttggaattctgaaattgggcaacattcagccctatttaccaggtatgatggtatttgatgttgacagataaaaatgtacattcttttcactctctgaaaaaacaaacagaaaaacatgaccatcagtgttcactggtaggcaattatcacaaactctctatgatttctagtcttgtatagtttctaggacaaacttcatatagtttctgtgattccatgatcttcagtgttcttgtttagcctgtaattgactttggtgactctcatttcacatgtaaccttagtctccttttttctttgcagaagttctgatgcatttgtaagcccctgtaaccattgccacagaagctgaaagccttgaggtgtttagaccctgctatccccagaagtaatctcacttgactgacttctgtgcatagaagatgcccatggcttggttttgggaatgatgtcaaatatcaaatagttcatatttttttgttttgagatggattctccttctgtcatctgggctggcgtacagtggcgtgatctcagctcactgcaacctctgcctcctgggttcaagcgatcctcctgcctcagcctcctgagtagctgggattacaggcacgcaccaccacacccagctagtttttgtacttttagtagagacaaggtttcaccacattggccaggctggtcttgaactcctgacctcaagtgatccaccagtcttgacatctcaaagtgctgggattacaggcataagccaccacacccggcttaaatagttcacatttttgaccatgtgcctggtgctgggacactaacgtgtgactgatggtgcttttaaataacacatctcactagtctcaagacctgtcttggttgagggtttgctcaggaacctgacttcccttccttgttttttttctctccgtggaagtttggcagaacaccttatttaagctagaataagggtattggtaagttaaagtagtggttctcaaacttggttgtgcattgacatcacttggcgatcctcagaaagtacaagtgggccaggtacagtggctcacgcctgtaatcccagcactttgggaggccaagacaggaggatcacttgaggccaggagtcctagaccagtgtggagcaacatagggagacctcatttctactactaatgaaaattagcagatgtggtggtgcatgcctgtagtcacagcttacctgggaggctgaggcaggaggattgcttgagcccagaagtttgaggttgcagtgagctatgatcatgccactgcactctagtctgggcaacagagcaagactatctctaaaacaaaaacaaaaacaaaaacagaaacccacaaatgcctgggttccactcccagaaattctgataaatttgtctggaatgtgacctgggcatcaggatttttaaaagctccctagaaggtttgaatgtgcagccaaggttgacagccactgtgctagatgttttccccctttttcttcctaccccaaagaccaagccaatttgcctatgagttaaaaccagcagaaaacaagataatgagtgtaatagaaaagggattgtttaagaagttaaacaaaattttggatagattaggcaaaattgagaaggttgagaagagttaaaaaaatgaaagatatttgattcaactaaaagcaacaagatgaaaaaatacagaagaaaaggataaatcctgttgaatggtagagagactttatttaactatttaagaaatgaccaccaaattatcataatgaaaatttgtgagaaaattctatacatatggtgtaagattaagcaatgacccagaagtatacttctggagtagaacaatcaataaatcaattgcatttttgcttaggcctccattctgtagcctaattgtttgttggttcaatgcagcccttttgctttgatctctggttttaccatttacaaagacttgatgagcttggcttcctgtagtgaaattcaaatatacttgtgaaatgtaaacaacattcatttattaagaatcctataatcaaggcaaattggcatgcttatataagcaattagccttgagaatagaaagataaataggatgctaggtcaagaatgagctgattgttctcaatgcaagactctagttatttctttattcattataatgtaagcaaatagacattcctcttattcataatttttagcatttgtggtttggggtttgaggacagcatatgtggttttctggaactgagaggatagtagcaattattgtttcattttgatttagaaatataaatcaatcttataaggaactgtaggtagttgatttatgactagataaaactttctaataatagggaacagggcaagagagggtatggatttaaatgggaatagtaaaggataataatagttttattttggtggggaaggtaaagaagatgacaattttacagtggcagaaagattgaaaatagtctcatctgccctcattgaataaattgaataaaaaaggaataacattcttttttttattggcatagaaggaagcattatgataactaatagcaggagaagttggatatgtcatgatcagatttgcaccatggcaacactcagttttgcccagtgagttcagtactgctaaatgtcttatttgtgaaagctagagaacctaaaatgcaaaggcagtgaattgggtgaatagctttgttaggttcagttctggccctttcattccctgatatggtcacctttgttgttcttccaaagaaattttctctttggtgacaatggagtatcttgactaatcagggttctttattcccaaggacttctgcctggtgaacctaggaagccaaatgttttgggaccaggatgccataaacttggattcccagggccttaccataaagtcactctacaccaactaatttggccatccagatgcgaacctggagaagccatttagaactctgtggcctcctgggcttgtgcagcccttcctcttgccagtgtttacaccctccagtggccttttatagcagaatgtttggtttggttctcagggtccactttttggaaagcattgtttggcttagaaatctccagatcatttgtgaatttaccaggtctcatttctcatttaattaaacaagtctttaacattaaacacctatagttttttttttctttttcttctttttagatggagtctcactctgttgcccacgctggagtgcagtggcacaatcttggctcactgcaacctccacctcctgggttcaagcgattctcctgcctcagcctccagagtggctgggattacaggtgcatgcctctgtgcccggctaatttttgtatttgtagtagagacggggtttcatcatgttgcccaagctgctcttgaactcccaacctcaggtgatccgcccaccccagcctcccaaagtgctgggattacaggtgtgagccactgcacctggcctatacttttattatttcaccagtaattatcagaagttctggcagggtgtggtggctcacatctgtaattccagtgctttgggaggctgaggtgggagaactgcttgaggcctggagtttgagaccagcctgggcaacagcaagatcctgtgcctgtgaaaattaaaaaaagaaaccacacacaaaaaaactggcttagtggcacactccctgtagtcctagctacttgggaggctgaggtgggagaattgcttgagcccagcagttcgaggctgaagtgagctgtaatcatgccactgtactacggcctgggtgacaaagtaagataccctatctctaacaacaaaaaaagttccacgattgatttcctctgatgtttctaatgataatggagaaatttaaaaattctttcttggtcattttttagaatgatattacctgatcctcttttaaaaaaatcttttcatggccaggcacggtggctcagactgggtgccatggctcatgcctataatcccagcactttgggaggccgaggtgggcagatcacgaggtcaggagttcgagaccagcctggccaacatggtgaaaccccgtatctactaaagatacaaaaaattagctgggcatagtggcacacacctgtagtcccagctacttgggaggctgaggcaggagaatcgcttgaacctgggaagcggaggttgcagtgagccgagatcctgccacagcactccagtctgggtgacagggcgatattccgtctcaaaaaaaaaaaatttttttttcacaaaccagacacagttgcaaccaactcccagatcaggaatcagaatccctccctccctcttgttcttcaggagtggtgagacttggcttctggtctcccagccacagttattgctcacctgaacttactttctcagcggtcacacttcatgtggaagagagtaggccacaggattgtgccttgtggtctgactccaagtgactctaaccatgaggtttccaccacttcctttgagagcattcctagtccaagtaggcctgagcattaggaaatattgacactgcagcattttcttgttgcttttagttatatcatcattgatcaccttaatggtatttttgtttgtgtgtatagtatccctgcttttcataatactgagaagaggatattttgatttgtgttcccaaagtaaagcatgaatggggagggatggccacagagaaaatgagcatttgaaattttgggcattaatacttggaattacggatatgtaggtacaaaatttatgtgctccttctcaagtgtaagttctgacctttagcttttgttatctttcttgatgactcttgaaatattaaaaggtataagactgtgaatttcatgttctggttcaatttcccatcacagccctattgtgttattccagacattattaatagataaaatttgaggggctcatggccacgtttgttggtctctcttcttttctctgctttgtaactcctgtatccctcacagccttcttcctgaagccagctacgacttggccagacccatctcctcttctgtttctttacaagtccctaacttggaagttttttttttttctttttcgttttttaatccctgtccccagattaggcctgtgctttctctccttcgtatttttttcccccggtgattcccctgcataggatgggctctcttcgcttctctgcttactgaaactataccagccttcaaagttttctacagtcccactttttccgagggtccttacagacccacgtcagcatgggggtgatgagaaaaacaactctccttactttgatcgctttgtggtatgaattatctcttactcatgaggcacttgattaaatatcactttgtataacttctgattgtaaaatagggagatgctttcatatgtagctttgtagttgctcattacattcttagccatttgtttgtgtctttgtttcacctgccagttcacactgtgggctcctgaaaggcaaggatcatgtcttacggggtctgacagcttttacttggcttagccttgggaagggtcccagcaaatgattgctgacttgataagggaacggtgcccactgaaagaggactgggaattggagtggctgctctggatacctatttaactgaccacactaggctgactattaattgcacataacttgcctttgtgttgaaatgacacttggtcatagattcttattcatcttggtattccccttatcacttgactgtggtaggtgtccaagaatacgaaacattcagagacaacaagttggcatcatgcttccctgactccttgtgaattagcagaagaggaggagggcagtttatattttcttttttgttggagtgaggtaagtttaaatgggcagcgttctttgttttggcatgttagtgctttgctgtttgcagagtgctctccaattgtcttctgtgcttctaagggtttttttttttttttttttttttttttgagacggagtctcgctctgtcgcccaggccggactgtggactgcagtggcacaatctcggctcactgcaagctccgcttcccgggttcacgccattctcctgcctcagcctccccagtagctgggactacaggtgcccgccaccgcgcccggctaattttttgtattttttagtagagacggggtttcaccttgttagccaggatggtctcgatctcctgacctcatgatccacccgcctcggcctcccaaagtgctgggattacaggcgtgagccaccgcgcccggccacttctaagggttttaaataaatgagacaaatagggcatgagactggatggcttgaagttatataagaaggtggtgaagtttgtgatccagtcctaggtcttcatactaaaactccggggtgcattccactgtaaactaatgatgtttatgaattctctcgagttctgttaggtgctttatatgcattatcgttgatgctcatgacaacttttccagggaggtattgtcttccttttactaatgagacaatgggctgagggtgttaacgtggccactacccaatcctgggggcagagtttgaatccaggcctgcctgagacagcctgcttctttctactgcactacactattatgttttctgagttagctctaagatgtcattaaatgtatgcttcttgttcgttcttcacataccctctgtactaaactcattatttcatacaatagctgctttgaatgagtccaacttgtgttatatgctgcaaaatctgaccttaatctcaagggactcaggatgtagctggggaaacaagcaacaataagcaacccagagagcttcataatcagtgtagatgtagatatgctaagggtttggagggaaggtgccttttctgaattctgagtgttcagaaaatgtttccttggaataggaagtaggtgagattctagctcagtcccaaccactgctgggctgcacttttcattctacattgtgcatttttgctcctttggtgcttatatgctttattcagacagtccaaaaaatatttcttgagcgtttactgtgtgccaggcagtgttgtaggcactggaggatgctgtactgaggtgggatcgattgaacgtctgctcccaaggaatttacattttaatgggagggcgtagagggggaagccagacctgaaggggatgcacaggtacagaaatggagcgtttagatggtggaaagtgccatgaggagaataaaatgggatatgtgaagtggtgtcatcccgataaggtctgagtgaggaggagcaggcagctagtgtgatcaggtaagagccctcgggagggaggagtagccagagtacgatttgtttctccgtttgctggttcaggagcagtttccagggaccctggagcaagtgaagggtcattccacagcatatgggatatactcagcccagacagcttcagaccttgcccatgggacagcctcaaggtggaggctcaggagtctgtcccctcactctgttgtcggtaacagagccatttcttataggtggttttgtgtagtcagagttctgcctcttgttaaattcaggtgattttcaaagaaatgagtatttcagaattgccattgttctagacccatgggacagactgtttgagaatggactgtttgatcagtgtgagctgtgccctaaatgcaggcactctgaaggccagtacttagaatggctttctttgtctgcttgaagctataggttgacctgggacaggcaaggtattacggaagagaattactttattgctgttaacttgctactagcttgtagctcagattctttccctctttttcttttttatatttcctttacaaaattattgtattttaaggggcatacaagaattttacaaagaaggctgggcacggtggctcacgcctgtaatcccatcactttgagaggccgaggtgggcagatcacttgaggtcaggacttcgagacccacctggccaacacggtgaagccctgtctctattataaatacaaaaatcggccgggtatggtggcgcgcacttgtagtcccagctacttgggaggctgaggcaggagaatcgcttgaacctgggaggcggaggctgcagtgagctgagatcacaccactgcactccagcctgggtaacagagtgagactctttctcaaaaagaattttataaagaggtgcaattcttaagataaaaataaagtgaaagttgtgtatagttaaaattatcccaaaaatacctgaagttgcccatgaaagtacatgttcaattctgtagtgaaacaaccctagaaagcaattattatttcttttaaattttactttaagttctgagatacatgtgcagaacgtgcaggtttgttacataggtatacatgccatggtttgctgtacctatcaacctgtcatctaggttttaagccctgcatacgttaggtatttgtcctaatgctctccctcccctttcccaccaatcccagcaggttccattgtgtgacgttcccctcccggtgtccatgtgttctcattgttcaacccccacttatgagtgagaacttgtggcatttggttttctgttcctgtgttagtttgctgagaatgatggttttcagcttcatccatgtccctgcaaaggccatgaactcatccttttttatggctgcatagtattccatggtgtatatgtgccacattttctttatccagtctatcattgatgggcatttgggttggttccaagtctttgctattgtaaatagtgttgcagtagacatacgtgtgcatgtgtctttatagtagaataatttataatcttttgggtatatacccataatgggattgctgggtcaaatggtatttctggttctagatcctggaggaatcaccacactgtcttccacaatggtggaactaatttacactcccaccaacagtgtaaaagcattcctatttctccacagcctcaccagcacctgttgtttcctgactttaataatcaccattctaactggcatgaggtggtatctcatcgtggttttgatttgcatttctctaatgactagtgatgatgagctcctagaaagcaattcttatgcgtgttaaagtttgagaacctttaagcatgattaaaagagaagccacaaaagaaaagtgggcaattctgacttagaactctcagacctctagcagtgactggaggatgggtgggaattttggtatcttcctgcttgccagtaggtttacacaattcgatatcagaataagtctttaaatacatattagtggctttgtttattgtgaggattttaaggtagccctaatgtgggtttaaatgtggatttcatgcatgttcagtaataatacaatataggtcacttgtgtatttctttaatcgtttcagtaaacatgaatggtagctcaggaaacctgaaaggtaggtatatccctgtctcatatatgagaaactcaggattagggaagttaaaaatcttacctgagaacacatatttctagtaggtaataaagctgaaaatcaaatttctcgactcaaaagccgtgctcctaacattctgttttgactcccaatgcaaaaatattatgtaaatataagctatatgtagaataaatataaatgtttcaaagtaaattgacagccttgtgatggcaagctcatcatcttttcagtctgtgttcattttgttatatacccagaaccaacagtaactacatatccttcagaaaaattacagataaaatgagaactggatgaataaagccactgttcactattgaaatagtaaaggccaaataagcttgtgatcaaatcttttttttttttttctagtaacagttgtcctctgaaggctttctgaaggctctctttcagacaactgtctctgaacctttgtttttttaaatgcccctagtaaaatggctgtgttgttacagcttgaaggctgtgtggtaagcctttgctcagccctcagtgataacccatagacttggacttccatgtgagaagaacaaccattattatattgtgttagtaggccttgtgttggagattgcttatttttaaaaaaacaaatgccatgtgatcttatttctatttaaccaatgttttgcttgagtgtaccaagcaaggcctcttgagatgctgggacacaaaggtgaattttattttcccttttgcctttgagtagttaactgcctagtagatgagatactggaggtaagagaatgaagattataggatatttaaaggcatttatcatacatatatgtgttatgtttataatgtgctatagaaggacatattaaagttgaagtttctaatattttagattaagctgataaatctagacaacttactttggctgaaggttataatacataattgcatgaattctgctctgtgcctgaatgcttagagatttgagtgtgtgtctaggtatatctgtgcaaacaacttggaagaatctggtaaaaagtattaataccaggatcagccttttaggtggtaagagaatctaccccaaaggcagtcgactctaagccttacttctctaggttgcaagcatcagaaagtaagtatatgtccctatactcactttgttagaaagcccacagtcttttctgcaaagtctatttaacaaagcttgtttatgatcttggactttggactaaacctgagtttgaatcaggattttgctgcttactaattgattgacctttctaagccttggtagccacatccgtcatgagctcaagagctacctttttgacttgttatggatattaagtgatattgcttagtacagtcaagttgtggcagtcaggtaagcacctcacaagaagtggttgttctgattattttgtactcttttaaaatttgactttattaaagcactggctttagggtccaagctgtggactttaactggattctagtatattttacaggtaactttagttaaatcatcatcaacctcaaatgtgaagaacaagtgaagcagggcccccagaacgcccagaattgaactaatggtggcttgtatttgctactcttgccataagattgtacctactgaccttctgtgatacatcagtgttttcaaagttctggtccatgcatgcagccccacttggatttatgttgactcttgtatattttgttctttctagaaaaagagacccaggtgtttcagggcattgggctattccatttcagagcctaatggaagtgctagtgttttcataattggaacagacaactgccatgctacatatggtgctgtgaccactgagcagcttgttcacaatgagaaaatacattgaagttgtgaccatttgagccttgaagaaactgctgttgaagttttgtttggctccagctccatcctggaatggatggagtcatttggaattattctgaattccagtagtggcaaaaaaaaaaattgtgtaacttgtatatagatggttttctgtttgattaacagcattgttcaataaaagatgcattgttttaaatcaagaatacggtgccatctgacttgatctaggaggcacagaaagaagacattacagattacattccccagtaaacccctgcgttattttttccagaaggttctatattaatctgtttgggttgcgtcctacgtgatcttgctgagtcagacagagctaagcttatgaaacaaaggctagtcccaaatcaaataaaaacacaccaccatccagaaatgagagcctagaattttctaaagatgcacacatctttcttactatctggtgaggaaaattgctcatttttctctcagctgataaatatcacttttgccctaaatttttgtagtggcaatctacttttttaagttggtgagataaaagaatatttgatagcactgtcagactagtctgagataaaattctctgtgttctcagacccttaagggttcttaaattgcatgggcggaagctgtgtgcatgtttttcttggtgccctatttccatatcaaatagccttaatttttgtattttagtaatgaaggtatgaacccattctgtcaggcttcttatgccgtttattgtagcctttagtcagcttagaatagcatgaaaggaagtaataagccaactctaagaaggtccagatgaaaaggattataatatggtacaaaaataatagcatgcctggcctagccatgtgactcatttcttttggagtattccttttgacagcttttttgaatcacacatcaatcacaatgctggtatttttggcggggtgctagacgttactctaatgctcatgatggtaactgccaaaagtgaacaaagaggagaattataaatgaaacctaacagcatcacaaacatttattttttcttgagcagaaacaaaattgggagttagatgatatctttttcattgccccaagaaaaccactgctttattccattgaaaataagaccttgatgggtcatccccggtctttggcagtagaaactattcgtcttgtcttggtttccattcaggagctttccttcccaaaccttgtcccctgctttaggagtaatttttttagggctttaggtttttctcatgtcccagtgactaagcttgcttttgggtggttctctgtgctgcatgtagtccttctgggaagaaactcccatgaagttcaaaggagcagcagatatgcagggtgcatctagaaatgaaaatctgaccctttgtccctctccttttcatctctcttttgtacaggccttctttccttctgtgcaaacagacccttgtcatagtcatagtccatcacgctgttaaatgatttccagcactgctctatgatgtgctgtaatttcagggagtagttttattttctacaacatgttgctctgtagcacgtgtatttcactactgagtggtagttctaatggacatattcttaacaaaatagtcccagcattacagaatactaggttagaatacatacccaaataaataaaatgttacagacacagtccaagctcgttctctcctgacttcctttctcccgctacagaggaaaattaccccgaattggcacatctcattcctatgcactcttgttaaaaataacttatagtttgcttctgaatttatagaaatggcactataatccatatgtacttttgaatctttatacatttgatttgagaagtatttatgttgatgcatgtggctttaggtcatttattttattttgtttatttttttgagatgaagtctcgctctgtcacccaggctggagtgcaatggcacatggcaacctctgcctcctgggttcaagcaattctgtctcagccttccgagtagctgggattacaggtgtgcgccaccacgcctggctaatgtttttgtatttttgtgtagacagggtttcaccatgttggtgaggctggtctcgaactcctgacctcaagtgatccacccacctcagcctcccaaagtgctgggattacaggcgtgagccaccacacccagcctggctagaggtcatttaatttttgaattatgttcattgaataaatgtgccataaattacagttgatcctcattatatgtgaattctggatttgcaaatttgcctatttgataaaaatgtatctgtaaccccaaagttaatacagtgcttttatggtcactcacagaccacaaagtggtgaaaaatttgtcaccagatgtgcagattctcagctgaggttgaacaaggtgactctgcttttttgtttcagcatgcatactgtacacgtgtatcctttttgctttctatttagtgccacactttttgcacttttgtgcttttttttttttggtgattttgctatttaaaacagacttcaagcataatgctgaagtgctgtccagtgttaactaagtgcaggaaggctgagatgtgccttatggagaagatatgtatattggtaagcttctttcatgcatgaatttagagagctgttggctgtgaggctgtgagttcagtgttaatgaatcaataatatatattaagtaatatatataacgataaatattaaataagtttaatatataacgataaatattaaataagtttaatatataatgataaatattacataagtttaatatatcacgataaatattacataagtttaatatatcacgataaatattacataagtttaatgtatcacgataaatattacatcagtttaatgtatcacgataaatattacatcagtttaatgtatcacgataaatattaaatcagtttaatgtatcacgataaatattaaatcagtttaatgtatcacgataaatattaaatcagtttaatgtatcacgataaatattaaatcagtttaatgtatcacgataaatattaaatcagtttaatgtatcacgataaatattaaatcagtttaatgtatcacgataaatattaaatcagtttaatgtataacgataaatattaaatcagtttaatgtataacgataaatattaaatcagtttaatgtataacgataaatattaaatcagtttaatgtataacgataaatattaaatcagtttaatgtataacgataaatattaaatcagtttaatgtataacgataaatattaaatcagtttaatgtataacgataaatattaaatcagtttaatgtataacgataaatattaaatcagtttaatgtataacgataaatattaaatcagtttaatgtataacgataaatattaaatcagtttaatgtataactatatattaaatcagtttaatatataaaaataaataagaaacatacatagcacagttttatgtattgatcagttgacaaaaatgttgcaaccagaggctctggggagcctaaccgtgtatttccgctagaactaatggttcaatggtcaataattcagtgtccatggtgactttatagaccataactgtgatggttaatatcgagtgtcaacttgattggattgaaggatgcaaagtgttgtttctaggtgagtctgtgagggtgctgccaaaggagattaacatttgagtcagtcaactgggagaggcagatccaccctcaatctgggtgggcaccatccaatcagctgccagtgtggctagaataaagcagacagaagaagatggaagagctgattcactgagtctgctgagtctgccgagtctgccagccttcatctttctcttgtgcccaatgcttcctgccctcgaacatcagactccaagttcttcagcttttggactcttagatttacaccagtgatttgccaggggctctcgggcatttggccacagactgaggcctgcactatcagcttccctactttagaggttttgggactgggactggcttccttgctcctcagtttgcagatggcctattgttggacttcaccttgtgatcctgtgagtcaattctgctaataaggccaggcgtggtggctcacacctgtaatcccagcactttgggaggctgaggcgggtggatcacctgaggtcaggagtttgagaccaccctggccaacatggtgaaaaacccctgtctactaaaagtacaaaaattagctgggcatggtggtgcacacctgtagtcccagctacttgggaggctgaggcagaagaattgcttgaacctgcaaggtggaggttgcagtaagccgagattgtgcctgggtgacagagcaagactgcatctcaaaaaaaaaaaaaattctgtgaataaacttccttcatgtatacatatatcctattagttctgttcctttagagaaccctgatgaatacaataactactgcaaataatgggagtcaactatctcttgtcatattgatggacatatgaggttattacaagtaacgttacaatcaaaatccttgtctatgtcacctgatgcacaggtataaatttcttaaggttatatattaacacttagaagtacaattgttgggtcttgggcatattcaacttaagtgattagtgttgaagtgctttctaaagtggctatatttccttgatgaagttggtgttagagaaattcatccccacagtgtacacagattgtacctacatattatgaaattagcaaaaaatttttagtacctacatggcactagatgtgagtactaacagtgagctgccatctaggagcttacagtgtatttccagtgataagttttacaaacataaataaaattattaatagttgccatccattttaaactttacctttgagatgaatatagattcggattgtttgtggaaagcttaatataatagcagctaatatttatagagtctttttttgtgcttttaatgtatttaatcttaacaacaacccaaggagataactgtaattaattccatgtaacctaagaggaaatttaggtgcagagtttgagcaacttgcctaaagtcacacaataaatgacagagtcaggatttgaatttgagtcccctggctcctaagtgcccaatcttaattgttgtgctatatattcatcatttaatttcacagttgtagccgttatctaagaggtagcctttttttttttttcacataacaggtaaaaacaactaaaggaactagggagagtcaggcattaggaagttaagtgtggagttgatttttttaagctggggcagtggtgagacagaacatacagaggatcatcttggcttctatactgattattcaatctgtctttgatcttttggtgggagagattcttagtatccctgtgtttttcaccaccctttacaaagccattgagcaattttggaagaaggggaaaatttgtgtattctgtttgtcctggtttatttgctcaaatgggggtttctctacttctacaagagttgttttaatcttcactactttttgagggcttttactgtgcgatgtttcatgtgtatttctcagaacaatcctacggtatttagtatttacttagcaagtagttgagggattttggctggccactctgacgtcatttgaactaggcacacattcaactactctgtcctcttttgtcgaagatagtgagagtggagggcctggagtagatacaagttgggaaagtgacatccttcaataacaagcttgtaggctgtaaaccacaaaggatggcttattgaaatggaatatcactattagtttctcattatcctgtcagaaaagagaaattgcaactaaagcataataaagggggttttcgaagccacaaaccgcatctttgctcttcagatgtatcttacttgttgaatagtaagtgaatgagatttatgaaatgttcatagtaagatgactgagaacaattgtttctccattttttagaatcagttgcttctttttcttttttcctctctttttctttcttcttttcctcttctcttctcttctttttcttttttgacagagtctcactctgttgcccaggctggagtgcagtggtggaattatagctcactgcagcctctacctcctggcttatgtggtcttcccacctccgcctcctgagtagctgggactacaggtacccaccaccatgaccagctacgcttttttttgtttgtttgtttccctattaacagatggtctgtatgctgtcttctgaaagtaaatactcatggcctactctgaaggaattaagattattctttgaataattgacagcgactggtgctaaaatatattttacatttatggcccagtatatataagttctgtatattcaaaggaaatcaaaacaagcttcataaaacaattcttatctttatatgtgaatggtattgcattttctataccattctattcttttaaaacatgttggtctgacttattttaggtggaaaagatgtactacatgataattaaattccagaatttatttgtaatacaatattgaagcaacctggtcagatataatttaaactctttgctcataaagctcacactgaagaaagggtttactctttggatttgtttataagacttcttaagtcttgctgagttgccaatatctattccttgtagtaattgctaagattggaaacatttgctttttcaaatttttgactgcataataaacagtggggaataattaagactcaagaagatactgagaaaagggctaaattttagcaggcatactaatatatttgggtctatagtctcattttttttccaggtaaaagcatttatatggaaagtactacatttgtaaaaggcttttttttattctttgataacttctaatgtgtatctcttgagttttgcatatgttgtgagaacttggataatgataataatcaatttttacaaacttctgtttgaaatttagtttgatatggtcaacttaatttttactcacttgaaaacttccagtaaaatatacatgaaaaccaaaaacacagggcagccttttggggtgtgtgttctaaattgtggcttatttctggggctttttatattgtttcaatatactctttcaccttgctaataactttatagataattatccttgtttattgtctgtttctacctacatctgcgcctcttgacttcagtggcaaaataatatcacaacagaaggtggtttgatattttgtttctaggtgtctacattttacatggtaggccacacaagatagcatcattctcataaaatcatccattttcttggttttagctttctgattaacagtttaactatgaaagctggaatgacttaaactcaggggttttaatccagctttgccagccatgtccttaagatcccctgcattttaaccccaccatccgcaaactagattaactatcactgttaccgtcttagagcattgatatgggataaatcctccaaagggcttttgagggaaatgttttatatgtaataatgtgggatgaggaatatgaggaattacactcattttagtcttgttactataaagttatcaaacagaatatgacaagttacactcaatgccaaccatacctataaatactttttttcccattagtacacataatatattctcattgtagaatattagaaaacaattaggaatggaagacaagaacatttctaattacaatgcccagctataagcactgttaatattttggtatgtattcttccagtatggttttgtttagctacatgcatccacatcatgaacatactttcatatctttaattagaacttttgagtgtttgcaaagtgttacactaatgagcatttcagtttaactagttccttattgtttgactctcgggatggttgcacacttgtgttctgaacatacttgtaactgagtcttgacatacattctaaatcatttcttaggatgatatcaagtacagtgtaaagagtggtgaaaaataacaaaatgggcactaggagaattagatgtaagttttaactttgcctttaattgttgctgaaacttttaaatcactttcttcgctgggcttcatttcccttcctagtaacagaggtaaaatggagtaacccctgtagaggatttaattctgactgcaaaccatttgagatattttatggataaggaaactaggactgaaaaggactctagtgtctctttctctatgtttgaaggttttatcgccccagtcccccaccccttgcttgcttttttttttgtgatagtgcagaaggtcctgagtgccttgtggttctttagagtcatggtcataatcatccataatcattgattattgattaatggtgtctgaagctgattctattttgacttaaggagacccttttatggacaaaatatcacttaataccttattaactttaactgtttccttcaaaatcaggagtcccagcaactgatgactagataaaccaaatgtagtatatattcatacaatgggatattatttggccacagaaaggaatgaagtgctgatgcatgctacaacacggtgaatctagcaaactacgctatgtcaaagaagccagtcacaaaagattacatattacatgattccatttatgtgaaatgtccataacaggcaaaactatatagagggaaagtagattagtggttgcctagggctagagaccctgtgaggattggagtggttgatagctgaagggttcaaggtttctcactgaagcgatgaaaatgttctaaaattggtggtgatggttgcataactctgtgaatatactaaaaactgtcgaattgtgtgcattacatgggtgaatcatatgctatagggataactcaataaagctgttgtccccccaaaacaaaaaataatccccaaataatcacactgcaaatgattctgaaaaccttttgtttcaagtttctagatgtttggattataactaaatggaaactggtcatattaaactccttatgtgttgttagtttgtttcctgaaaatcttagtttaaatcccaatgtatgaggatgactgaattctattttcgtttggagtttcctttggggacttttactaagatacttgctaattgcaacaatttatgatctctctttctcgtttctcagtgtttctgaagtgctttgtagaataatcggattttggtatcttcagtggcaggctcagtgagtttttttcttttcttttttttttcccccccaagacagagtctcgctctgtcgcccaggctggggtgcagtggtgtgatcttggctcactgcaacttccgcttcctgggttcaagtgattctcctgccccagcctcccaggtagctgggattacaggcgcctgccaacatgcctggctaatttttgtgtttttagtagagatggagtttcaccatgttggccagcctggtctcgaactcctgacctcaggtgatctgcccaccttggcctcccaaagttgctgggattacagatgtgagccactgtgcccgactgcagtaggctgagttttctacttggtgtctggcacctgctagacaatactctacatgaatattttttgctatagcagaccccaaataacttagagttaatttgatttttttgttgttggtggtggtgtttatattggaattcatggcactgagttttgttttatttgcctgagtgtattcttgagttgctcatgaggtagttgcctgagagcctcagatactcctctattgggacacttcttctcttagatatattaattacagacaagtgagttgagccagagaaagcagaagtagggttaagaattgagtgtcttggaaatccagactacatttggtcattttcaatgaaattttcacatcctttaggagtttcacatccgttaggaggtttgtgtgtttttttttttttttttttttttttttttttaccagatccttagatattaaggttaaaatttaatcaacaaattttgttttttatttacagagacctataggatacacatggagttattaaacctaaggggtgaatgaaaagaaaaatgttggcagttctatcttaagtctttattgcctgcctttgcatgttgtcatgatattagccagagaaccaggcttttaaacccaaacattagtaaaccgtaaaacatatcttgagacaatctagtgcaacaagagcaaatttggcagaatttctgaagcgattccatgaccagtatttccaatacattaatctatttagatatgctttgggtacttttcctggcaaaatggtaaattgtgcaactggcgattaactcagatcttggaattagcctgtgactttgatcttacataaataagtttcctcagtaaagtttttgtttagtatctgaaatccagcttttttcaagagagcttttagctggactatcttctgtattgatactgagaattcagaattctctctcatgagtgaaatttgttaataagttcttgagagattgagaggtcctgtccttctgtctagaacacccctcctgcaaaccctaaataatgccttagttaagctgaagattcggaaaattgagatataacatgaagtaaaagtatttttgaagtcttttcaatccacctatgtattgcacacctgtgtgcccagcacataatatatgattatccatttagtgacaatgtattgggtgaccatggtgtgctgggtactgtattagagtataaagagatgaaaagacaatgtctttatgtagttaatgctataataggaatatgtattaaatgggagcctagaggtgatacatgctctttggaggcagagattgacgaggaattagaaaaggaacttaaggagagttgacttgaattggagagtggaagatgaatgtaatggcttggaattgaggagaggtggggagcagttttgggaggaagtcattctagggaaaggcacggtggtatggtgtgttttgaaagactgcatatagttgctatggctagaagaacatagtctctgtggatatggcaagagaagttgtggtcaaacttatgttttagaaatgttatttaggagtaatgctgggatggcttagagtggacaaagacagcccaatcaaaagtctcctgccatgaccgggcgtggtggctcatgtctgtaatcctagcacttttggaggctgaggtgggaggatcacctgaggtcaggagttcgacaccagcttggccaacatggtgaaaccccatctctacaacaaatacaaaaaattagctgggtgtggtggtggacgcctataatcccagctattagggaggctgaggcaggagaatcgcttgaacccgggaggcggaggttgcagtgagccgagatcacgccactgcactccagcctgggcgacagagcaaaactctgtctcaaaacaacaacaaagtctcctgccataatcagacagtcagcagctatgagaatagataagataggtgtctggaagaatgaagaaagggagaccgagaattggtgcctcaaaagaaaggacaggacttggattcaaattgatccttgtttgcatcagggactcctgagattcttatgaaaaccatagccaagtgcatatacgtatacccatgtaaaaattaacatgtagtagcagaaacccattcacaggctttcagaagtcatggatcccaggtttagagcccttgatctgtagaatgatggagagaaaagagtcagtaacctccatgtttactagagcccagaaatttggaagattactggtgcagccgacagattgggccagttgggtcatagcaggcaagatgaatacaattttggatgtattgagatttccccataagaatgagaacagtgaattgaacaatgagaacacgtggacacaggaaggggaacatcacacaccggggactgttgtggggtggggggaggggggagggatagcatcaggagatatacctaatgctaaatgacgagttaatgggtgcagcacagcaacatggcacatgtatacatatgtaacaaacctgcacgttgtgcacatgaaccctaaaacttaaagtataataataataaaaaaataaataaaatttaaaatgtttgccaacaacaacaacaaaaagaatgagaacagtgcatttgcctctgctgaagtgcttattgaacacctgtgctaaagagctcctgatgctggattaattataataacatacacttgaccagatgcagggtctagataagcaaaaataaatattaatcctactagagctgtagcttgaaatgtagtgtaccctggtttaaaatgctgtaaatggccaggcacagtggctcacgtctgaaatccccgtactttgggaggccgaggtgggtggatggcttgagcccaggagtacaagaccagcctgggcaacacggtgaaaccccatctctagaacaaatacaaaaattagccaggcttggtggtgtgtacctgtagtctcagctactcagggtagggggctgaagtggaggattgcttgagcctcggaggttgaggccttcatctgaaggatggaggtgagccttgattgcaccactgtattccagccagggcagcagagtgagaccctgtctcaataaataaattaaattaaatgctctgagcaatggttttattttgcttctttagtttaggaggctaccctgttattgtgtgtgtgtgtgtttgttttttttttttttcccagatggggtcttgctctgtctcacaggctggaatgcagtagtgtgatcccggctcactgcaacctccgcctcctgggttcaagcaattctcctaccttagcctctcgagtagctgggattacaggtgcctgctgccactcccagctaatttttgtatttgtggtaaagatggggtttcaccatgttgaccaggctggtcttgaactcctgacctcaagtgatccgcccaccttagccttccaaagtgcacatttagtaggcattgacagtgttaatctttgagtggaaatagctggagaatactccgaataaggctgaaaaaatgtgggattatcacatttaagagggccctgtttctatatacttaatgcttttgcactgaaatgtttgatattttagttgacagcgttcttaagcaataattttggcatcagagaagtcacttagataatttcttggatccccatgagcactggtaatttgtagaacaggttgaaaggggattgtgaaaatagtcagtcttaggtgtgtgaggtcatcttgtctcgcttcctctccaccaggttaaaaccacacctcagggctccaggaagctgactgagcacgtagtccaaagaaattttgcattctggtatttttcagtgttttcttgtgattttcatctttaagctaatttgttgagaagggcttataggatttgctctctttgggcaagcttcctcatcagtatcaatggctgtagtcatgcagtcctgttgtgaccatgttcaactgaattgacaactaatatgtatcacgccacaccactctgcggttttgccctttgtaaatgttggcttcatctgggaaattgttagaaatgaagattcttggttcgtgttcttgacctactgagccagtctacgtattaacaagatctcacacgtgactcacgtgtgcattaaaatctgagacttactggactagctcaggaacatggcctctcagagcccttttgctgaagttcaaggctttttctgtttattttctcctcagaagtgatgagaaacatctggtcaccatctttcatgcagtatacattttcatggaattaaagataatgatttaggtgcctctaagctgtctcttcttcaagcttaataactgaagtttgtgtgatctctttcttcatagagaagatgatcttttagcctttcatcctttattgcctttggtctctgtttcctagataagtttttaaaaaacgtcatttctgaaatgggcagaatactcttatcagagtgtggttgctactaaataagcaaaataacttaacccatgtattttttaagatctaggggcatttggctaaattttttgttttattttaaaagtttttttttttaagcagtaaaaatagcaactaattcttccttgagggaacttcaaacccaaaaagtacctcctctcttttctgaaggatggaataagttgaccaatggtctttggcattcttttgggttggtacttcaggctaattttacaatagaggaaggaatgatggaaagagggaaagaagtaaagagagaaaggaaagaaggagggagagaaagggggagcgaagggaaccagattaataattcaaagcagaagagactattaaaagtcactcaggtgggaaatgagaggtttatttttggtgactgctttacaaatgttttggttttgggatgtgaaggagaattctttgaactattaacatttttttcctcctgacttttgaaggtcagacttttatccaccttttgcttataggaatagttcaattttgcatggaattacatttgtggttttttgtgtgtgtgttttttaaggcatcagggttatatctgaatcatcatcttttgcatgtttttagtctggacatcttttaattcagtgcaagttgtagctctgaatgagatgctccttagttttctgcaataaagcatccacctgagaaagggagagtagtctgagtgtaggatcttctaaagtgattcttaaaatcatacttcccactttgttttaaaggaagaatgtttgtgcagtgtcaaaacattaaaagaactggagaaaccttggcatattcagcattcgctgtatcatcttgtcacagcaggaggagacaatagtggctaattcactaattgcttcctatcacatttacacaaggttgtagggtcagcattaccttgctgggttgtaatttaatgagcccaaaaggtttctttatcttaaatccagattagtcacatggctgattggcaaataaaacttgggcaagtgcttgctacgcagttaaattacagtctattgaccttaagtatggctttcattaaacagtaatgtacttgcttgatgccctgcctttggtatttcattttattgagtttgcctgaatccctgctaatcctcaaaatttgtgggtctggtaaggctgttggctgaatgaagagggtagaggtttattggtgcacttactgcgtgccgattgtctaggccactgacacatgcaacttagcctctgtggctggacatgtacatagttaacagtaaagcatttctctctttccctagacaggaccatggggtctgagttagtgtgaaagaatgcaaggatgtggaaatttgaacctcagggttgttcttactgctgctgtgtttcccggaaaacagccattgacttttcttctttctttttaacatggggaaggcatttatagcataatggagtattgtttgattatttatatgcatttccttgggtctttttgcttttagagttttgttgatttgttctttgctgtgtattgtggggaatagggtatgtgtatttgctgtgtattgtgtggggaatagggtatgaagcctatagggaagaagggtggatggagaggcactaaaagtacagggatttgacttattttaacaagaaaaaattctgatgactaaagataatttgtgaacatgtagttatggcttcataccttttgtcttagttcaggctggtataacaaattagtgtagatgaagtggcttgaacaacaaactttgatttctcacggttctggaggttgtaagttcaagatcagggtgccacccagtatggttgggctctggtgagtggcttattctgggttgtgtgctgctgatttcttgtatcctcacatggcagaaagagaactaggaagctccccggggtctctttttataagggcactaatcccattcatgaagactctgctgtcatgacctgtttcctcccaaaggccccaccttttaataccatcaagttgggggctaggatttcaacacatgaatttgacagtgggacacaaaaattcagtccatgcatcccttcaaataatatgagcttttattaccattaggaggactacattgattgagttgattggaagtagattttcagaaatgacttccagttatctattgatactataaacaaggtggtatttcattaatgataggacctgtgttggtcccttaggaatgatgcattctttgcagagaagagttgatcaaggtgagtcctgttacttgaacctttgtgaaggacaaagtaaagaatcatcccaaaacaggaaatgccacacttttatttcctgaggattgagttcatcaggaaagatataatagttatctcttgttgtgtaaacaataacaaactactgcaaagctagaggcttaaaactatggtaaatatttattatctcccagtgtctatgggtcaggaatttgggtggttctgccttagggcctctcacgaggtcgcaatcatatgatggcttgaccgggccacggggatttacttcagaggtgtctcgctgatgtagttggtaagttgctgttgcctaatgatgtgaagcctaagttggtaagttgctgttgcctaatgatataaagcctaagtgccactccataaaggagtttctacagactgcatgttaacacagcatggcatctgggagcaatctgagagacagcaagatggaaactgcagtggattttattccctagcttaggaagttctttaccatcactttccaatattctgctgataacacaagtcagccctatttatcatggggggactggacaagggcattaatatcaattggctaggatcattggaggctggttgtaccacaaaggacacttgattggctttttatctcagttgctttctctaatgttgtcagtgctatggtttgaatatttgttccttccaaaactcatgtcgaaatgtaatccctgctgggcgcggtggctcatgcctgtaatcccagtactttgggaggctgaggcgggcggatcatgagttcaggagattgaaaccatcctggccaacatggtgaatccctatctctactaaaagtacaaaaattagctgggcgtggtgccatgtgcctgtagtcccagctacttgggaagctgaggcaggagaatcgcttgaacctgggaggcagaggttgcagtgagcagagattgcgccactgcactccagcctgggtgacagagtgagactctgtctcaaaaaaaaaaaaaaaaaaaaagaaagaaatgtaatccctaatgtggtggtattgataagtggggtcctgagggttttgccttcatgcatgaattgatccattcatgaattaatgggttatcatgggagtgagactggtggttttctaggaagaggaagagagacatgagctagcagacttagccccctcaccttgcgatggcctgtaccacctcaggactctgtagaaagtccccaccagcaagaaagccctcaccagatgtgggccctccaccttgaacttcccagcctccataactacaagaaataaattccctttctttataaattacccagtttcagatatcttattatgagcaacagaaaataaatggagccaggtgacactacagcttctttaagctcacatgtcgggtgtagtatatggaagataagagtcctcaatttggtggggagaaatcatacatctcagggtaaggatttttccgttgctaataaaggtattttagtcgatataaatacaagtactatttggcatgcattattagcctgttacctttgttgagcactaagagtactctgtaggtaggtaaattatagttagaggtccatctaaggagagtctaatttagcatttgtgtcagatttatgtttcctaatgtgttgattatatggaaggttcttttggaaatttggttagttgcctgccttcagatagctacataaattgcacagcatgcaccataggtgcattctttatatggttcatgggaggatttggtttatttttagagtttgacatagggttctttgggagaaagtttgttactgcatctgggaaaagatcctcttggtgatgcatcttcatctcacccatttattcttgggatgctttctgtgtgttaatggagggttttcactgcattgtgctcatgaagggccttgaactccccctttgtgctttaaccttggcagggtctgtatggctgaccttgcacttctgagaacttctctgcagttccctttgggcggcctgaacattggctgtttaataccaattaaaagcaagggctgttcctctcagtggattgctattaattacagcccgtgttccagtaatctgagacagagcagcttcctctggtttcattgaaggctactttagctctctgttttggttggctgataaaaatctgagaggcacatactgatttggaataggaagagtattctgaccccaagaagaggtatctgggagttggaagatgagtgctctgttcttatcgtgtctttgggttaggtggggcatataagggaacatggtgaaatcaaacagtcctggacccatgtcagagatcagggttctagttccagccttaacactaacaggttgtgtaacttggaactaatcatttcatctcttcctataccagtttactgggtttaaacaaagttatcttgattgtcccttctgtgtctaaaattttgctaaaaattggttactgttcttataaatgatatgaaatattatgagactattcaaggttaattctttaacttgagattttaagaatcagttttttaaaataagtttttttgggcatttaatggtatgggtgaagtctggtggtccctgatgattggtttagttactgggatattttctccatgaacagttggggggagttttagtttgtgccagaatgtagatagaagggtatatttgggtttggtgtttctgaagcactttagttcaatgagattttgaaggaaatccctggatagagattatagtcatcccttgggttctgggggattggtctcaggacctcctgtggataccaaaatccatgggtgttcaagtctctgatataaagtggcatattgtttgcatctgacccatgcacatccgcccttatactttaaatcacctatagattatctataattcctaacgcaatgtctacacatcacttcattcttgtggattcaacgtagtacttggcatgtggcaaattcaagttttggtttctggaaccttgtggaaattttttttttttcctgaatattttgtatccctgctttgttgaatccgcagatgtggaacccatggatacagaaggctgactgtatttttttttttaaactctcagaaatctgggatgtaagagttcaactcgattcatgaagcataatttattactattttttttttgcactagaaatcagaacacattaatggttgaaggttttttggctttgagaagaggctaggaggtgttctttgcatacaaaacagtagattttcctgtatgttgtgattggttatatgggcagaggaaaagaatatttgaaactatggttgatctgtgtaattctaggcatatggaggctttgcctttaggtacttttcgccttcagactgctcttaagggtaggaaacatctcagttatgtatgtaataatcattaaatgaatgttcccaaatgaataaagagacttaataacaggtgtagcgttaaaagagaggctgcaaaggggaatccttcaccctaaattccaaattccaaagtggaagaataaccactctggggtgggagtgttattttctcaagtgctaaaagggagatatgaactatcctgcttggcctgtgggagagggtcatggttattagggttgggtaatatttttgttacaaatgtgtagaagaatgtcattaattgtggcctttagcacgcagattttcttgatcagataataccttgacaactccagacaagtgactgctaatcttgtgtcagttgtaaatatgtgtttggaaggtgatattgaaccagtgggttatttcagtcaagatgtttgaaaaagaggtatacatcaaatgaaaatgacgcggattatggaaaagtcttaattttaatggcttaaaaaaattctgcattaaacccgaaaaactagagacatagaccagctgggaggtactatgagaaactgctttacaaatgattttctgtggaaccctgtcaccagcatttagtgaaacatgctttccatttgaatatgcatttagatgaggccaactggctgctagatcatcgtctaatgggcctgtgatcccacatgaagattattttccctttggtcctagaaccactctccatcctgctcacccttatagactatatgagagggtccctaggtctcactttcaggtgggctcagccagtggaaatcagagaggtgtgagttcgtggtatgtattttgtccctgctccctgctaggctgtcctgatgcatttagactgaggtggtcactgcttttcactggtgctattgaactggaactatagtttcccattggtgagatgttgttactacagtttttcacatacatgtatatttcacatacatatattttaattttttacatttattgtttctccagtgagttaaagccttagaggattgagtttacttttagcacctaagaatactactaccttttcatggaggaagatcattgaaactgtaagagtttgcagttacagaagcagtatcctctctggagcactgaacaggtgttgggggccagaggattcaagccctgtccaccattccctgctgagcaccttctctaccagcagtagctcttcagcctctgaaggcatggcggaggcctggagtagggccctgccaaccttgaatgctcatgcctggtaggttatgaggattaagttacataagattgtatgtgcttaaaataggagttggcatagaacaagtactccttgattttgatctggtctaattcattcatatttaggatgaaaaaatggtagcaatgttaagtttaattcagatgacaagacttactaaaaggtctttctgatacctcatctatacatatagtattctactctgtgtagatcatctaaaatttctataagttggagatgatcttggcttttctgttttaagattacaatgaaagacagtgaaatctgcagctgaatttagggaagactccttgaaaacatcatcagttggctttctcatttggaatacaaatggacagttgtatcctcctgccattgctttgttatgattatctaggagttttcttatttttttaaaatgtgactttatagacatttcaagtactataacatttagccattgaagctctctctctctctctctctctctctctatatatatatatatatataattattattattttttgagacagtcttgcttagtcctccaggctgtagtgcagtgatgtgatctctgctcaccccaacctctgcttcccaggttcaagcgattctcgtgcctcagcctcccaagtagctgggattacaggcatgtaccaccacgcccagctaagttttgtatttttagtagagacggggtttcaccatgttggccaggctggccttgaactcctggcctcaagtgatccaaccccccttgacctcccaaagtgctgggattacaggcatgagccactgtgtccagccactataattgatttttagtaaattctgtggaatatacagcattttatttttcgattcatcagttggtggacgtttaaattgcttctactttctggctattatgaataatgctgctgtgagcattcttatacacgtttttgtgtggacatatgttttcttaggagctactcttactttgttgctagctgaggcttctaggactgggatccttcgaacactgcatgtacctataatactcttggaggagaggaggattcctctgaagtcagaaatatcctccctggagaattctgcaaggagttggatggactcattggggccgaggaaggagctttgagccagggatgtctcaggaatgtgagagttgaagcacagctgtgcagtgtggccttgggcaacttgccagctgccttacctgtagggaaagggtgatgttactactgaaaattgtgacctcctccagacaccagtggtgaggattaattagtaaatgttggctgtgctaagcttttcctttggctcttctttattctcagaggcagccctgctttttagggctgaaggtagtaagatctgtaagaaaaagccagagaaacccaccttgtcattgctttcttgggaattaagggttatcttgtgtttggttaggacaccagttagtttccagcattctcagtggaggtaatcagatcttggaaactttgagggcatgtgatcaagcaaacaacaaaactctgaggattagaggactgatagagaccctgtgaagggttcacctggaaggaggcagtatggtggtgtggaaacaacctgctttgtggagtcacatagatctgggatggaagcctggttttaccaatctctctcgagttactgaataggaatagtgatgaccacttgtcagaattgtggcagggatgaaatatgacagcaattgtaaagaacctgtcacagtggctgacatactgtagattatttgtgattattcatttcctttttcatctggttcattgctgaacttctaggcaaactgccatcttacagagagactgggatggagggcaagcctcccttgtaactgttggtatctatttgattttggacaagacttccctttccttcactagatcttgaaagttttttagtgtcaaaattctcagataagcatctcatcttatttttagacatgtaggagttagtctatcctcttttaaagagttcttgttgaaagttaatgcatttattttttatcttctatagtttcctgttcaatatggtagcaaccagtcatatgtagctattgaaacgtaaattaaatgtaaataaaaaattcagtttctcagttgctctagctacattacaggtacacaagagctacatgtggctagtagctactccattggacagtatataggatagaacatgtatgtcatcacagaaagttccattgtacagtactgctctatggaataagactctaaaaagtgggagtttcagtagaagcttattcttgcatttgtatgaatctgtctgtggctagaactctggcatcccattacttgggattgctaaaataatcatacttgcagtaatgacccactgaggcccttgtttctcaagtagtcttaaagttttgaacttaaagataaaagatgggctgggtgtggtggcttacgcctgtaatcccagcactttgggaggctgaggtaggcaaatcgcttgaacccggaagttcaagaccaccctgcctctactaagaacacaaaaattagccaggcatggtggcacatgcctgtagtcccagctactagggaggctgaggtggtaggattgcttgaacccgggaggtggaggttgcagtgagccaagattgcaccactgcactccagcctaggtgacagagtgagaccctgtcttgaaaaaaaaaaaaaaaaaaagttaaaatataaattcagcctgtgtttactctgcaaacaatctcaccagctctccagacctctaccaagtcatagggactgccttgctttgaggtgaaagtttatatgcaagtatctttttaagtaggaccatttagaaagaatatgtttgaattgagtttgctctaagtaatgtttaacactttaatatccttttctatttatgggaatataagctaacagcatttatactttattttcagaataccagtggttttcttagctctggaagaactatatctttagatcccaatgtagacttaaattaaataaatccgtttggctggcttcatctggatacaaatgactacatatttgtaataggtacttgatttcatgtttaacttacttttctgtttttcctctgtattttgttttcagagcattgagttagcaatcagaagaactaatgtttattctcttccaaatccccttcttgctttcttacttattaagcattgtctgtgtgatttgcttaggatacaaaaaatgatcacaatgtggttttggcttaggaggggctcatgtgaagtggtccatgacctgtctgccttattgctttgttgatgggtttgatagaaggttaagtgtgaaatgctgtgtagacagctcattgttacacaacatctgtattattagcatcctttttaatgagatagatggaggtgtgggctatgaatgagattcttcatggcgtgagttttctggcgggattttttaagagtgagaagaggtgtgccttgaagcaggtaagtaggagaacctactccagatattgagagggatggctagagaaggactgaatagaccagctgcaaaaaaaaaaaaaaaaaaaaaaaaaagccagggcagaggaaggaggtgaatgccaggtatctttctgatgactgtactgtgtattttctaatattctttgaaaactttgagatcagcagagatgctgagccctgctgatgaggaagggagatttgtttagagaccgctaatgatactttaaaggtgcgtgcagtgtgtctgtgtactaggcaggtgccatttaagtcagaagccactttcctgctttaggacaggtgctgggatgtggaagctagggatgcaaagttacagctctgtgttggtttattggccacctcatcatgagtgcttctacttcgttagtgacctctgatatgactgctggatagtcttcttgcagtaacttcctttaaaactacggtggtttgtggtgaataaaatttattttcaaattgtattattgcttttaactggtctcagagatctgggctgccttgatataggccagtgtttaactaagcaaagtgttatgtcagaatgtggttactattccattatttcttcatccttcaattttgctttaatttgatcttaaatttgcaagtacctaatgtttttaagagtgttatatatatcatttttccctaattttaaaacctaaatactttaacaagctgctcaacatgaagaagggaatggtttgaatcagtttatgaaagaatactctgttcccaggttgggtgggtgccctgtcaatagctttattatgtatggcaaacacaatgctaagaaaacttattagaaactgaagtcttaaatgcttgggagattataatgtgttccgacttcaaaattttaagttaacttccgctaccagtttctatgagactgatttctgtagtctgctttctgtagtcatagaaaatagtagtgaaagctatagaaagctgtagaaatggagaggtgggtgagaatttattaaggtgccttcaaacatataaactagaaatagattcagttatatcaaagataggcctagatgtggacggaatagtgaatagtttctggggctactctttcaacatggatctatctggttaattgatactagtcattctctactgctatttttatagcattcatcacattttaatttttgtggccatctcatcctgggctttgagcagccaagaataaggttagttcatctttgtatctcttgcatctagcatggtacctggcacatagaaagcattcaataaatactgtactgattgaatgaaacattttttacaaatgtgtttgaaccaaaggcagcctattgttaaccttggtgagccttggaaagctttttgcttgtggtgacgtagcaactgaaatattttgtaaaaagtgaaaataccttcaaatgatttatctctttctgatctttattaagacagcagtgttgtatccacacattcctaactgtgtgtagtcagttcttacaagttcttgccatgcttgtgtccttaaaatgtttcacaattttggcactgagaagccagagcgaagtgaaggagttgctcattgttctccatacactctgggttctcccacctctgcaccttggctcaggttttcccctttagctagaatgccctttttccttggctttggctgtctcctaatggattactcgctgtacctacccttctaggctgagctcatagctagcatatgtaatctaacatttgaatcagttgagaaaactcttattttcctgctctatacacccagtatagttggtttgcaggtgtctgtggagtttgttttatacagtgcctgttgggctagagctgcattatagctagtgtctgtaagaccgttctagtttaagagcatgcagggtggcgacagtgagatgagactggctgtatcagtttatggctgttcagtttatggcaggtgacttaaactgagccttcattttctcataagcaaaatgggaacttagtataactaagtaggaaaatgtatataatgcctaggaatggcttttgctaggtgcctaataagtagagtttccttttcttctctttatttcaaatgatgtaaaagaagccttgttttgaaaccaagagttgttaatctgaccaaatttcatgaaaggatattgatcacaacatatttgttatcagagtttggtaacacctgactaattttttgtattgctttgggatttatttaagcatgtgagactggtattacctaaggttttagttgacagaagatggatagcctgagaggtcgaaattatgagagcaaaagacttttgaaaatttctgccatggcatatttcatacgtttcagcttggtgtccagggtttccctgaacagacgagtttgtgacatacgagctcataaatatacttgcctgtgccctcttccagaagggaaagccagatctccagggatgctaactgttggggagacaatgagaggagcttcttgtctgaatatctttgttcacagcagagatcatatttgaagttcttctcttcatcaaaaagagcagaatggaaaatggtttaatattcctgtcgttagggtttccgctctgtgtggggtcatgagagtcacagtctttattctgaattctgaaatgatggtttgttttacttttaaaaatgcatctcacagggaaatagagaattgttcctgtgaacttcctgcctgctgtactaaacgcagttgctgtggcagtttttaaaaagaaattaaaatgcagtaatgctttaaatgtactgctttaagaaactcgataactcttgattagttagcataacaaacagcaaagcagaacttttttttttttctttttgagataggatctcctccagcccaggctggagtacagtagcacaatcacggctcactgcagccaggctcaatagatctgcccacctcagcctcctgaggaggctggaactacaagcaggcatcatcacacccagctaatttttgtattttttgtagagatggggtttcaccatgttgcccaggcaggtcttgaacttctgggttcaagtgatttgcccgcctcagcctcccaaagtgctgggattacaggagtgagccaccatgcctggcctagaatctttacataccggttttaaccatgttgtttcactttttgaagcacttaataggaggtaaatatacttttgaaagttacatacttaatagaaacacacattaatggtacccaaagaaccaactcactcgtagattgtgctccatttttgtgcggaagtttttgtgccagccaattacatttgcttctgtggtagatttctcttcattgggtcaaaggagaggcgtcattaaggaaagcgcatgtgtctttgtttcctctgggtgttctgatgtgagagagcctggcttcttcagtagaagattctgggaggtttttgataatcaagtgtgggaggtcttttctaattttcagtgcttcctggtgagaaaagcagatctcaagaagggctgagagagggtccacttgcctccacaaagatcctgatgctaatagaggctaaagagtcacttttggcttcaacttttaactgcattcttagggctcttaatgtattatggacttgaaatttgcaatgagagtagatctcaagtggtctcaccatacacacccacaccaagaaaggaaacgatgtgaggtgatagataatgctaattagcttgattgtggtaatcatttcacaatataaacttatataaaaaaatcacatacacctttattatatatataattcttgtcagtcatacctcaataaagctggggaaaaaatagaagtgtgtccataatattcaataaataatacagtcatgagccacataacatttccatcaaaaacggacaacaaactggtctcacaagattataatagagctgagaattcctatcatccagtgacattgtagctgccttaacatagggcaatgcattacccacgtgtttgtagtgatgttggtgtaaacaaacctactgtgctgcaaatggagaacacatacaattatgttcagtatataatacttgataatgatcataaacgactaagttactggcttaaaaaaataggagtgtggtgagggagagaccaacaaatagggcagagagagaggtagttttaatttctgggagagatgcggatattaaatttacctcccttggaaacactggaaggaggataaagcaagagggctctgggaatctagtggaaactttttaggtgtggacacttccgttaatcctttttttttttttttttttttgtagtttagggggcaatagtgtattaggctctaactttgggttttgtgatttccttttataagataaatttagttttcttttttggagtttaattgtttattgtaatgctaattgtcttcatgtagcatgttgtaagcttaaaatgttccgtaagagtaacctggcgtggtggtgcatgtctgtagtcctagctactagggaggctgagatgggatgatagtttgaacacaggagttcgagaccagcctgggcaacataataagaccctgtttcaaatcaaaaaaccaaaaaatatttcataaaaggtagctgctattaataatggcataattataataatatcttactgttattatatatccagaatggttatagcaaacttggtgctctttgaaaattaccacagcagctaaccctggaaaccaaagaaagccattgaggaaaccctagccatccccaaacttagaggaaataagttaaggcatttatttagtcttcaagggttttatttatggcaaagaaatgaggagaagtcatcatcagtttgatgattagcatctgttttatttagagaattttgacatcataaactaggaatttgtaaaactgtatgtgcatatttttctacatctggggagctaccatatgttatacagatctcatcccttacatttctagagttgtactgtaggaactatgtctagtaaaaatctcactcttggcttatatgcatttggaattaccctttcatataataaagaaatagggtattgatttctatttttgtgaatgcttactttgtgtatatttatctttttaagttttcgtagcagctctgcaaagtaggcattttatctttattttccaggtgaggaaactgattctgaggagtaaaataatttgctcaaagttttgtgatagtggcagtactcaggttggaaacaaggattggctgactccaaagtccattttctgtttgttacttaagttgtacttacacattttcctaaatttatttttctcatgacttgtcctcactccagagtctggattaccagcccctgtggtctagcagaagtttgggatgttgaggtagggcctgggcattggggtgtagacatcgatattgctggccaggataggggctaggccatggaatgactgtgggtagaactcagctggtggggagatatggtccatttgatggctgacattagtgagagggcaggagagtactcttgatcagtgattggtttcccaggacagaagcaaagccttccctcaggcttcctgagtgaaagagcatccttcaaacatcgtgcttgaaaggtggactcttctcctcggttcagtggaggcagcctgcctgggtcccttgagtgcgccttcatcctggggcatcttgggatttaggaagcttgtatctgaattttggaatgcaagggcttctggtgggggccattatattttcagctaagattggccttccctggtccagagcctgcacacgtttctaaaatctttttcaaactctctgctgcttcattaaagtaagaaaaaatagctacactctagatttggtttcttgtttcttcaatgacactttgtctcctcatcctaacacagtaatcaactaacctagtaaactaacccatgttagtgtagctaatatccataaatgtattagaggaagaattcttttttagcaagaaactccgaggccatgctccctatctttgtctaactccttggtgactttagtaatgagaattttaatctagaggctccagggagacaccctccccacaaagtgtgggattgctcctgtattctgttaatgcctatttgttaaaagagttaacagtgacccttgaaccatgaagcaactctttttggtgctaaaagaacacaagtgcccaagaatgcagcagcatcgaaactggggatgaagtgatttgttcttgacatcagttggcaggtacattctcttgcagagagtaaagatgaaatagaatcccattcatagaaggcagtttgtagggagggaggctggggatgggaaaatgagctcaggctcagaggccttttacgtcttagtgttctcacaaatatgcttccaataaaaaccatttaaaaggcaaaatataaaattcttccatttaggaggaccttgctgagatctatggtggtggtttaaactgtgccgtgattagaaccatgccctatgaatgtgtaatatgttgtcgaccagatggtcatataatgctcactgtcctggtgagtttgaattagggagctggggaaatcttggctgagaaaaggtaagataaggcaaaagtatatctgcttgaggggcaaagttgcattcaactgatttggtctctgcagaagtttgccatagaaatctgtcagtgtgtactgctttctactattaattggggttttagtcacatgctttgtggtttgttcatgaagtttttatttaaatgacttatgagaactatcaaaatgtttgctctgaaggcttaaattgtgttcttatgccatggattttttttcagatgatcaacttacccatgtgaaaatgcttgagcaggttggctgccaaattgtaatgaaaggctgtcagcaatgccttgatttatctttctttcacctctcctggatatgctgtctgcttcctaagtctaagagggatatactcagtcctgcagacaacatctgtgcttctgcatcaggttccctgcctttcttgggagctttaaacataagagtatcaggaaaggttccatagttggtgacaatagaagataggttagttttgggcaaatgaggaaatgaaatgagcttctctttctcctagcataccctgctgagatttattcccagcaccttcaagggggctattgtagaatgcaatccccagtgctctcagtgaaagggagaattacaaagtacagagtcttatcctttcactgtaatcccgggtgcacacttggattcttgatctgtaagtgggagtgtggtccagacctcattcaatgtaaagctcttatagagaccctgattttttaaagggaatttctgctgttgccacttgtcttgtcatcttctccctgagaatgttttaccatagcagttaataagttatgtgattttaaatacctcttcacttggaggagtcagtgcctgtggtaagtcctttgaccattcattaactcattcaaactctaggctttagctgacaactttttcattagcagctttctttgcttgttattttactttgattttcatgcttttcaccttatatgtgtctatctgttttccctctaggactttcatgaccctacattttcagcaattcattgtctgtctgatttgatgttattaccttgaggcctggagatttcttacacagaggtgtttttcattgacctggataaactcagaaacaagtcatcactgtcttttggcatcccgcctccccatttatgtgttattcaccatagtctaattaaatatgttaagtagcaatgccggaagaagtagattctgctttcaaaatggttttaatttatctcaacaaaggtagagaaaacctttgttgctttaggagtctaggagactcccctgggcaaagtttgctgttttttcttcccagattccccttgcccttcaccattcctccaagacgcttgaggaatgatgatttaaaagaaaaaggtcatgagggaggactggttcatagatatttcatgaaaaagtgtggcctgtcttgggattaaaccattcctgggaagtagaaatgagctcttcattgctttgtaggcaaccacagtatataaatactgtagaagatctgggttaaaaaccaaagcccaactgttatctatagtgtgctgttgccaagctcccagtaaagttttagtttaacagaccacattgtggctgataatgataattttgtgttatccctattggatgagtggctagcctgtttccacagtagacagatgcttttcttaatggcagacaccagcccagggccttgctttgtagtaggcctttgataaatgtttgttagatttaattgcctgctgacttgttgagtacggagtgtgattagattaaaactaatatgttgtaattaagaactatcagtcacaaaacaaatttaatttttttctataaatgtatgaaatataaaagttataaaataattatgacttatcaaggggaaagttgtgacttatcaagccctgcttatactgcattcagtagctgaggttcagttcatttccacatttgagtttgaactccatgtctggttgttttttaaatgtgtgtgttttttctttttttttggtgggaattggagttggggtctctctgtcatacgggctagagtgcagtagtgcaatgatagctgactgcagcctcaaacttttggactcaagccatcctcctgcctcagcctcctgagtagctaggtgtcatcacacctggctaattaaaaaaaaaattttttttttttttgtagaggtggtgtctcactatgttgcccaggctggtcttgatctcctgggctcacacaatcctcttgactcaacctaccgaagcactgggattacaggtgtgggccactgcgcttggctgcacgttttctttccacagttttttctgtcctttgttgaaaggcttcattgtcctgctgataattaggctaatataataagaattaggaagattcttctttatcacctgttcttagatgacaaagattcttagaaattcttgctctgtttattttgtacttccgggtaatgtagtttagatctgaagagacataattgaggttagctctcacagaggaggaaaatacttgtgtactaaggatcagtttaaatgactcaagaaaagcaatcaaagaagtgttatctttaccattgtattggtctgttctcacattgctaataaagacatacgttagactgggtatttataaaggaagaggtttaattgactcacagttcagcatggctggggaggcctcaggaaatttacaatcatggtggaaggggaagcaaacgcgtccttcttcacgtgtcggcagcaaggagaagtatgaacggaatgggagaaaagcccttacgaaaccatcagatctcatgagaactcactatcttgagaacagcatgagcctaactacccccgtgattcaattaccttccaccgagtccctcccatgacatgtggggattatgggaactacaattcaagatgacatttgggtggggacacagccaaaccatatcaaccatattctgcctaaattagaagcctatctctaatcacagcttaattattcaagtgcctaatgtcaccacagattcttcttttaattggtgattttctaatactattgcaggaccttctgattgatagtttgtgcacaagttttcaaaaagaagttagtgtctctttttaagagaaattcatcaactaaagtgacattagaaccagtgattaaaaattactgaggtcacatctgtggatgtctatgactgtctactttttgtttatagaactcatgactgtttaaatgaaagcagtcacctcagtcctcactaaaaacaatgattgttaaaaatataaaatttaaggtggctagcaggatgaggcaataaataccagataaatggagtcatgagtaaaagtattaatgtcaaggcttctttttggttgaaatctaaatgctgtttttcaatttggacttaacagggagggtgctgcaaatgaaaggagcattttttttttctataaagcctaacacagtgttagggtgtcttagtccatttgggctgctgtacagtaacagagtactataaattaggtagcttctaaagaacagaaacttatttctcatggttctggagactgagaagtccaagatcaaggcatcagcaaatttgaggggaggacctgcctcctggtttggagacagccatccttctgctgtatcttcatatagcagaaaggataagtaagctctctgggacctcttttttaggggcactaatcgcatttacgaggactccgccttcatgatctaatcacctcccaagagccccatctcctaaaaccattacatttaggggttaggtttcaacctatgaattttgaggagacacattcagtttatggcagtgggagatactttgtcttcagataattagatctttaactccgaattcttatgtaccttttagaaataaggactgatttagactagagttgttgggcccggcgtgacccgaagtagtggagagagcacaggactagagcgcagacctcaggacgtggatccgagccggcgcgatgggcggagagcaggaggaggagcggttcgatggcatgttgctggccatggctcagcagcacgagggcggcgtgcaggagcttgtgaacactttcttcagcttccttcgacgcaaaacagactttttcactgcaggagaagaggggatggcaaagaagcttatcatacagactttcagccacgacaatcagctggcacagaaggcccggtgggagaagagaacccgggagaaggtggagcgggtggccgggctggccaaggaagccaagtcagagacctcggggccccagataaaggcagacaggcagagaggctgcagctagagattgaccagaaaaaggatgcagagaatcatgaggcccagctcaagaacggcagccttgactccccaggaaagcaggagaagaaggaggaagatgaggaggacaaaggaaaactgaagcccaacctaggcaacggggcagacctgcccaattactgctggacccagagcctgtcggagctggacctggtggtccctttccgtgtaaacttccggctgaaagggaaggacatggtggtggacatccaggggcagcacctccgggtggggctcaaggggcagccagcaatcatcgatggggagctctacaacgaagtgaaggtaggggagagctcgtggctcattgaggatggcaaggtggtgactgtgcatcttgagaagatcaataagatggagtggtggagctgcttggtgtccagtgaccctaagatcaataccaagatgattaaccctgagaattccaagctgtcagacctggacaatgagactcgcagcatggtggaaaagatgatgtatgaccagagacagaagtccatggggctgccaatctcagacgaacagaagaaacaggagattctgaagaagttcatggatcagcatctggagatggatttttccaaggccaaattcaactagcccgtgctttttcctccctgaactcttggggctgagctacaaccatccaaccttctttcccactcttctctggcccttgtgagcctcagggcttggggtaggcatgggactggcctagacacacggatcccagggcatcaggagaaaggctggggcttggggtcttgtcttccccagttggcctactgttaggcattaaagcaatttgcccagcaaaaacagaaataagtactgatttatttcctcatttgtgatgccaaattgtaaagattaaggtaattgttctgttaaggtatgaaaataaatgacttataagagacagaggcagataggatattggcaaccttcacaccctagtttgaaaggtactggcctttcttggctgtgctgaggcatgaataaatactatagcaatagtaaccacacctttgttgtattttatttcttcaattaccatctgttgttgcagcttttagctaaagcagagcttcccgaacttccaacttgaatcatagcactgcgtcttggtgaattgattctagaggtggaagttagtgccttaaatttgatgcagtcacatatgccttttgggtgacttcactttgaatcctcaaaggatgacttagagaatgccaaataaacaccctggcaactggtaatgaccttctgggagattctgacagattaaggtttcacaacaaacacagataaaagacaatttttcagaagacaatggtgaaggaactgagtaagtaaagcataactgaaggcagtagaggtagttgagtggaaatgcatagagagctgggaggagtggagttcaccagcaaatgtgtcttgtgtatctggctgggaggtgtaattgggatggagaaaggaagggcagcatgcaggaagtcatgtgataggaatagagctgtgtgccaggggtggcaagttgactctgttggttggtaccaagagtttgccttactgtagttagacagagttagtttttgttctgaatgagacaccgactttcccatatttcccgataggggttttgaatatagtgacttgaagcaagaacattattggaactatggtatcagatttcctgaaggtcacattattcattaataataatgttgctctttgagcccttaaaattggcctttttctagactcctaaactctatatgttcttaatgaaataacgctggctagagcccttaccaaaccctgaccagaaacagtgaattaaaagatacagaagactgggagctagaagttgttttttttttttttttttcaaacccatattgtctcgaaaacatctaccttaggatctattcacatccttattcacatgccaactccttgattcatttgcaagattgccaccctccttgctatttacaataattcattctttaatttcaaatttttatgctattttcatattgtttaaatgaggttctctacctacccaacatggtagctatttgcctaatatcttagttgtacctaaacattgtggaaggtagtttcttttataaatttaaaatgtttggcttttcaaacccctgttttctcatcttcctttgtcagagttctgtttgaggtgaccaaagccacttggatcctgatttagtggatgatttcagtgaaattaagactttgggattgacttttctctcccccccactcatcacagtgggaatgcatttttcatcttttctgtggggtgatttggagaatgactgagatggttattccttttttcctcctgtttcagtctgttctgtgctgtaatgacagaatacttgagactgggtaatttataaggaatagaattttatttctcaccgttctggaggtgactgggaagtccacgatcaaggtgccagcatttggtttagggagcatttggtgaggaccctcttgctgcatcctcatctggcagaaggcataagtgcaagtcatccaaatgcggagtgaagcctcttttataagagccttaatcccatcgagagggagaagccatcatggcttaatcacctttaaaggctccacttgtaaataccatcactttggcaacacctaaattttggaagggacacattcaaaccataacaccccctgtcacctattgtctgccctccttttgggagtgggcagtggtgctgactgacagatggatcctccaggcttccttgccctctggcttctaactggattggccaagggggaacttaaggagagctaagagtgggaggggagagagctgccagtcgccatatctcttctctctgcctgcttctctgctgcagttttgtcagtgactgtgtcccaccaagaaaccactcttgcctggtgggtcctctttcaggcctccagcaggttactttcctctccttgatgcttcgagtcactttctacctgaatgccccttgtggtacccttcacccttccctcatctttgtaaatagtccttcagtcagatgtcttcattgaaactatgtgagttgcctctatgtagtacatgtaagacactgttaattaaaagtacaggtaagacactgtggtatcaacactttaatatgaggaaacacatagcacattaaatgtacatgattataagatatgtcttaatttcagatacattaatacttagaaacaacacccatgactcttaaaacagagggaaacctatgaaattgctactggtttttcattgtgttaaagataccataataaatgtctttatttataaacttgcctatatttgagattatgtccataggatagatgagaagagagttatggacattttctaagacttgtttctttttgccgcattgcattctaaaagggtaaaacatatttagagtgccacctgcagcttcttagctcttgtttgactgtccccctgacagcaatgtgtgttgacttttccacaaatctttcctaatctgataggccaaagagagtctttccatttggaagtgaaagtgaacattttctattttattaacaggttgtatttttcttttactttaaaaaaatctcttttgcctatttatttattgggtcttactgtttttcatatgcatgagctctttgtgtagtaggtcagaggttagctaactttttctataaaggaccagataatagacacttcaggctttgtgggccatacagcttctgtagggtgaaagcagccttagacaataggcaactaatgaggatggctgtgctcccatatggacgctgagatgtgagtattatatagttttttatatgccctggagtatcattcctctttatttttttagccatttaaaaatgtaaaaaccattcttagctcacgggctgtagaagaacaggcggtgggctggatttgattagcgggccatagtttgctgacccttgtaatagatgataactcatttaatttattttgactattttcctcacttccttttttagataaattttttaggcctacagaagtttgaatttcttacaacatcaaattttaaatttctgaccatttttgtcatgattctgaaagttagaatgttcttactaacgatcatatccaaaaatacacgacttaattttagcttcggagacaatgttttttaaagaattcgcttttattcatgtggaatctagttgtgtatagtgtgatttggaggtctaaatttaatttttttgcaagcagcaaaccaattgtgggttgcttttgaatcctcctggttagtactgggttcactaactgtgctttgggtacctttgattctagatttacagcatgataattttcccacttttcatttatgttcaagaagtatggtaccaaactgtgacatgagttcctcttagttcttcttggctcatctgtttccatatgagctggcattcacaggaaattcagaactcttacaggcataatattaatagatacatgtggaaagagttgttctctgaaaaaaaaattttgactttttttttttttaatgaagaatgacaacttgatctcccacactaggaaagaaaagtgcaattaatagtttatattacataacattaactgttgggttttttttttttttggcctttggaagatacactcaaatttgtgataagtaaaatgacttatttatcacaggttaccatataagattggacaagaacgatcttttatttctagtcttttaggttgttggagtgacctaaaatgtaatttgaggataagcaaaaccctgatctgctgaaaattacaaaaccaaatttgcaggcatggctttcttgctcctgagactgaaaaatttgtctgcttccaattcagttgactataaagaatagatagcatgcttttattttctgacagcactaagagttattcctgctgaaccaggaatgctgttagagtgtcaaggatggatttgccttaacttatttttccacaaagctgtaatttaaaaaaaatctgttaacatttctttgtaattctttggttcacagtagacagtcccactgcagaagtcctgctccggtcagcccgtatttccagagtgttctttcagaactggaaatgtctgtatattcagctgggttgccatggtgctgtgggacatgaggtggcaaaccctacacaagagttaaagagatgagtagtgcttaggatacagattacagaaagtacagcttgccatcaagttctaggcaagagatagaactaaatgtcttaatcctaagaggaaaaacttcattccaagggacattgggtttagatgagattcattgttagattatgccccagatggcctgttagctttcttaggaaacttgttcccattttgtgtctccacaatggttctcagctactatctggaccagtcccttaaaattaaaagttaaattagatgtgatgtgatttgaaatttgaaacctatgtttttatttaactagactacaatggtacacttagaatttttgttcaacttccccacccaatatgaatttggagaaaaacaagaatgactaaaaaatcagcaggctcacatgaaattgagaggacggtttggaaatctccttgaatttctttttgtaagccaaatttatttttataagcctttaacggaagacagtttgttctttggataattggcccaggctttatcctcctctttcaaatatgcttcaaccaaatacccaactgtgagatgaataggataaatgaaggtgggagtcgtagagtggtgggggtgggtgggccagggggcggggcggcggcaggcaaaacagtcatgtggaatcttttgtttcatttttaaaataattcttaagagctgctgtctttcgacagagtcagaaagtccttgcttaagtgtatttgtcactatagagagtgaatgggattctgaagtctttaacgtggttctgtaaatgtaagtcttgttgtttaatcacggcatttctgcaaaaatgaactcctgtacccacatccctccccctctcctttattttagtgtcttagaactcagctaagcatttgaacagtcattgctaagtgtttccacactgggggagctagaagaacttggctggatagaattctgattttcatgggagggaattagttttccgttttctgccttagaagtcatatactatacttgctatttgggctgaactgacttgaaaagtcaaacaggaatgagtctagctactaaatttagagaactgattcgtaatttcttgatctaatacagtgggcagtcttgtcattgaccagttatttatttcagtgtttgccaaacctagaatgaaatccaaggctgctgcttaaccctctatagctctggtagttcatttctacttctcctgctcatttccgaagataacatgtatccagagagcctgtgaggtcctggcttagatgagtcctgcatatcagggcaaacttccatgcctctggacatctttcacatttcagacattgtcttatttctttttcttatccagttaacaagtatgtttttatttaagtcaggctttaactctcccctctctcccctctcccctcctcaagggaaatttaaattaagtgggaaattactttttgtatagatgttcttttgtcttaaattcatgctcatgtgactttccacttgccatttagagtaacagttattcaaagagcattacctaaattccatcattaagaaaaaaacttatgcccctgctctgctccttcacccctcatcattatttttaaagctctctaaatgcctgtcttgcttaaagaatcataagactatggaagtggaatgcacttggcatgttgttcactattccatgaatttgtagactaaatatgttatttctgtggctcatccagaagatgttgtcatcctttaaaattgcaattagcattattgtaaaattcgttgatggaaaaagatctattaaggttacgtgtattttggatttaatgttgctttacctaaggatgttagggttcaccaaatcctgctttgcttgggatatgcagggaggaaaattgagaagaaatctttttttttcccattaataaatgaaagaacttcaatgtgaagaatttaaaaaagtcccaagcacagatggttcacctgggtaatttgcaaggaaactggatgagcataatgtaggtggggaagacttagggaaattattcggatagttcagttcctttccttttatctgtctgagccagttagggggaaaaaaaaaaatgaggtttttggatgtcagaattacctgctggaatttttcatgcacttttcagaataaaaaacgtcaaaagagagaagttaaattttccagtatgttttaagaaaataaacaaaatgagacatgctggggaaagtgataggacactttcaggttgtgaacctcagggagtttcctggctaagacaggtggcttggagttttccctctttctccttctctcctcccttctactttacttttctccctctcttcctcctttttttttcttttatttgcacacccagaagcatggacctttccttcttttggtccttctatccatcagggtcaggtctttcaagataagtggacacaataccactgaatctgtaaacttctgatttgtatgtcattcttctctgtgagccagcgttgtcactggtttaaaaaaaataaaagctttggctgggtgcagtggctcacacctgtaatcccagcaccttgggagaccaaggcaggcggatcacctgaggtcaggagttcaagaccagcctggccaacatggcaaaacctcatctctactaaaaaatacaaaaactatctgggtgtggtggcaggtgcctgtaatcccagccttgggaggctgaggcgggagaattgcttgaacctgggaggtggaggttttgcagtgagccgagattgagccgctgcactccagcctgggcaacagagtgagactccatctcgaaaaaaaataaataaaataaaagcctcagcatgttgtcctctggcctgcgaacttgctgaagtattattccttgttgtatcccccaggctatgttgctgtctagcctgtgaataaggcaaattccatattatggaggtagtgggctgtgtgaaaagagcacagattttttatatgatgagttacacgacttaaggctaagtacctaatttgtaagtcctcatctgtaaaataagaataatatctagttcaaagagatgcgagaattataaattctcctatgtaagatgctttatatattgcttggtatacttggtaggtcctcaagaaatgtttgtttcttttctgctaggtctctagtaattggaattttggatgactgaacattcaaactgatgatttttggatgattaacattcaactgattttttgagcaattaatatgtaaggcttttctaagtcctgagggaggtaaaacatgaatgataggtagcatttgcatgcacaggcactgttttaagccatgtgtacattttatctggctttatcttctatacacagttatgagatatgcaccattatctccagtttattgataaagaaatagtatagaggattgatttatctgagaccacacagctagtaagtggtacagttcgctgaggcataaagagagaaactgatacatgtaatacaaggcataacatggtacttatttttaaaaagggtgaacatgaccagatgattgagaagagaaggcaattgtatttggtttgggtaggaaaattaggacaggcttcagggagaggatgtcatttgagctgggcatagaaggaattgagtgtgttgtggagagacaaacatgggagccaaagagagaagaatgtggtggccacggagacaggaacacttgggtgctgccccagagcagcagacagcttcactggctttctgaagaatactggatgtgtgataaacaatcccagaagctgcccctggaccctgagctggtgctgggatcccagacctgaggtcgggtttgagagtgaggcttcctctgcccagggttgccacgtggcagtggtggaggctgaacattgatagagaagtgaaatcagaaggtaggtgactaatccaaataaaagttgtggatctgagggtggaggagtagaaggtggcagcacaggatgagggaggatgtttgaaatgatggttgaaagggggaagcctagagaagtttgtgagccccggatggtctctgctgtgcctttttaatagatgctggtccctctggacgtgggtgaggagcagcttattaagtattttcttcatagtattgaaaggaagtaggagacaaaagcctgggtggggaacctgagatggggtgttggacccatggaacctacctgccagtgtcaaggtagaggtggaaggatttgataggctgttgaccagttttttttctggggttggcagtgaagtagtgacataatggggattatgcttgaggaagattgatctgccatttgtatggggatggattaggttatttagactttagggagggaacttgtattggtgcctttacaccttggggcagaatttgtaaggctttgcaatcgattcgattgagaggctgggaagtgaggaagcagttaaagatgaccttaatgtctttaatagtgtttctatatgtattagatatttgggtgagttctatgtggcaggtggagtgctagctactggatgaagagtgctgagcaaaactgtgtgagtagataggtggggaggaagtggaatgaaagtggctcttggggtttgaacctgggtcctggggaaagtggtgtgacatttactgaaacaggacaggcagcagaggagtcggcttagaagccctgatgatgcattttgttttgatgagttgagtttgaggttgatcacagcaagtgatcaatcataaaattagacatcttggatagagattggagatggcaacagatagaaagtgggttgaaaaacaaagaatgggccgggcgcagtggctcatgcctgtggtcccagcactttgggaagccgaggcgggcggatcacttgaggtcggggtttaagactagcctggccaacatggcgaaactccgtctctaataaaaaatacaaaaagcagctggatgtggtggcacatgcctgcagtcccagctactctgtgggctgaggcagaagaatcgcttgaatccaggaggtggaggaggttgcagtgagctgagatcgcgccactgcactccaggcctgggtgacagagccagactcggtctcaaaaaaacaaaaaaaataaaaaaaataaagaatgctcttttagagattcaagggaagcaggcagagggtatggccttatgagcaaaacttaaattttagggggcagaaggaagatgctgcaaagagtatggaggaggaatcagtataacttgtatatttctacctacctgttttcttgtgcagtttgtttcctttatggctttagaacaaggtttcttaaccttaacactatttatgcatttgggaccagataactgttatgtcataggtgtgtcctgtgctttgtaggatgctgagtggcacccctggtccctgcccactataggccactgagtagcactgcctcttcccaattatgtcaaccaaaaatgtctgtagactgctgaatatgccctggggggcagtcacccatagttgagccccactgctttaggggtaatgattttgtagttttctttcttttttcttcccacgtgtatcctgcccaaaccacagccagggaggaattggaggcaggcgatgccagcaaaagggttgaaccttcatttggctgcaaggagtatgtgactcagttctcaataaagttacatgtaggaagatgttgggaattatcctgtgaaacagtttcatgtactaggagaagtgtgaactgctaagactatttcattgtagctctcaacaggcctgggcctgtgatatgactgcatttatggacactggggtgggatggagtggagggaattttagctctgaaagtttggggaatttatcagtttcaaaaagtattattttacagaagtccctatgtagttcttcaatgcctttaggagaagctattaatttaaatgtgtcctgtcaaagaaaataaatgtgtgtcctaataaaggtccctaaaagttcacgttggacatctcacccctccaaatgaagtgacacaggaggcatacacagtcctagtggtttctgcatacctggcacactgccttttcacctggtagatgcccatgagttagttgagttgaattgaaatcccacctgtcatttatgcttgaagaattcttcctttttgatcttgaaaggggaaggagaagtgcttggaggcaaaaagctttaatctgtgcaaaatatcaaagaataagttcatgaccatgtcagcggcattcacagtttcatttgaaatctttatttagagattggccttggatttgggtgtgcttgttaggtcagtggaggggaggctgttgattcaggttggggcttttttccatttcttagagttctccaggtgctcctctcctgcctttgagcctaaagttcatttctgacaggtgcttgatgaagtggttattataatcagtttggcctaatacgctattcataaaacttgaaaattgaccaaaaagagagaggcagagaaaaaaactgaactatttttaggtagtttcagatgttgtgtttaatctttttttttttttttttttttttttgagacggagtctctttctgtcacccaggctggaatgcagtggcgcgatctcagctcactgcaacctccgcctcccgggctcacatgccattctcctgcctcagcctcctgagtagctgggactacaggcacatgccacccagctaattttttgtatttttagtagagacagggtttcaccatgttagccaggatggtctcgatctcctgacctcatgatccgcccgccttggcctcccaaagtgctgagattacaggcgtgagccactacgcccggccgtgtttgatcttttaaaagcccataaatgctaagcgttgttctcatctgtaaatagtggtgaaacatgaaggtatgaacaggtgtgctctaagtcagagggcggagtggaggggaacctgcatgaagtatctttccttagcaggccaggcacattccctgctgtttttggggagcgggctccaggatcctttccctcttggaaaagagcagaaagtgccaattggatctctggtcactgaataaaactgatctaccctctgagtgtggcccagctcttaacaggagcaaattgagacctcaactgaattctgccttgaagatcttttgtgatgtttactggtccacgaagacaggagagtgagggtaggaaggtgcaaggacagatagttgctgccaaaatgaatttggccaggttcattcatctgctctcccttgcacacagctctctcattccttcctctttgactttttaaaaaataaactttttgttgtagtatagtttcagatgtatgggaaaaatgaggctataatacagagaattcccacatatcctgtatctagtttcccccattattatcttaagttagaatggtatgtttatcacacttaatgagccaatacagttaccttataattagctaaagtctgtgctttattcacctttcctcagttgatacttaatgttctttttcggtccggggatcccatccaggatgcggtgtcacatttagttgtcgtggagccccaggctatttttggttgtgacagtgtcccagactttccttgtttttgatgatcttgacagtttcgaggagtactggtcaggtgttttgtagaatacccctcaattgagatttgtctgttgtttttctgtggcgattcaactggggttgtggattttgagggggaggatgacagaggtaaagtgccattttcatcacatatcagtgtgacttatcacatgctgatccttatcacttggcggaggtagcgtttgccaagtttctgtactgtaaactgaaaaaaaaaaaaaacccacaaaactgtaaaaacaacaagcaaaaacccaaacagctctgtcatcttcagaaggacgtcactgtgtacagcgtacacttgaggagtgggatgttgagagaggaggatctatctaacttatttggaattcttctgcctgggagatttgtctcttcttccccatttatgtattcagtcatttgtatcagtgtggactcatggatgtttttatcctttgggttagaatctaatactgctttattttgtttgaatcgtttcagctttgaccattgggagctccttacttggcttctgtgtccctttcttggcatacactcattttttttttttaagtacttcctttctggcactacagaattcctctttgactttttgtgtgcctttgtaatgctttctgcctggtgtaggagtagtgacagatcacatacttggtggcctgaaagctaaggttttggtctcagctctgctgcccaattcacgtcacctttgtgaccctgttgtctctaaaatgatctttagctaacagaattataagaaataaatgtagggccgggcacagtggctcacgcctgtaatcccagcactttgggatgccaaggtgggtagatcatgaggccaagagattgagaccaacctggccaacatggtgaaaccccctctctactaaaaatgcaaaaattagttggacatggtggtgagcccctgtagtcccagcttcttgggaggctgaggcaggagaattgcttgaacccaggaggcagaggttgcagtgagccgagatcacgccactgcactgcagcctggtgacagagcgagactccgtctcaataaataaataaataaatgtaaaaggacttcacacattggttatcaatccataccccccgccttttttttggacattgaagcacatcttcagacttccatctctgggtctttctgcagccccagaacatgtttattgaatgaattaatgcatcttcaatgaatgtaactgttactactgtgtatcatcggtttgttcagttaaatacgtatcaatggacaagcttttcctttcctacataaacattttgttttttggttatcttgtatctcctcacatcccatagcattgcagtggttcacaggcacttaacagagaaaggggacaccaagctgaatttaaatagaaaaaataatgaaatatatatcatctttggggataatgtcattttctgtttcttcctacaacttgagccctcagaattactcgtaatggggtgtttgtgtcatctgattgccaatgatggctgagtgagtgaatgcatatttggagtgacctggaattctgatgtaggtaagggattcagaaggattatgtttagattaatttttctgcagagttctccagcagagtcctaatcaaaaattggtggtggtggcggtggcagtggcagcagcattaaacacaacaaaggcagaacggatccttatttgcatcattcagtccagtgggtgccgttagctaccatcctagagtgggtgtggaataaattatatgtataaaatttttttgagaagaggaggatgagctggtcacatgtggcattttctcccatgttgaaataacatgagatggagaacattgtgtgttgatgtctatctacaagttgatttttgtcttaagataagcagagcctccctacaacaggccctgagtactgcatcaccttcctccagtttgaaaaactgacgggggttcttaccagtctttgttaattcctgtctccggaaagaatggttggtaaaggcacatccgtattctgacatgttgagaaagaaaggatacatgcttgggaacagaagttgaggctgtaaattgttggtggtcttactagtattgggaggctgttttatccctggcatctagctgcttgtatggacgctggggttctagaaataagtttttactcctttggctataatgagctgggcattatcattaactagaaggctggattggaaaggtttgggaagcaaaggtccttctgacattcaacgcatcttcctttctggtcttttttggagcagatttttcttctgtgctctctaggaagctgatgtggttcctgtcctccaactgaccagtacctagaatgtcaacagaatgactcatgtccccaacatcctgtccttgttctggagaaagggaactgtttgcctttggaaaacacagtgcttacctctggaaaaaccccaaagcaagcatagcttcaacacagttttccttaaagctcttgtgatgtcttgtgattttttttccttgtgactttttgtaatgaaagtgttggttttcctgtgtctaccttgcgtgccaggtggttgagaattagggagctttaggtgttggaaaggaccctagagaccaactggtccaactcctctttatggttttagaaacaaaggccaagttgaagtaaagtgacttgagatctagaaactggtcagtgataatcaggactaattagtacctgggtctcctgattcctggttctgggtctttgatttttatggtttgcagtaggtttttgaacagttcacttggctgccttattggaagttctatctatgcagaatgatattgatatgggtggatatttaaaactacatatattataacatagtaaagtctttaagaatacatgatatacattgagttgttattcagaagctagggggatgtagaagagtaagaattcttctgattttcaggacattctgtcataatttagccttaagacagattttgggcaaggtatatatatctcttgtgactacaaaaggaggctggattagattagtttcatttgttgtttcaggctctgaaatgttatgattccctatgtctataagtgtatgctgcacatttttttccttcagtagtagagaatgtctgcaatgtggttaaatccttattctttaattccagtattatagaatatgggttccatgtaatttacattcatgttgtttttcttgtcaaagagggaactgagatagttatctactgtgttcagtagcattttgagtggggagagagagctatagtgtaagcttgaacttgagcagacattagcactctgttaggttacaattggtgttaacagtagagaaaagaatcagaggaagaggaggaaagagactggtgtgtgggagctaaggcccattattttgttatgggcttcttccccttttgagtgacttaaatgatgtgattgaagatatttgatagctccatcaagatggtagtctcaattccttctacagcccacactttctcctcctagatttgaattgttatgatggtagcataatttttgacaaatgatgtttgtgtggaagtgtaccttttatctgagttgagtcattgcttttgatattatcacctccattttacagatgagcaaatttagtctgagagaatggttaaatttagaatttaaccatatgaccttccaggcaccacgtactgttccactttaagtctaagacgtttcatttacattttgttcttactgatttagaaaagtttattgttttcattttctcacattacttcctggtgcctggcataggactataactgaaacatttttataaatgatttaaaggtattgaatgtgatgaactggaaaagaagaaaaaagcttcctgagtcacccagacttcatcctggctctgtcactttgtaatcttgagaggaaagattaacttctctaagcatcagttttcccacctgaaaaagtcaggaaaatattattttccatactgggttgctgggacgattagaaaccgagcatctgaaaactctttgcacagtgcttaaggtaattaatgagtgtttgtcattatacttatgttgatgttaaattaacatcttaaagaactctaaaatatttttcactttctgtttttgttttttttttctttccccctgaagcttcagaatgtcatttcctctaaatgcctgccaccctcagggagttctagtaatagggtgaacataacatcaatggaatatgaggagttactattagcagatgctatttgtttcccttttcatttctttttttacagtcgtttgggagaaacccttccagccctgggcgatgcggtgtgtcagtgtctgcctttctgccgactcctgacagcgcctcccttcaggggtgtgggtggagctcttcatgcctgcccctcctgctcacatttctcggttcactggaaaagtccccaaatctttttgtctgctcagttgtggcctagtagccagagtggctcgtgcattaaacgaagaggaacctatgtttcttctcttttcagcattttggctgaattttgaatttttatctgccccattgagtctgttggctctggctgctgctgtaccaagccctctttctggtgttcataaaccaatgagagtacaatttcatggcctgggtcaggcttgtttgttggtttcgtcttaattagaagcaaacctctttgtcttcccttttcttcatcttccagggagaaatggattttctaggctgagcaaattaatcatagtggtgtctaataaaaaacaatcaccactgcagtacctggcacacagtaggtactcagtagctgaaagaaacagttcctgtagctcttccaaggtatccagcattttgtgcaggtaggctgggggctgctgaaggatctgtttgtgaaagacgagaattagcttaagtaacttgggttggaaaagtcactctgccttctgagtgacatatgggggctggaaggtggcagagaacagggttggagagtttctctggtaggtggattagtgttgttcccagctcagaataaggtacatatttgaaagttacttaacacagagccttggattctgcctgtaggataatagatattgagtagttgtgataagtaatcatatgtagcacttaggtctttttatcttcaaagaacttttttaaaaaaaacacttttaaacacaatgaattctaccttgtatctttatcgtagccctaatgttctcttctgtgtctttgtcgtattatgtttcttaggacaagtgagtaagctttgtcaattggtttataaaacatttatgcatttaaagcttccagggagtgagaattgaaattacagtatctggggcttcatatttgctggcaaactgctggcttagcattttcttccctcttgtctgtttttcccaagctatagcagagattaaatgaaatttaggaattgtgtgtgagattttgtttctccttgaaatacagatgctcctagacttacgggtttttttttgccctgataaacccattgtaagttgaaaatattgacaatattgtaagtcaaaaatgcatttaatatagctaccctatgaaacatcctagcctagactaccttaaacatgctgagaacactgacattagcctatagttggcaaaaccatctaacacaaagcctattataataaagtgttgaatatctcatgtaatttattgaatactgtactgaaattgaaaaaacagaatggtcgtatgggtactggaattatggtttctactgaatatatatcgcttttgcaccattgtaaaattggaaaattgtaagtcagggaccatctgtagttctgtcaggatgggtgaaatgcttgctgtgcagtgcattgatttctaaagtcaatccttagcagatactttaaaacaacaaagaactagaagtttcctggttaagagggaagaagggtttgcaattggcttcataaatttcttctcaggcttttaaagttatgagtcaagaaccttcgaagcagtgttcgtaggtgcatcctttccttcctcaccccatatttcatttatataacaagatacttcaaagatgctccaaagaaataaagacagtataattccaaatgattagctcaaatccgactgccacattcaaggcttaaaaaaaattctcaattgctgtgagggattagaaaaatggcagctggcaaaaatgccttcagtataaagatgataagacgccacttattaattctttatataagcaatggttttttttggtgaggatatggagaaaggtaataaaatcatggtctctgctgtgggtaaaactagtttgagagcccctcccctgctgcttttttcagaagtttaaaaaggaggtcaggagcagagagttagtttccctgactgggggaagttaaggaaaggagtgtgagtgaggtcatggagaaggcatggtgaagtttcacagtcttgtggataagtttcccatttgatatgggatatagttgagagttacatcaaatggagttgccaccaacatgactgctaatggtgactctgggtacagaggacatggcatagtagtagttatgcagtaatcggaccctgattaacgatgaagctgatgatggcattgatactttatggagaactttgtatgtgtttttcccccatttaatccttacagtcaccattttcagatggtagctgggagtagtagataattttcccagggtcatattgcttaggggcaaagctgggatttgtaaccatgatgcaatactgcacctggtggatgtagtcagggttatcaaaataaagaaaaattgacccaaagatatattttagaggcagaaacaataatagcttagtaatagtctaggtgtgtgaactcgagacaaaacgagtaggaaaaagatggtttttaagtgacagttttggaaaagaagcaacgggggtggcaggaatgaacaatacagttctgtctcggtcatgtttatggactcttcttcctagagaacagccaatagtctttcatcagtgttgatttcatctttcagccttcagaaaacagctgtcaatccaagtgcttgctgtcgatatggagcacaggttgtgaacacagtgcctttgtgccatgctttggtcacatgtacaggtgttgactctagcagcagaccagtacctactcccagtggagctcaaattcacacatcacaccatcacattgtcttctcatttagccagtgaaatgattggcgtctcactgcagtagtacagtgatagtcattgattgacaagaccttctctgggaaggactacatttattctgatttctccagatcagacttttagaaccaggagaggaagtctgttcatggtcagagttcttgctgagtcaatgtagtattttgaaagctattgtgccaaggccccaggattctcagacctggctgagcaacatgtaactgatccaatttctcactgactcaggaggaatgctagctaaatcttgaatttggtactgtgacttcaatagtgggccagtcaaggggctcacgcctggtggaccaccatcccttcacccccaccccaccaaggtctgtctgtgcttggcttttcggactcatggtgaatgcttgaacctttttattcccttaacataaacttattcttctgggtaaaaaagtgaatcctatccccatgaaggatttgcttgattgaaatgagacccccccttgggagagaagtataaatgttgtgagcagagtggccttacggtagcttgctgacttcctagaggggtcgttgtgggaggagagccctgctagttccctttgccccaaattatttcccctctgtgcttgctacagaatcactaagtgtactgatagctcttaattacttctagttaaagaagagcaagccacctggtctctgaattaattagagcaatactctttaaaagaaacatcctcctttccctccttctttgccccccagcaaaatatttcctattagaaaaaacatatgaagccattggttagttttcacttcctttcctaagggatagtcagctaaatatgctgtcctgagagaatttgacagaagcagataagatttttgataagagttgaagagaaattctgggaagggaaggtaaattatactccctaataaaagccctaacaaacagcaggcataattggttgtgtatttgggggtgtgtgtgtcagtgaagtggtgtgtattctacataccaccagtgggaggaagaatgctgaaaaaagagaagtaggtgcttgctcaagacaggaaatataccacttcccttaggaatctgcccataggccatctttgcttatattatccatgcatttcattggcagtactctcctggagtgagaagtggtgtatgaagttggtcctaaaatccactcctcccatctccttcctaagagaaagttaacccactttgggctaactcaagagccagccagttatttttgcccatcactgtaagtaggattacagctcaccttaaatattggggaaaagtcctgatcatttgttcattctattagctagggccaggtgttgtcactgtctctagcaccgcttccatttcactcccattaaatcttagcaaattcctagcactctgaacagtgtattttacttgaatgattcccatgtggccagacttctgggagctgagcacatggtacccttttattgggtgccatgaggtaaccttggtaccctttggacattcagctttcctttgaggttatagctaattctctgatgaacatttaagtgggtggggctgtgtgttagccctactgtgtagcttttgtgatccagggaggtgtgaccccattgtggtattcccatagctgagatcataaaagcatcccaagtgtcatttggaagccaaacagtaggttacaaactcattttgggttaatctccctctccctaagctacttcatctccttgaatgctgctaactgtaagcttttatttcctttcctgtgttatcactcattaaagccttctctgacctgtataaatgagactggctttttcctcttagtattgtcttcgagcacttggcaggtggcatttggagccagagcctgatgaaagttgcccttgtgtattgtttttataagctaaatgagaggcacagaaagaataccaaaagatagactttttccctagggtaggaggaaaaaggaggatcaaaaatttgcagtttatgtatgaattttggtggaatgccgtttagagggaatattttctgattctgtctcttctcccttcagtcttatatttcctcttactttcttctgtatattttatatatatatatatatatatatatatatatatatatatatatatatatatatataaattagaaaaaaattgaaacagggccaggtacggtgactcatgcttataatcccagcacttgggaaggcagaggtgggcagattgctttagcccaggcattgaagaccagcctgggcaacatagcaagaccccatctcttaaaaaaaatacaaaaattagccaggtgtggttgtgtgcacctgtactcccagctacttgggaggctgaggtgggaggatcacttgaactcaggaggtgaggctgcagtgagccatgattgtgctgctgcactccaacctgggtgacacagtgagaccctgtctcaaaaaaaaagctaaactgaaatggaaattatttccatatcttttcttaaccaagtagtcaagtatttctgttgccattagtttggaccatatgaacttgctgctgttataggtcagaaatggttgaatagcagcaatctcatggctcaacctgttgaaccattaaccccaggagggttaatcagctagcccctttctaacccagcagatagaaaactatgacaaaactatttgactctactttccttccttcttatcttcctcatcttaaaaagttaacagatataaaacataaaagatatcattggcaagtcaaggtgacagtttttgggggtgggcaggtggcaacagacactaggacactaggacaatgaaacccagattttaaaacaaggatacaatagagccagcttctgtagaaattagtgtatttattcaccagtcattgtgtttagttgtctgagctacattgtattgtccttgaggagtaagaattgtgctatttttcattgcattcctgacatgcttaaaaaaaaaatgctgctacaatctactgtatgtagttgattgatgccgggaaagtttgctgcacctaacaatggtctttatccatgaaacactccattgatacttttagaactcattactgctaaccaaacagtagtggttttattactatactaatggagcctggtacttggaggctggggcatgggggaggaggagaaggtggggcaaggaatgtgggtaggactagtggatccctttccatgattaatggtgtcccccagaaaagtagttaggcagtttccaataaaacaatgtgataatctagatacaatgcagggtctaatgtgcatatgcaaggatgcactaaatgaattagccctaacagggaggaacaagggctttctaaataaagaatcagcaagacagcagagttttctatggccttctccaataaagtgatttgctttcctaacactgcatggaggcaaacaaatgagttgtgaaagatacggataccgatggacacagcaccatgataggcttggcagactcctccttgtgggcaacaagacagacccatgtggtgacttttatcctcttgcatgctttttgtgatgtacttgagttgttcttcttcctcactgtctttgtccatttaaaaaggatttttgtttttaggttattttatttggagtaatgcatctgtttgccataaatgtgattattgatgtacacgagcttatgtttgctgtcttacagtttgttttctatttgatctacctgttttatgtttttttttcctcctttttgactttggattaggcacagattttcagtccatttttcctatttctgaacctgctaactacacagtattttactcttcttgtggttatcctacagattataggatacgtctttgatttactacagtctaatacagactctttcacctctttgttttttgtatattgctttcctttggaaaagctcatgattcttaatgaatctcactgggggtggagtgatgttacccttatttcctacttgaatctctctcatagtagctcttacttgctgaacctgtttgtaactttcattaaagttattgcccagtatcacttctccgtggacatgtgttagtcagaaggggacatcctcaccgctgagctgtgagctccctagaataaagatggaagctttctggtttcccattgaggctgaaagctctttcatagcaaggactatcctgtctctttctagtatgacatctggcccacagtagcccctcaagtggagatttgaatgaccaggtccacctaaaccagatggccctggcatctggagagttcgaggccattttagctggagagttcgagctggagagttcgaggccattttaggtaagctcaagtctttacaactctgcaccttctaccagtccttcctagctgtttcttttggatgaagatgattcttcttttcctaactctgaggttgccctctttcatgtgcattcacattaactgtcagccatacctgtgtacctcaacactcactggttgctgcctgtaatactcttacaaaagatttaatgaagtgatggagaccttgggtgtctagcaactgccattgtttgtcaggggaatgtgagatatatgtgtgggaaggtccctgagttcctcttggacttatcaaaatatcacaaaattccagtacaaagtatctttccacagattcagctgtgctgtgggtcactaatacttgggtcattttaagctgtggtgcagaaacctacagcagaggtgtgaatcttcttccctttggcaactttatgtcagttctgatacattaaaaaaaaaaaacaaaaaaaccccagggattgatcatgttaatgtgaacacccacctctcagtgatggaggagtttttgaatcatgcaggttcttggctcggagacagcatggtctatacagaagcagcttggatttgtcaagacctcagttcaccacgcagctctgctgcattttgagtacctgtgggtaaatgacctcacctcttcagccttatctgtacaatagggatgataacactcagcttacttcacaggcttgttgtagggagaaggtgatctattgtttcctaaagctgtttttgaaaacggtgactcactctacagatatgatttgtgtcttctgttttctcctgcctgatgttttccattttggcaacttagaatctaggcatacctcaggtagagcttgctgacacactggtctatttttgaggtgggtaatactaatattgagttcaagagaattttttcccccctctgaactatgctatagttggtatctactcctaggatattaagtttgttccaaataagccagttgtgggctccatgctatgccatagaagtcagaggagagatagtgccgcctttaaacattgtaaactttcagagaaaagttttcccaagataaattagcaagtagtttcttcaccaaagggacatggttgatgtgaattgattctctgaagaaatatttaccatagctgcttctgccaaagtgaatgtggtcaccagggcaacaatggcagccgtctttatccagataagtgcaagagctgaattcagatgccccttcctagggctgccagctcatgtgaagtttggcatgcaggaaatggatgttcagtgttggcctcactgagttttggaaaaaccccacttattggagcatctgccaagcatggatggaggagggcttttcaggattgcaaaactacttctagagagactggtgagtagagggatagtgttatggacatacggctcattttccagaggtactattgaaactttcttcggtaaccataagggaagaggcagaagtcttctcatcttaccaggatgcctatgagagctggaggttgctggtgaaagaggatacaaagatacctccagagacagggcagggagtgtggtgtacttaccacatttctggaattgacttgggaagtggtgttcacttcttttatcaaagcaaaactagtaactaatagtaactactgactcatttattttttgtcttcagcttttatgaagaatgaactgactttctaatttctataagaaactgcaccagagtttatcccccactggagagggctgcttagatggttggcaaagcttccataacatctcagtttctctaacatttgaagtaaaagaccaaagctagaatcaaatatgttacttctttccattgcccagctgcagcttttacaaatgcatcacagttgaaagtgcctgaatctagagttgtccatgctgacttctagccaggccaggccagtggcacttctgtgatttggaggagactttcaatgaaattagattgtagctgctatatttaacttttaattatacactattgggatgttttaatttctaaagtgtcacagccaaggcatgaaaatgtggatcaagtaggcaaatggaattaaaaatacaacaacataacaaactctaacatccaccaattgtgtctcaggtaattaattagagcagcctgtagttactaacctgtgtggatgtttcactgctcgggaagaatagtcccagtgttttctagattagtggactgttccaaggagggctgaaataagtttcaacttgaatttgtagatctggatagtcaaaccttaacaatacaggcataggttgtcctctgtgggtatctgtagtgaattacaattctgtattaacttctacacgattacttatcctagtctcattagggaacacgaaattacctgaacaaaccataaggtagcatagacgttcaaatctgacatgtgcaaagttccttaagctaattagaaaatacacacattgatctgtgaatggatgcccttctgctcctttagggccagtgattgagaggtgtctgttggaggttggtgttgaacttgtgcttgaagtctccggatacaaaacttcacggttctggtttaagcagaagtcttcattgaatgacatcgatgtggagagaaaattccttggctttctgtcagctgaatctgctgatttgtaagactcttggggcaggttaacagccttgttggttgttgtgctgtgctgacagtgggaccaagcggggatcaggaaatagtctagggcattgcaaggttggatttgcttacattgaggtgttcctgtgatctgtgcacatcacccaaggtgatcagggccttgaggcttaggctgaaaggctggctttcgaggcaaaagatcagaaggaagaaaacatgctggcacctgatgtatatccccttttgctctgcttccatctacggttgctgcctgctcctctgacatgtaactcacctcctctgtgcctcatattgttagagctaaatttcccactgaacccagactgttatttttgacctgccctgcctatttatttgtgcaccagtgagtgtgtgagtaaatgcattatttttattattattattttttcttttgagacagagtcttgctctgtttgcccaggctggagtgcagtgtcatgatctcggctcactgatctcgctgattgaacctctgccttctgggtttaagcaattctcatgcctcagcctcccgagtaggtgggactacaggtgcttgccaccatgcctggctaattttttgtattttagtagagatggggtttcaccatgttgcccagggtggtctcgaactcctgagctcagataatctgcctgccttagactcccaaactgctaggattacaggcataagccactgcacccagcaaatgcattaatttttaaaaattatagcagctcttttggaagaattgaaacatagaaaaattaccccttagtccattgcatttacatggtgattttctttttcatttcattttttggccacgtttttaatttttattttttgctgtggtaaaacgttaagataaaatttaccatccttgccatttttaagcatacggttcagtggcattaagtacatttgtattgttggtggtgcaatgatcttcaccgtctgtgtccagaacttttcatgttcccaaactgaaactctctacccattaaacagtaactcttcattccccccaccccttcccctggtaaccactgttctccttctcagtccccatgaatatgcctattcaatgtaactcataagtggaatcagggaagttgtgtccttttgtgtctggttgatttcacttagtataatgttggtaaggttcattcttgttgtagcatttgtcagaatttcattcttttttaaggctgaacagtaatactccattgcatggatagaaacctcattttgtttatctatgcatctattgatggacatatgagttgtttctacctttaggttattctacataatgctactatgaacattggttacaagtatctgtttaagtttctgctttcagtacttttgagtatgtaactggaagtggagttgctgaatcatatggtaattctatgtttagctttgtgaggaagcatcatactgtttccacggtgtctgctgcaccctagcaatgcacgagggttccgagccctccatatccttatatgcttgcaaaggatatgtgtcttttcctttttttttttttttaataatagtcattctgatgggtatgaaacagcatctcattgtggttttgatttgtacttatgcataggttttttaaaactatgtttaaacagagtgtacttatttttcatccttgatcagttaatattttgtcatgttctctttttgcctttcaaaggactttttttgttttttattatatatggacaaattatagttgcaaatacttaagggggtacaaagtgatgtaatgatgtttgaactcaatgtggaatgattaaatcaagctacctaacctattcacctcaaatatttaacttttttataacatttgagattttctcctagtgatatcgaaatgtacagtatgctattattgtatttaccatgctgtggaatagccctcaaaaaaggaagaaattctgtcatttgcgacaacatgagtggaattagaaaacatgctaagtgaagtaagcgaaacacagaaagacaccacatgttcttacatatgtgggatcaaaacaatcgaattcatagaggcagaaagtagatgagtggttaccaggggctgggggaaatggtaacgtgatggtcaaagggtaccaagcctcaggaggagtaaattaatttatttttgagatctaaaatgactaattttaatagcttttttctgggatccatcctgaagttaccagttttctgaagaaaagcatttgaaccaagaatccaaatgtgggcttcactacagaaaggagaaacacagggcaaaactgtgtctaggcgcccctgagaccaccccaggaggactgttgggctccctgtgacctgttttggaactctgggggagctttatcagggaatacacttgctggaagctgcagaatatgggagagactccgattgtaacaggcaagtttctggtgagacaaaaatggattaaaccaagactaatgccaggcatcagagacagcaaaatcatccaatttatcatccttccctcaaggctgagaggtttttaagtagtttggaaaaacttggaaagggatagggaaagcttgagaataatttaaaaacttgtcccctgcaggccagtttgctaaaagccgagttttaccaaaaggctaaagcagtaattaaagcaaaaagcctttgaaaaggaatcttgaactaccccattaacagagattacagggtatggttagtaaacaccagagtatttaaaagagagtagtgacacagaaatgaatgccttgtgaaaagacgaatttggtcaccacaaattatagaaactttcagaatatacagagaatgcctgtaagccaaatggaactgttggtagaactgagttaaaaagtgttttctgtagagtttcatttgtaaacgtgatttttaagagtacaagctgaatattacttaaaatgccagtaggaaaaaaagtcacacccctttcctagtaactgctttttgaacctgaagtttttggaaagaagcatcggtttctgagtatgatctgaaagtactggctttaataaggtctttctccgagaattgttgcttatcttacaaggcagaagtgacaaggatggtactcagcactggggcattgggtatcaatggtgagctcatctctgtttcaggaaggagctgaccagcgacatctcattccaaaaattgccagatagatgcagcactgagctgcctcccaggtcatcccaactgattaatgtggagatctgcagactaaagcaaagagaaaagtgatttgaatggacctgagggactttatcctccactatgaggttgcagggggtgccttctgtgacggtacctttgtaagttattacaaacctactggtggaaaaaccttgactgagttccactctgaatcccagttgtagaagcatcatgaaattgagcacaggaaagactaggagtaggaagaactgggtttcggactcagatttgcctgttattcgcctgagatgtctggcgttggttgcttgcctttctgcaaggattgtagggtaccgtccaacgcatcttgtatgtggggacattttggaaacacataatactgtgtaagcattgttattagtaggtaaaatggtaaaactgaaatgaaacaacgccctgcccagccccgccaccctaacaactcatttcccctttaggcattttcttgtcagtgggtacaacacttctgtcagtatctttggctctgaggaagtcagtggaatgaatgacttcaagtctttgaaaaataaattcatggcttactgtgggcagtaatttgttttatcccaaagccggtaatgtgaggtatttgaaccaaccacaaattaattatcctactatatttgcagcagtgttagggttacaggtacaacctaagcaccattgccatatcattctgtttctggacaattaataacatgcaaccgtgttgggacaacaaatcagtgctaacctctctggggaaactcaagtgcaattgtgagatgtaaatctccatccacaggctctgcaaagggggaaatataggagtggctacttactatgtgaaatgcacagacatgactaagagtagagagttgtatattctgcctcccaaaatcctcctcatgtggctttctccaaagccttctcagaggacactgaattcacctaggaacttcgagaaatgtgagatgattcaattctgttggcagcagtgcctttcctgttactgattactggctacccgggagctcatttcctttgtactgagtcatgtgcactcagagagatatgaccagggagtgatgttatagaaattgcgtaagtgtagagaaaaggtttggttcccttattttgcatgatgatctctcactgtgcattttattatgtttatatttaactatgaagtaattgctattactgcactactgtgtttgatgcctaccctgtgtcaaacattaggtattttacgtttattatctccaatcctaagtaatgccttcaagctaggtaggtttattgatgaggaaaccggtgtggataggtcaaaataaactgttttaggccatgcaggctgaatttgaaatcatctaatcacctttgtaaatctgacagggcctgagctctttaggtcaaacctgctgcctcccatgtttaggggaataggcttaagaagttcagggaaagtacttgcctgttgaggcatgttttcttagttacaaagggcttaaattgttttgtgggtatgtgaaacattcttcccagaagctgaaagcctcctagggattccctcgttctgtgttttgcccattctttaagtcacggatgcccaatgtgaagagatcacatatgttcatgatgccccgtgatcatcattgtcatgctgttgcctgaagggggaccaggaatagattggcatcctggattttgtgacttaatagttgattcattggataaatggttgtctcattctttttttgttaatggctttattgaggtatactttaaatgccataaaattcactcattttaaagtatagaccgaaatgatttttttgtgggggagttttccttgggagacagggtcttgcactgtcacccaagctgaagtgtaatgacaccatcttggctcactgcatcttctgcctccgggctcacctcaagccatcctcctatctcagcctccccaggagctgggactacaggcatgcaccatcacgcccggctaatttttgtattttttgtagagacttgattttgccatgtttcccaggctggtcttgaactcctgagctcaaggaattcacccgcctaggctcctaaagtactgggattacaggcgtgagccaccgcaaccggccttgaatgatttttagtagatttacagagtggtgccaccattgccacaatctaatttggaaatacttccattgccccaaaagaaactttgcaacagttgtgtcagttttaaactgctcttttaaggtacccttctctgatgtgctattaggttctctagctggctatgaagaagaagaaatcatctttgaaaattatttaagtaaaatttttttattttaatttttgtgggtacatagtaggcatatatatttatggggtacatgagatgttttggtacaggcatggaatgtgtaataatcacataatgtaaaatgggatatcttccctgaagcatttattttttgtgttaaaaacaatccagttatattatttaattttaatcaaacaatatagcactcaccatatgtcaggcactgttctaagtgctttgtgaagattaactcattgaattcgttgattcctcttgacacactttgagaaaggtactcttaatatttgtattttacagatagagaaacagaagcatagaaaaggtaaatagattggccagtgtcacagagctggtaatgatggagttgggaatcaaaacgtgttattctaagcactctaaagcacctgatgagaccagaaagaatgggggaagcagtagctaactagatggatggaaggcatcaggaagagtaaaagccagtaccttctaggaaacagccagagcttcagatagccctgggtctcagatgccttagtacagaataaaataagatccgataaatccatcctggtggtctgcatggcatttgtcagtaatctaggattcctctgtccatttaccctcctcttctttgccttggtatcatagggagcaaaacatgctttgatggacttttgctttctatattggacctcagagagctagagtgatgtgcttttgaggtcccttacctgagggagttgggggttgggggtgtctgtgttctggtcaaaaggtccttggtgaaggtctgaaaagcctggtctggaatgatctgtgggaggaactgggcccattgccccatatccttagcccacctccttcctcttcttttgcaaatggttgtattatagttggtgggtctgcccattaaccttgcctattttgaagcctgggaccttttctttgtttagggggaaggccttttgatctcctagtgtgctaggattctggggagggaagctcatgaggctggtatagtcattaagttcagctgttcactaaaaattacctttctctgaatttggaagatagcaaccatgatagtaattccctctcggcctcaaagggaaaatgaccactctagtttttgtttagcattcccctgtccttagggcacaaaaaccttgtggaagtattcggtggtacacatgaaggaacccgggctgggtgtctgtccacctttgtatttagtaaatataacggattagcgcgttttggtgggaggaaaatttgactcttcatacttaatgtgtaatgtacttgggatttattaattgattgatttgctgcttgtgttttttgggcctaccatcttttttttttttttgagatgtagtctcattctgtcacccaggctgcagtgcagtggcatgatcttggctcactgcaacctccacctcctgggttcaagtgattctcctgcctcagcctcccgaatagctgggattacaggcgtgcgccaccatgcgcggctaatttttatatttttaacagagacagggcttcaccatgttggccaggctggtctcgaactcctgaccttgtgattcgcccatctcggcctcccaaagtgctgggattacaggcataagccaccactcctagcccgggcctaccatctttttattctaccaagttatgcccctccatttgcttctggcagactttcatccagttcaagacccttttaacttatcaaaggtcacaagaagatgctcaagagggaatcaaagtgagtatgtggaatgcagggtattctgtcaaaactgttagaatatattaaaaattggaaaagccaaagcttgaaacactatgtctggtataacacattagttgcccataggaacattttgatcaagtgatggcattgatacaagggcgctgagtttgtgttgttaattcacttttaactcttcatgtatcatttttgttctagttgtaaactggaagaaatttttggagctgaaaggaactttagcaaaccttcaaaatcaacctgcttattttacataagtaggcattgaaacctaagaatggtcaagtcagttttccaaacccctgtaaagagttagatgaaaggagcagtccagttttctgggttaattttctggtgctttcgcatcctgaaaatccaatatgggccttattataaagctatagacgggtctatgagatctttctaggtaagagtgctatgtgctatttcagtaaaggaattggagacagagttatttgagatggagtaactgccaagtggtcttataatttccctccattctgtcctggtgattaatcctaaattggacttcagaattctcagttcagtgtgataaaaatgttagtaaaatctctgtacatggcagttatagaaacttgtttattacataatctttttctgacaattctgttcttaaatatctttggcttaattttcaaacaaaaaccaaaaataaaaataaatgattggtagtccttctaatacttgttctaattatactgctttttaatgatcaaaaaagtattttaacaaaacagccatatatcttaatatgccagaaccacttaaagttctacagtcgtgtttataccaggtatttttattgtgaaacatgccccaaacacatcttgagcggagctttaagtatgtcttgtctataacattggaaagagatatgaaccctcctttggttaattgaagtcaaggtgtaatgcctttgtggtttcccatgtgtttctaatcaatagttcttggcggtttccaaacgacttcccccatcccatctctctggtatgagcacttcaggaaacaaactgtattaactttggccagaatacacagagagggttgcaggaccttttagcaattttctgtggaggattctctgacctggtaggttgaatatctcctctgttagcctttgggtatacgttgtgatagatttatggtagggataaatcatttccaggatgatgaagaagttttaacatctacctcattgtgttatataaaaatatttaagtgttatggcatctgagtaaatggagatgggtgacagggagaaagggagtgaggaagagaagctcagggttctttaggccacaatggaccttgagctgtgtgtcattggctatttatttttgtgtgtctgtggctgaaatgctctccagaatagctgtaggaataacagctgttattaggagtaagtcagacagggtacttgtgtatttagaagaccttttaagcactggtagcagcctagacaagcagccggtagagatataagacaatggcccctcggttgtggttgccatagcccttagtatgttttatcacttgcttagagttttgttccaaaggcaggagccatgtggcagtgcactttcagtgcctcaagcattgtttgtatgtatagttcttgaaaattcatctcactttgtcacgtcacaagatgaatacgtactcagacttgatgtgaaatgctttcttttgatcatcagtgcagacacagtggttcgacttcattagtcagaggtggggcccagatactgatgttttttcaaagctccccagatgattctgatgggcagctgatactgagatttttttttttttgagaaacacagaagcatataaaacaacaatctgttttgcatatatgcagtacttggtatttagaaaagctgtttatagcctattcctattgtcaacttgaattaccataaggaaatatatttaaagtttagccttatcacctgtttgcattaggcagtggtctctaagaagcctaacaggtatttgtaagaaaagtaaattttaagcacaactcatccatctaaagaaatacataaaaaatcaagcatttgtggcccatactcttcctgccatgcccgttggtctctacctcatggctcacatggcatgtaatagcgagtcagtgtttttgttttacaaaatcctcttccaactcctcgtaggagaggattgtatcaacctggtttgtttctcctactctgatgttggaacggttaggagcaggaaatcattctgattaggtcccaaactagcataaaatgaaaatcagtgctagtaacccctgagtcctaaaagataacttacaggaaagagggaaaccagatgggaagtttaaaagcaggagaagttaatgctttaaaatcattgtttggctgggtgtggtggctcacacctgcaataccagcactttgggaggctgagatgggtggatcacttgaggtcaggagttcgagaccagcctggccaacatggtgaaacccagtctctactaaaaataaaaaaattagccaggcatagtgttgtgctcctgtagtcgcagctactcgagaggctgaggcaggagaatcgcttgaaccctggagacaggttgcagtgagttgagatcatgccactgcactccagcctaggcgatagagtgagactccttcttaaaaaataaataaataaaatgaaatcattttttgttgttttaatttccattattgtctttttttttcaacataacatctctcttaaaaatgagactaaaactttcaaggtaatatgtgaaatgaaaacatttcaaaagggtagaacatgggaagacaagacttcctcctcttcatgtaaattctatcccccagtattaacgtttgagataacctctatgaagcttcttataaatccttccagaatcgtgtatgcagtcaagcagggcccctgggattagatatatggattgtatttagattatagtaggaatgactccccctgggtttgtgcagtgcacatacccttggccacacgtggtcaccctatatgcagagtatactctacctttaaaacaatacaacataggattacattcagtgtactgtgctataccttgcctttttcaattaacagtatataatggaaactttgccattgtctttaaaggatattgtcacactgccaaattgccacattccccctttgtaaaaggcaacacctatttaaattaccagtggtgtatgagagtacctgtctcaacccattcttgccaactttgcattttatcaaacttgaaaaatatttgctgattggtaacatattcattccaaaaatgttttaagtgacttctgtgtgcaaggcttcttgctctatcctgcaaaacaaaagcaaatcagaaccgtgctttcttcttttctagatgtctgtggtttaatggcagtgagggacaaaaagcaagcaaaccacaatttacaattattttatgtacagatttatcatggaaacaaaggggcagctgtagtaagccattatagtttaatgtaaagtttaaaatgccatagaaatatgggttattgctctttgtgttgcctgcagtatttttcttctcatttgtaaatatattttccatttagtttcttgatgtcttctaggttagcttattgcataatttaagagcctttttccttttgctgcatcaaatatatggtagatagccaactttttaaggactctcttttaaaaaccttcctgaaatgataccattttattctttttgtaaagacccctatagaatatctagggaggttgagaagtttctagtattttgaaataagaatttatagcaaaccctgtgttttgactaattgtgttctataattctgtgatgtggctattggtcataagtcattagtgactttggatagagatagttcgagtggtggggtagaaagtgtttctagttataatatgtcatatacctcaaggtctagtctaatgtctgatgccatttttctggtctgtctagagattcatctaacactgctgcatgaaaatagttaaagcttgcatgttctcacttacaagtgggagctaaatgatgagaacacatgggagcatggtggggagcaacacacactggggcctgttgtgtgtgaggagggaggaggcaggtgggaggagggagagcatcaggaagaatagctaatggatgctgggcttaatacctgggtgatgggatgatctgtgcagcaaatcaccgtgtttacctacgtaacaaacctgcacatcctgcacatgtacccctgaacttaaaatagaagttggaaatttaaaaaagccttagaggaacaaaaaaaaaaaaaaaaaaagaaagaaaatggttaaagctgaagacagcacgcagtgtccgaccaaatgtgtccatgcagagctgtccctttctaggccggtgcccctgccttacattgtgtgtaaactcttgatccttttctagagcctagtgaagggtctagctgtgggaagtggagcatgaactggaaataacttcctgcctctagcgattcatttttcttttcagcaccatttcagcgatagaggttttactgaaatttaaagagagaaaggctaaaagcttagtatttcaatgtgccagctattgctgacttgcagtaaagaactgttgccgaattaatgtggttggtatttactgacagatcccttagatagcccacttcttttgtctttttttttttgttttcttttcccttctaagacttctgtggcatctatcttcaatttgtcttcaattttggggaaatgctctttcttttttaatttctaagtttttagaaattgatgctctcagatatgtctgaattgacacagtatgatggggatctaagacctgcttttgtgcctgggagccatgaacgttacactaagcagtcgaaatttctgtgctgtagttttcttctctgtaatatgaaggtgctgggataaataatctgacatcttgcttattcagctcaacaattctgtgcatatattgcatttacacatctatcttggatttttaaaagatgtggcataggtgatgggttgataggtgcagcaaaccaccatggcatacgtcgtttacttacgtaacaaacctgcacatcctgcacatgtacccctgaacttaaaaacaaaaaacaaaccaacaaacaaaaaaagcagtggcagcagatgtgtgctttgagcagttggttatattgaaatttttataatactggttttatcaaattatgactaattatcccttcacttgcaaaataaagtggttttcattttctatgtggaagtcaagagactgtactgtgcttgagttttggaaatgagttctcacgttagtccattttagaacttgcgaccaggctatcctttgtctcttccttgacagacagcagtgggttgccaacgtgcccttgtgtgcacactcaccttttctcttctctttattaatgttctgttataggcaaaatgaacattgtgctgaaggtgtgttaactcatttaattggagatgagtgaaatatcattttctaatggccttctgcatgccttagagcccaggcctatggggtacgttgaagacgtgaacattgtaatgcaagttaatgtttatatacctactttcacttccattcatctctttctttaaaggttgattaaagatttatttcaggccatgcacggtggctcacgcctgtaatcctagcattttgggaggccgaggtgggcggattgcctgagctcaggagttcgagaccactctgggcaacatggtgaaacctcgtctctactgaaatacaaaaaattagcggggcatggtggcacgtgcctgtagtcccagatactggggaggctgaggcacgagaattgcttgaactcgggaggtggaggttgcagtgagccaagatcatgccactgcactccagcctgggtgacagagtgagacttggtctcgaaaatatatatatatatatgtttatttcagcaaattctggaattatgccctcccctcccccctttttatttttgctgattgatgtttaaaagtggaccattaaaaaatgtaattccaagattgccttgcatctgttttgaatgattgtgttttgctttacaaggggcagaatgacttttggggccaaatgctcagctgactttttgttcgctgttttctgcagggatcttgagaataatggttctttttaaggccaattgttactttctttctcacacaaaggaaaaaagagactatctttaggaaacactgctttaaatcatcttccttgaatattaattctctgttgcttcctccaaaaatggagaaaataatccctaccctcataggcttattataaggctcaattatgataatggtgtgaaaactttgaaaattagacttcagagaaattgagttaatctgggattatttatcaatgtcttagtaaccaaaagtttaaaatgtgttttgtttaccaactggttgcatgtacatggttaatccaaaaggctcagcttttcagcaaatggaaaaagattaacttctttatggatcacattatgagatgaaacacatttcattctagctgctgaaaaaatagcaacatgtttttgaaaccattgtgattttgtattgcagtcactaaaacatcaaatatatcatttttatgttaaagtgccctaatttgtgttgttacataaaacttggagtaccttgaccaaatagaagaaattaatgtgccgcgtgtctgttttaaagatgaaatctgagcccagtgtgaggctcatgcctgtaatcccagcactttgggaggctgaggcaggaagattgcttgagtccaggagttggagaccagcccgggcaacatagggagacctcatctctacaaaaaataaaaaatagacagacatggtggcacatgcgtgtagtcccagcttcttgggaggctgagctgggacaattgcttgagccagagaggtcaaggctgcagtgagctgtgatcacaccactgcactcctggtctgggcaacagagtgaaaccctatctttaaaaaaaaaaaaaaaaaaaagatttgaaaatttaaatcttgagaaggattctgaagatttttgagaaaatattttattcctctctctgttatctgtgtgtatgtgtatatacacatacaattttatgaaatgtggtttatgtgattgttttcagtatttggctaatatctatgtaaaagaaaaatgggcccacaggctgaatatgtgttttctcctcataaataggggactggtggttggttgcatttctttttttttttaacagtctcagatgattctgtcttcatttccactttgctcccattctggcattgcctgtgtggattgagcatgtgaaagcttgacatcatgattcaatcattctctgattttgcaataattcaaagcagagcggaagcattgtgaaagaatcatgccagttttcttaaggtctgatacacccatcctaatttacagtattgttctaaagatgcaccaggaaacacacatgcatgcacacacacaccctagtgagacatctgaggggatttggctgcctcccgttcctttcctgtctcctccctttgtttccagatgcatcagcagatggccgtccaaagctctaaatttgtaccttgtgtgacctttagcctggagaaaggcaaatttattctgaggatagacttccctgccattgcaagtagaccttctgtcagttgttataaataaactcaagtctttggatgttccttctgaggttgaattggcatagggggccgttaattaaactgtagcctttcttgggactctaacaaattttaaagatgagtaagacaacattggaggtactccctgatagtcctgcagtgtaggataatacaggagaagctccaggatccatctcctgagagctggctttgcagcgtaggataatacaggagaagctccaggattcatttcctgagagctggcttcaaaagaagttttcaggttgcatggcaggcattgacatggactttggagtcaggcagacccgggcttgagttctgcctctgctctatactagcagcgcttacctcatggagctgttagcattaaatgaggaggtatttatctatctgtcatttcccagaactgatccaggacctaataggcgctgaataaatggtaggccacttaattttatatcacaagagcacattcttaaatctttattcaaggacaggaggccctggaactaactaatgaaggaaagggaaattgctgtgtgccatcaagcagaggatcagaaaaagaatatgagaataattttattagcacttacaattcactgcgtttcaactattgcaaaataacagtatgcaagagtgtaggttgtcttacagaaatgatgtgctcttgtttgtggcagctcattttaggggagaagtcatctaggttaccatgtgtttgtagagcagaagacttaaaagtggacaaaggaagttggcattattctggaggatagaaaatcaacccaacttctcttctcttcccaccactggactctgggtgagcttgagaatgggaagtcttttctgttgcctagtgagtcaactcttaatgtagtctaccgtggacatcagggttggtctgaatgtaaagttgcatgcccctggacacagtgcttgggtgagagatgacagaggaacagctggacaaagtaaatggggtgagaataatggcctggaggtccttggggaaaacttgtcaccaccttaggttggctgtgactatttactaatatgagctgtgatcagaggctgagggataaagcaggccaacatttccttttcttcttattactgatttcttctagttcttcccccataattggccccaaccttctaaagaaaaggctctgcagacagcagtgggggaaaatcagtctgatgtagtctggagaaaatctttgtcctgccctgttttcctgtagctttgaaaatctcaaatgcaaggccaaacaacgaattattattaacgtgatagaggaaactggtactattaatgtcatgcaaggagaaagcccattttgagtagaaacagaaggacatttatgaggggaaagttggctgggtagggcaaaactgagtagtagaaaatttaactgtaattattccattgaatttttttagaaggactcttcaaattattgaaagttgcttagtaattagcatagtaaccatttacaaaatacactctgacctagagcaacagggaagggagtcagagagacaagttttgtgcagactgtcagctacagcaggaaagtatgcacggtgaatttccacgttaggtcaggcccatgtaaaatttacaaatggcagggggtatggaggaataaaggcattagcattgcatatgacctggtggccctttgaaaactgtgtttggggtttatgtttctagttgcagctaaatctgaatttgaggttttaatccttttgaaccaagctaggtctaagaattagacatttgatctcatgcatcttatccagcacacaaaaacttgagtgcttccttggcttggacataagctggatcccagctggcccctgattttagtttctgtgaagtgattagtgattaggtggcaccatggtaaggcagggtgctgtggtggcagggtcttccccccatgcagaagggcccctgcagaacacagcagtaagttttttaactggcctactcctgcttgccccagagggctgagaattggtttttagatagctgatttgtttgttattggctctaattaggcaggtaggcttagctcctttaattattcatgctactttgcggaagcttaagctacttattcagagttccagggccaggacttgggtgggaattctttggcagggccagctgcagaattagcattaatgtgatactaatccctgggatggcccctcagagcagtgtacccaaatgtttgtttttcacatctagagtccacaaacatgtgctcagtaatgtccagcaggctctagcactcaacatctagatggcatggtttatggccaaggagctttggagcattggtcaaagtctcaagcagagagatcagagatacagtctagaaggtattcttatatttaatctctctctggaggcattggactcatatggcctaaattttttgactcagatacctgtacatacatgtacacccctcaccttgctctcttcacacacttgtttaagggaaaatgaggccaggcatggtggctcactgctgtaatcccagcactttgggaggctgaagtgggtgggtcacttgaggccaggagtttgagacctgagtgggcaacatagcaaaactctgtctttccaaaaaatctaaagggcaaatgggacagattatgtaaaaatcattcagaaaataatttgtatgcagcaaaattaactatatttagatatcccatgttggttattatacctgggtatctttttcttctgtcacttatgcttaagatttgtcttcacgtatggtaaatacctgcataccattacttatgagatggctttccacatagttagtgggatgtacactgatattaggatattaggaagaacctcagaccaagtataaatggctgaaaaaaaaaaaagccctcacaagtgatggtgtattggtaaaagtggtaaaaagagatgagaaggtctctagagcgtctctcttgaatatagagattctagcattttaattttgttcaaggtgggattgacagatatagctagttgaattttcaggaagtaatagaaaaatagtttaacaaaccaaattgctaattatgttctcagcgaattgctgtaatattctggtgttttattgtgtgatattttataggagttagaaggatcttgactgtccctttctagaaaaaagtcagggtgcagagactttacgaggtggcccccaccacaatactaccttgacccagcctggactgctggttagagccccaaagattgttcccttcattttaggtttcctctatggtgctatagcatgtatacataaaacattgtttataccactaaaagacgtgcttagttttttttttttctccatttcattcactgaagatacctcaaatgcaaaacaccacgcggtattgcaatcccgtgcttgataagttcaggccttttccaacttcctcaccccattgctttttttatttttcttttttttttgagacagggtctggctttatcacccaggctggagtgcagtggcactatcttggctcactgcagcctccacctcccaggctcaagcctgctgactagctgggactactggtgcacactactatgcttggctattttttccaattttgtagaaatgagggtctcactatgctgcccaggttgaactcctgaactcaagcaatccgctgacctcagcctcccaaggtgctggaattacagatgtgagccatctctcctgacctacacatactaatgtaaaagttgggaactacatggtatctactataacacatctcaaaatttcagtggcctattgtgactctgacctaaaagctcagcatagatgttcttggcaggtgggttgcatatttctctctttttgtgccttactattccctggggctttggagtcctctgaatctagctggcctatgaaaaagagaggatgaaaactctccattttgccacctttgcctggaagtgacgtatatcacttcctccagtgtttctggtagtgagaaatagtctcagtaacccatctagtaattgatagaaatggcctggtaaatgtagtccttggcggaaagctcctctccagtgataagttcatagtatgaagggggaagtgggaattttggtggacaagtagacccctctgtccacgatatttatatgttccaagaatctagattgggcaatgtcttagtttgggctgaaataacaaaaataccatagacttggtggcttcaacaacacatttctcacagtcctggagagtagaagtccagcatcaaggcactggcagatctggtgtctggtgaaggtatgcttcatggtttgcagatagctgccttattgtctcctcacatggtggaaagagagaccactggtttcttcatccttttataagggcactaatcccattcataagggctttacccatatgaattaattatttcccagaggccccatctcaaaataccatcacattggagatttagagatcaccatatgaatttgtggggtggggaagagggacaaaaacattcactccatagcagatgatatggatactgtggagctagacatttgatttgctgctctgtacctgacatggagcaaatatacctcttggggtatatttcaccactggccatgcctgtttgcatagcttgttgtcaagattaattgagaaagaatgtctgatagtatactgagcagagaaacttactgtaactgcaaagcagtggtagaagaataataatgcaccccccctgcggtgaaaaagatgctctagcccagcaataatggtattgacttcatgaaaccacttctgacctgcggcagattgctggattgatttagtgctgcttttttttggaaacaagccttgattatgcctttttacagtctatcagtttgtgtgaaactgactatattttacagtctatcggtttgtgtgaaactgagagcaaccctggtgactctcatggctaggataccatggtaccttgataagaattccagattcaaacaacagaaacaaaagtgacacagtagtccccctcttgggcagtcttcaagcacatcttgaagagttatatagttggtctttgaatatcactgccttttggctgtttcttcgatttatataaaagaggccaatttgaagccattcactcagtactgtatcactcacatctgttgtaaaaggcattagaatctgtggagtgaggaaaaaacagagcctttatgaaatgtgcgcttgaaatgagagatgtttgtcttaaatttggacaggataaataagagacttacatggaaactttggaagctgttttagtgaaatttgcccttaaggtcttgtcttattccaaaatgatgaggcagaatgcccaaatgttagcatttgacatgtgaagaaaaggaaaaattggataaaaagtgaagaatatgttcaaatttctctatacaagcattagagaatataagaaggcctgttcagcattgggtttaaatagggaataattaggaaatggtgtaatgtattatttactcactgtttttctagggacagtcattccagaatcaaaatcaattggtcagcttcacctggtagctagaagtaaaagcatggcaaattcagatgccctcaagggccacgcaggtaaccttaagtgggtgatgcaggttctaaattagagtggggaatggacagatcaagtccctggaggaagagggagaaagtagatattgaagcttaatgcagaaatacaggaccagtgttgttacgtcttcagacttttaaaggagactgaaatataggtggtttttttattttttattttttgagacatatgacttttaatgtcagctcgggtgttttgaggtactgtgtaggtcagtgaaaaattgtctgctagtcttaattttcctgagagctacctgtctgtggcatctattttagtggccagggaaagcagatttgcttcttggcgcgggatggacagggagggctctttggtttagcaacatattctctgagtaaacaatcaggctacatttttgcagtcatagcgtcagggggctgatgccatttttaatcacttgtaaagctctaggggctatatggagaacctactgttacttgatactctttcataaagtaaaattttatttactttataaaaatgccataatcatcagttgccggcacttatgtttctagtacccgagattaggaaatcaacaaaaatggtttatttgggattggaaacataaccaatttaagatctctttagttacttgaaaagaaagtagaaataaaaggcattcagattcttggctggcctgtgaagtggaaggaattcagtttaattgtgtgtgtgtgtgtgtgtgtgtgtgtgtgtgtgtggcaatagctaattgtaatgcaggtttaatgtccctatctttttagtaggtttggcttttggagaaaaaagttgcttggtgtagaaaataattatgtcatatatgaaaatggtcaaaaatgaaatataatcaaggggagctgttaatagttttgcatgtctttaaaaaactgctagttttattgaaaatttatcaaacttaacctttgaaaataagacaggttattattttcaaggttcaaggtttatttttcccaagagaagacaagttttgttggatatgtgtgtgttttggttttttaatcaagccaggtttcattttcttacttttaagtaatggatatatggtaattaaataagaaaacagattaaaaagacaatttttacctaaaagatttgttgaaacctgaaagtgacctttgtaagtcaccatcttttttctgaaccttcatccataaattgggaacagtttcctctatcttgcagattgttctttagcattaaatgaatatctgtgtaatgtgcctgttgcaatacttccacgtaatagggactcattcctttctttgctctctttgatcctgaagacatcaaggagggtgctgactccccatactgatcctagctggggaaagaatatagcttgggctacttttgttttggggtcatatttaagttaatttggtctagtatgccgtgtctgtggttcttgggcatcagcatttacccgttttatgaaactctctgtaaattatagccatatagcaggtgcttagagtggtctcaccgttaatacatttttaaatcacatttgtagattctggacagaaaagtcaggaccttaaccaccagtagaaagcaggtaatgaacttgtgtgtactgccaagtgacctctctactgagaacatctaaggataagccacaaaatgagaagtggacgtgaaacccctttggatcagcctgccttaactaaatggaagaattggggctttactgcatgtttattattattttatttttggtaggcaccaggtctcgctatgttgcccaggctggtctgaaatccctggtctcaagtgatcctcttgactcagcctcccacagtgttggattagaggcgtgagccacaatgtctggcctttactgcatgttaatttggcgtttcagcagccaactcagctgggaagttgcttgcttgttgggaagacatgggcaagagaaaagtttgataaatgtgcatgctgtgactttatgcttgcaaaaaaccaaaatctcacagttgtcagtacagccataaatgctaacatctacttctgcttcttgacaaatgcattgctgataaggacaagggaaatggcccgcttgactgtgtttagggtcaggaattcttccctttgccttagaataaaaaatagtgttttcttggaatgttaagattgaaagtgtcttcaccggattcaatttctgtgacatcagttctagaagccctccttgatgtatatgggtagttcacaacagtgagtaactgtggttaaaaaacaaagaagagtaagttgttacaggtagaggcatgtagagaacacattcttattagtgccggaagtccttatccaagagtctgcatgcagaacacagaggtgaatttcattctttttctttgaagcattttcttaatcttttcacatcaaaatgagggaggacttttgtgggaatgatgaaaacactacttatgaaagattgttaagttcttatttgagtctgaaatatgactaaatcttgccagcctatcagatgcagttgaaatgggaacctctgcaaaactgtgggaatcaaagaaaaactgccttcaccttgtctttttcaaagaaggggatgtagggaaggcaagatcctcttcatgactttttggaagggtgatttctatagtcttaacaacatttgtagaccatgtaatatgtgcagagcactaaatgggtttataggtaatgaaattttagacttggagttgaccttaattgtaattttattcaacctgcttattttgaaaatgagacaattaagaggaagtttactgcctctttaggaagttaaacagctacacatctttataaatatttttgagttttatgatgtagcaagtgattgatactcacaagcacacccagcacattcaaatacagaggatctacagagcattaacaagttcgctagataatagtgatacattttctaggaagaggtgggatttgaaccaattttagtaaaaaggggaggaaagacagagtggtagtgcatgcatgtagtgctagctacttgggaggctgaggcaggaggattcttgagcccgtgagtttgaggctgcagtaggctataatcatgccactgcactccagcctgggtgacacagagcaagaccctgtcttaaaaatgggggacaggaggccaggcgtggtggttcatgcctgtaatcccagcactttgggaggctgaggcaggggaatcacctgaggtcgggagttcgagagcagcttgaccaacatggagaaaccccatctctactaaaaatacaaaattagttgggcatggtggcacgtgtctgtaatcccagctactcaggaggctgaggcagagaattgcttgaaccagggaggcggagtttgcagtgagctaagatcatgccactgcactccagcctgggcaacagagcgacactccgtctcaaaaaaaaaaattgagagagggacttggagcagtagagttaaaatagatgagaactgcaataggaaatgagaattggtggtgtgtgataatttgtgggatcagatattgagagtgggagttcctaccagtgtgtgtctgtgtgtgtttgttttttaaaataggaaatggtggctaggggagttttttgtgttaaatctgtgttgttggagagtttttggttggtgaggggggccagggtgaccagatgaggaaccgacaaaatttagacacctgagaaagaaagggaggaaatggactaacatattctcaggtagttaacctcctcagcgtcacctactggtccttctgaatgttatcagttcccttaatgagccatgcttctcacttctgtcctttttctttttttctttctttttctttttcttttttttttgagacggagttttggtcttgttgcccaggctggagtgcaatggcgcgatcttggcttactgcgacctccttctcccgggtttaagtgattctcctgcctcaacctccctagtagctgggattacaggtgcctgccaccatgcccagctaatttttgtatttttatgagagatgtttcaccatgttgtccaggctggtctgaaaagcctgacctcaggtaatccacccaccttggcctccctaagtgctgggattacaggcgtgagccaccacacctggcccacttctgtcctttttcatatgctatttcatttactgataatacctttctccgtacccccacccaaagcttgagttattgtctgttcatttgtgtgtttagactttattcacccttcattttaggatggttgtttctataatacataaaagatatctacaaatttgacctttaatgtaggaacaatgacaaaccactgaaggctttccaatcaggagagtgatgtgagcagatttatatttaaaagcagtggttcccaagctttatgttgcatcagaattgtctgaagggcttgttaaaacactaattactgggttccatgctcagtttatgattcagtaggtctgggctagagcctgagaatttgcatttctaacaagttcccaggtgcagtctgaagatcatactcatttagagggatcgctcgggccgcagcaggaatgaatgggcatttgtgggtggttgggcaggacaggagcagggcaaatgacctgaaaaatgtatcactatttcaggtaagaaataatgatggagaaaagtgagtctgtccagagatacttatagacggtagttgattagagacgagaaacgaaggaggtgaagccggggtttctggcatggggaaccagatgggtggtggtgccattcactgaaatagggagcactcaatgagcagattttctgagagaggtcaggaagcaggatagtgatgtgatggtgtgtgtggagacctgcaagtctgtcggtgcactagccttcacttcagtggggagaggcttctaccactttgggaaccatcagtttgggattgatagttaacccattggagtagatgggattagctaggaaggtaggtgagaagagcacctgggacagaatgcaaagggtcacaactcattaagggaagctagaggaagaggagaaggaattgttagagagggtcacaacaccagaagtgtacagtgctattgtggagaccaagaggaagatgtgtttagaagggaggagagtagagctgggcgtggtggctcacgcctataatcctagcactctgggaggctgaggtgggcggatcacttgaggtcaggagttcaagaccaggctaaccaacacagtgaaaccccgtctctacgaaaaatacaaaagttagccgggcgtggtggccggcatctgtaatcccaggtacttgggaagctgaggcaggagaattgcttgaacccgggaggcagaggatggagtgacccaagatcacatcattgcactccagcctcggcaacagagcgagagactccatccaaaaagaaaaaaagaaaaaaaaggagaggagagaaacagcatcagttgctgctggggaatgccaggaaattaagtactaaagagggttcagttgagttcacaacatggaagtccgtcgtgcattcacacagtgctgactcagcctgctttgggccaggctctacgctagacactgagggttcaaccatgactgagattttcttccagtggcttggaagaagcagaaggcagccagcaatgggttaggagggtcaggacagaaactgactatttaagcagtaagttccagaagactggaaggagagagggcagccgagtagagggtggggtagctgggggattttcacgatgatgatgatgatggaagagacttgagagtgtttaaatgtaataggaagattcagagggagagactgaagatttggaagggagagaaaagctggatagaggcatgtccatgggagtatgggatgggaaggagaccaccgcccagaccctgcatgggtggtctgcatgactatcccacaagaaccagcttgatatttagtctgatttgagggtgcttaaaggccccattcgggtttgcctcacttaggtgccacatagccttaatttccagcatgaaagatttattcctttggactactttcatttagagatatgcaagatattcctggggcaggcaggataacacattacagaaatagactctaacgagcaagtaaatacttagctcccctttatcctaatgggaggtagtgagcttgcgtgctcaggaggaagagactgaatcctggagtctgtcctagcctgcctagtttcagttctgatttagtggagacaaaaggccctgtatgattttaacatagttgtggcagctgtttccttgagatcagttcaataatggtattaaaatatgatagagtcgattgaatgttcagcaagcctatgggtaactcagtgtcccctgctccaccatgtgtgaggttacaaatgaggtcatatgaccatcaatattaaaatgttgccagtaattgcgcccacttagttggtaggcaggatctcagtcctcttcatgacccctcttgattctctctgagggcatcatacatggttcacaaacagttctgtcgttctcctctggcaaagccagttgggggaggtatcttgctgttggcactgtggttttccataaagatggaaagcatctgcccaggagtctccttgaatcccaagttgcagaactttcaaagagccagtttgtgctgatactattgatcctgactacatcagagtctcaattctttaaagaaatggagtcttttacactccagtctgtgtttcacctgtgtggctaacgtgggcaacagtgtcttcttcttccactgtcttccccaattctgtgatgcttttccctgtggaaactgagtcatgcagtggacacctgggaaacgcccttgagattctgccaaagtaagaatctcacttttggtgagtactcccctcctcccagaataagagaagccttgtattctgtaaattaaacttcagtttaaatgtcctagaccactattgtccaatggaacattttataatctgtgccgagtaaccactagctgctgagttagtgagtgttgaaatgtggctagtgtcactggggaactgaattttaaattttacttaattttaattactttagagtttaatagtcacaggtggttagacagtgtagctctagaccagtggtttcgaaattttatcatgcatcagaatcaactggaggacttgttaaaacatagattgctgggccctgtcctccccaaagtttctgattcagttggtctggatcaggggttgaaaatctacatttcttacaagttcccaggtgatgctgctagcctggaggaagccacatttgggaatcaccactgtagactttgttctagtatttaattaatatgctaactcacacagatagaattgccatcagccagtcgtcagggttccgggtcagctggttgacaagcagcctagtacctcccctcctttcccatccctaaaccacactggcttcttttttccaaaaacattacagctcatctttaagggtgattcatgatactttctaaacagccacagtagctgaaacattggactactggggaaattccagccttgaacagactttggttttcattccagttttactaatttgttctctaatcttacaagaaattagaccatgtgtgtggcgcatgtaggctgtgagtaattttatctttgccaagctcatacttggcattatagtcagtgatttctgtgtccatgctggctagcctgggctcagagggactgtccctaaaatcattttttaatgagtagctttttaacccaatggcaaaatcatttttaatacttacaaatacggtctaataaatattttttttagaataacagagcactgtcttatgggtgattgtttatacaaggtctttctcaaaagcatattggaatatttacagatgaaatgacatgctgtctgagattcactttaaaggcctggttgggggatggtagctgaaaccagattgcaaaatgttgatgattgttgaagtatacatggaggtgcagtatactattctttcaacttttgtgattgtttgaaattttacataataggttaaaaaaaaagcatgctcttagagaaactaaatacagcatctttgtgaagtaccaggtaaataattgacattaaaaatgaaaagtagtttgttggttttgttttagggaattcaactggataaagaatgtaatggatgatctaaaggaaatggaagagaatagcaattgtgtaaatgtaatacattatagaccattgttaaggaagaatctgcagatatgcaaaggacttcgtatgtgtgtatggtgtttaagtaggggaaatacacccctactgatttttctgtataccattatagatatctcttcttaacagttcgcaacacaactggtgctcactgtgatgtgtcaaagttttatttgatttggacaaaggcaaagattttataaatttaataaagaggcaggaaggagggaaggaagtggtaagtcataccactggagttcataggcagctaaacttttctgggtggcccagtttagatttttttagtaaagagatgatatttaccctgaaagagaagagtttaaaaaaaagagactttgtcaatcttctaaaggttgtgtgaataaactcactttttttttttttggagacaagtttcttactttgttgcccaggctgtagggtagagtggtgagataatagctcactgcagccttgatctcccaggttctagcaatcctgctgcctcagcttctccagtagtcgggattataggcatgcaccaccacacctggctaatttttaaaaagtttttacagagatgaagtctcactgtgttgcccaggccgatcttgaactcctgagctcaagccatcctcccaccttggcttcccaaagttttgggattattggtgtgagtcactgtggtcagccatcaacttatttttgatttagaaaataatctcagattttcttcagctagatggtaattgaagttgagtattttaaatttctttgacaattacaggaagcaaagaagtggttttattaaatagcagtgagcttcatgccattttacagtatgtaaccgagacccatgttttccttttgatgtagtcaatttgttaccatctttttccactttgaaatgtctctttaaatgcattttcaccccatttctatcttacatcaccttcaccccctagtgcaatccctacctccctctgcctggattactgctgctaataacttccttactggatagtcttccctcaagaagtgtcctttcccttccctttcctccagtgattttccttttctttgactgtcgtttggaccaaacgacttagcatccatttgttcttccttgtgtgtagctttttgtttgccagttacataaaaagtatgcctgtgtattaccatatgatatgacagtaggtatataacagtgctggtcttcagttgaaaatatttataaaatgtaacaagaccactagtctctttagtttttaatacttaactgtaatttgatagagaataaattttccaaaggtggcatcttcattgatgtattactcacaagcctgcaggttgaactcatggtcatagatgagtttccacatgttttctcctatacccattgaattcgtcaaaacatacctgactgtatgtgtaagggagctgcttaaagattttggcagtataggtttttgcacctagcatttgctgatttcttaaaaaaaaaaaaacacataataacagaaggctattctgtatctatttcagcactgctgagtgtttaagtatttattgcttaattttaaatttttggataaaagtattggataaaagttgcttagaagcaacttttagggagttgcttctgagagtgtgttcaaagggtacctttgactcttgttggagtttgagtaatgttcaaacaagagtaacataaaataatcctccagtgatctgaaattgttaattgtcgggataagcatagactgtcctcttagttcaaaccaacagactgaggaacttgttcataaaactctcttctttgacttggaaagacagattaaatgtggagtaaaactcctcggggttttctcttttttggactgtcagtatggcataaaaggaaaccttctgtaaattgaatactatctgaaaccagatgcactcatcaaagcatttgttgaactcctatgcattaggctctgtaattctcgtgaagccttgcaccattttcagcattgaatttaaaagtaggtcagtgaccacagtgaggtaagaaaaacattttttgcaaaaagaaaatccttggagagtgctgctttgataagacgtttaagctttccctcagatagctgattacatgcgtgtgtccggatttcctacatctctcatgctcttgtcccttgaagagtctctgaaatacagaactgtttagtgcttttaagccatgcactttgtgtttgtcgagaagaaaccaaaagacctgtgcctggcaaagccatgttgaagcctctaatgtctaattgtctgttggttaagatggcactcagtagtcaagacccaaaacactgaactcaccaagcaagcacaacagaaggggtgttcaatatttctctttttgtaaatgcttttgtgcctcttagttgctagaaaggactagatgatgtctgttttaggcacacttcttccttctttctccctctggtttctctctctttagtttctctttccggaactatgggatttttgttgcatgatagcctcttagatgtgtgatcttcatgcttaatatgcagtgatatgcagggaacagattctgggactacttttttcctttttttctctgctcataggccttggtgtatgagattccttttcaggatttttctaccatctaatggatttctgcaaaattaattaacagtgtaaagtttctcaaatttttttcctgacctctccccttaaaatagtctgtagttttatggcaggacttggggggctctcatccttgcagggaagcaccggtcaaggttctcatggtaagtgcctctttgagaggtttaaaattacatgcttttagcttccagagaggagggaaaaccttccctttaggtccgtatcatttgagaggaaacttggggttgaataggctaaatgttcctacttgtggccttgttttcactgcttggttacctagtgcaaacagattaatgtaagagttacggctttttagaatacagacagtcgtcaaaaaaatccaaagactttagaaaatggaatttgcttgtagaagaagcttctcagatactggtgtcaaacagctttgctaaagcattaatgtggctacatgtttgacagactgcataaccttcctacattttcccagagtagtctaatgagttatcaccacctttatacattccatcctacatagaaacctttcctcattcaaacagatttcaaggaaaaaggtcataccctattccaaatctacctgttgcctcttctatactctcttccacttttaagtcctctgtaacaacggctccttctgtcaccgacatagaaatattccagtttttgaaataggcccgcaaggagtttcaatcactgagagcttggggaataaaaactaattttaatatttgcattaaaaaaacaattagacaaatatattgcagaaaattatacacatttctaaaccaaatgcataaagcctgtattaatcagaacttgtagttaagccttgtttttttctttgctttacattaataagaaagaggcaagacacaagaaaaactgaaggatttaacaaatcaacaacagtttcccttctgattaacataacgaagtgaggacagagccagctcagttctctccttttgcagtgttccgtggagcgtggagacaacagtaccttcaggtactaaaggcttttcatgttttgtagttacagcagttagaaatttagtaagacatttcagtgttatacttaaagatgaaaactaaaaagcttttctgattttaattagattgtttattcgaaaaaccattcattctcctaaaatttttgtttaaaaaaagattggctcatcttcattatccagactgctgcatataccatgcacagccagaagttgccatagttagaggggccaggagcagagccatcctcagctcctccctactcctcccttctcacttaagtcagccccatgtggcatctcctcctgctgtctgacctcccatcgcagtctcctctgcctgacttcactgtctcctgcccaagctctcacaaaagctcatagcctcttacctgtccactcgttccttaaaatcattgacggttgtcatctttacaaacaggacaagatcatgaggtgatgtccctgctccatgtgtccattacccatggcggtggattttgaaggttcttctgggatgtggcaggtcgctgggtctccaggtcatgcccttaccccatcctcagttggcacagctctacttttgttctgccttctacgcttggagtaagattttgttgaataaaacattccaggttgtagaaaagtttgaaaaccatgggaggagataactgctaaaatgctgtgtctttccctgtattctgttggaggtgctaactttgaactcttggacttcagtttttttttgttgttgttgagatggagtctcgctctgttgcccaggctggagtgtggtggcaccatcttggttcactgcaacctgctcctcccaggttcaagcgattcttctgcctcagcctcccaagtagctgggactacaggtgtgtgccactatgcccggctaattttttgtatctttagtagatacggggtttcaccatgttggccaggctggtctcgaactcctgacctcgtgatctgcccacctcggcctcccaaagtgctgggattacaggcatgagctactgcaccctgcctgtgttcacatttctgacacttcttcagcttgaggggtccatgctaattggatccttattgtgaccagtgtttttatgcatactaatttgtttaatctgtacctgattgacataggtactaatatcagcaccgttttatggatgaggagactgaggcacagagataaaccaccttgcccagggttctatagtcagtcagtggccaagttaggattcagaggttggaggtcagcccgcttgctccggagtccacactctgaaacactagactctcgaaacaaactgaatacattaacataattaggtggcttttccagacttttgagtggaagaagtacagccactggattcctctttctacagacttcagtttcgattgtgggctgaatgtgccctcacattttgataagcctaggcctgtgtggggtaagtttggagggaaaagaattagagcaggagagaatacactgtagagaaaagagaggaaagaggtcattttccccaaacccgaaagaacccaggcccgtgggctccctggccttgatctgaagtctgggagccattgatttgtatgcccatttcatttctcatgccaggacaatgccacagtcactttgacctaattgtatggctcccctgttcccttcactcttttcatcaaagtgaatacatttgttgctttggcaactcgaggtgttagaatcttttttctttccccatccccgaaagacagttgagggacttgctccccgaaagacagttgagggacttgcgtgatagattgtgaagaaaaatctgggaatcatttaaattagattttcaggaatatgacttatctaactctgagaagctgggcagaaggcagcctcctcgcctgttgactccttcctgcctctgctagcatttcagaacaacagaagcttgcctggatcttttctcacacgagttttggtcctggagtcgccattggaagtctagtcagggttgtcaccttactgttgtaggcagaaaccactacgcagtgggttgaaggagcagaaacttcttggcaaaggcgaatcaatgtgggttggtaggaatttgcactcctcccccccctagttttcttaaaaacactcttgtaatgggacaaatgtgactgctcagaagttaccacaggggccttttggaatattttcatattcccccatctgtgggaagtgaggggctattaagtatgtgtgtgtgttggtggggagcagtaaccgagcaactcctttgctggtgggaggggatgccatgggccaagggattcctttgcatacctttgtcgagggcccgatggggagggctgtcgatggggagggctgtcgtaccaggtgagatgcaattagccatggaagcagcagtgtttggatctccagctctcagtccaagtataaaccagagttaagcctcagtgtggtgctggattagaaaggaaatatggctgaatggccgggcgcggtggcttatgcctgtaatcccagcactttgggaggccaaggtgggtggatcacgaggtcaggagttccagaccagcctggccaacatggtgaaaccctgtctctactaaaaatacaaaaattagctgggcgtggtggtcagcacctgtaaccccagctactcgggaagctgaggcaggagaatcacttgaaccctggaggcagaggttgcagcaagccaagatcgcaccagtacactccagccagggtgacagagcaagactctgtcttggcgtcagggggtgggggtgggggtggggattacagaaagaaagaaaatacggctgaatgaaaggtcaggagtggattctgggccctgactgacccagtgtgattcacagactccttcattaggagcagtctgctcagaaataccctttgcgtatatatttaaaagagctttctgtgtcatgtttgaactgtgacttattggggattattaacacttggtggggaagggagggaacaaagaatcctcagcccttcatcttagaggaggggacgatccagtttgtggattgccaggacgcttgttttgtccccttcctcccctgctgcccagccttctggctgtattactgcttatttgcctctttgttagagggagaaacaaaaggagttcagattcaatgcctgcttttgtttttgggttagcagctttggttgaagtttagctgaatgagagaggagagggaaaggtaaagactgagctatctgttaaggttattgactaatttagattgtatgccattctgtcccttgcatgctgtctgcgagggcacagccattataagcagagagtgaaaagggagattgtgtataacagaaagccaaggcgttagagcctaattggaaacaatacatgccccaaatgtgctctcgtgtcctagccaagaacatggtttcaaaaacatgagaaataaggataatgaaatgaaaaacactttagaaagcttagatacctcaggtattgtattgtgggggaaatgaaaaattaagtattagatttatatgttttctggctgggcgcagtagctcacgcctataaccccagcacttcgggaggctgaggtgggtggatcacttgagggtcaggagttcgagaccagcctggccaacatggtgaaaccctgtctctgctaaaaatacaaaaaaatttagctgggcatggtggcagatgcctgtaatctcagctacttgggaggctgacacaggagaatcacttgaatttgggaggcagcggttgaagtgagccaatagcataccactgcattccagcctgggccacagagcaagactctgtctcaaataaagaaaaaaagtgggttttttctttgcagttgggaaaagaatatgaaataaagtggcaaatatggctcatttgattattttcttaatctttattttttctcttgtattaaatttaagactgtagacttcccactagatcttggagacactaaggtgaaaatcttcacacattaagttgaaaatatctcttttgggtgggtgtaatgtttcacttgtgaaagaactgttaaaatcctgctggatcacgggtagcatagggtgcaaaggcacagaaaaagctcatttttactgaaggagttttagagcctatgtcaggtgacaaactttgtctatttctgccaccttcctggagtatttgctccattgttggcttgctgtgaaggaatgtgggcagaaagggatgctgggagctcttcattaagatcaaggcctagttcttcaaggactactgaatgattggacctttcatcagcatacaagaggaagggattgagagtgtctgttcatgccattgatttaattggtcagagaaagggccaaagaaggggcaataacctcagagaagagcactgactgcctgtagctgttcttactctgattctcagggcattcctggaggagctccagatactgaggggaagcttgcatcagtgctgcgtcagggtgggaaaagcccatcctgataccttactttgaagtagacatgtcattgagagggtccccaggcctttgtgaggagtcctggatggaggaagaaactatgccacacagaagtcctggggatgttcaaagctggcctcagaggttttcttttcaaatgagcatccctggaactgggagacagctctttcctacagaagctgagaaggggaggtcaggcagggagggcaaggggaacaccagcaccagaaggcagacagaaaagaaaaaaatgaagcagatgggaagtacacttggaaagggtgggaacagggtaggggctggctacttaaaaggcaagaggatcaaggcctcgaggagaaaaagcaaataaagaaggaaatggaatcaaatcagatgaagtccttttaggggaaggatgatgtgaacgaaacaaacaaatcaacagaatgaggaaaggcacgggtgaaaccaccagaggaaagttccagccagcacacaggagggaggaaagctcttgtttgaaatggaagctgatgctctaaaggagcattcagggtttggagcaacatttagatatgggggccactgaagcttccatttgtttactgagcacctaccacaggctgggtgctgtactaagacttaacaaaataaagatgaatacaacacagttcttcatgggactcataatggatgacaaacataagcaggtagcttttaaacattaccataattgtagtgatatggatatatatttcatgtcatatcatatttttcttttgttttttgagaatgagccttgttctgtcaccccgcctagagtgtagtggtgtgatcatagctcactgcaaccttgacctcctgggcccgagtgatcctcccacctcagccccctgagtagctgagaccagaggcaggtgccaccacacttggcttattttttaaatttttgtagagacggggtctcactacgttgcccagtgtggtcttttaactcctagcctcaattgatcctcccacctcggcctcccgaagtgttgggattacaggcatgagctgctgcacctggcttcatatttttcttcattggatgatgcccacaaagtttcagtgcaatgtatgtcttgactaatgcatttgaatataaaggtagaacattagataaatgctagaagggaaggtttgagtcagaaattttgtcctttctctaagctccctaaaggtgtaaatttatttgacaagctcttattttgatcaaattttctttccaactatcctctcactagaaagaggaagaagactttgtgttaactcaattttttagaattgtggatttggtagatgaggttgaaaaggtaaataagtgatcaccttgatctcttacctgttttagtgagtcagaagcaagaagagtgctagaatgttgattgattgttttgtggagacagggtttcgccatgttgcctaggctggtcttgaattcctgacctcaagcggtcttcctgccttggcctcccaaagtgctgggaatataggcatgagtcactgtgcccaagaatgttgaatttaacacattgtctgaaaactagatgagtggcttcttgcttctgaagaatgtgatgtgctgcttgattcaagaccgatttataatatgcccttcagtttactcttctttgttacaatatggagagaagtggtgtattttgaaaacatttggggccgggcgcggtagctcacgcctgtaatcccagcactttaggagactgaggggggcgaatcacgaggtcaggagtttgagaccagcctgaccaacatggtgaaaccctgtctctactaaaaaaaatacaaaaattaaccaggcgtggcacctgtagtcccagctactcaggaggctgaggcaggagaatcgcttgaacttgggaggtggaggttgcagtgagccaagattgcgccactacactccagcctgatgacagagtgagactccctttcaaaaaaaaaaaaaaaaaaattgctacaaaggaatcccctttgggggagtttcatgattaaaatatttttgagtgacactatacttgctaccaattctggttatgataatgtgtagcttttagtgcccgaagaatggagttgactgttaaacagtctggtaaatattggaaataaattagagttgtggacaagaagtaaagaaagttatcagagttggataaggaatttggagagctcagagggagatggtaaaaaaaaaaaaaagttgagaaattaagatttgtttgttagtttattgaatgtctactatggtaggatctagcaaaataaagatgaatacaacacttctccatggaactcagaatggggtgactaacatgaacaagtggcttttaaacattcccatcattgtggtgatatggatttgctctaagacttcccttgtttttcaagataagtgaggctgggagagaagtctttgaagctgatgttagatgaagatgtgctaactagactggtgcctaactatcccttcttcacacctgtgactttaagtctccaaagtagtgacacttaccacacagacttcagggtccacattcaacttaagaaatctctctcaactctttgtggtgggtggatgtggatctgagatcacagtgtatagcagagaagtcctttgtaagaaaaaaatgaccaaaagatgtatgttttctattgctactggaacaaattaccacacatttaatggcatgaaataacacagatttatcattttatagttctggcagtcagaagtccaacatgggtcccactgggctaaaaccaaggtgttggcagggctgtgttccttctggagggctctaggggacaatctgtttcctggctatttccagcttttagaagccaccaccttctttggcttgtggcccccttcctccatattcaatgcaaataatgtcagggcaagaccttctcatgcttgcatgtccccagttttttggctacaacctcagaaggttctccatctatgaggattcatgtgattagattgggcccacccagataatccaggataatctcactttcacaaggtctttaactttaatcatatctgcaaagtctcctttgccatgtatggtaacatattcataggttctggggattgggatgggtatatctttagggaccattattctgcctatcaaagaaggggggcttggccctttctgtagtgcctgtggctctctaacccagttgaatgggcctctatattagttttccttcagatttctatacctgtaccataattgctagacagccccatttgatatattattccctgactcagaaatactccttggcttggcactcagagaactccatagtggggtccttaccccttcttatcttagtccggagcaataactctgttctggttggatgtgtttactcactgttgcccttcattccctgttctgttgactgcacatttctgactccctgcctgggtcattccttccaaaccagaatgtgcccttcccttatttctgcccattctttctatgaaatcctgcgacattggccatcctcactccacatttggagtttatcataattacctagtactgttatttaactttcacaagaatgcatttgctctttccatctataccaccatcctaaaatacttggtaaagtcagtcttgggatttaccctcagagacactgattacatgttctggtatggggtcaagaagtttggcatgaaacggcctctgtgggtgatgctggtataggtggccccacgtgatgctgtgcgggaaactccttgagggaggataattgacctttcacccagagtgataggcatcatgctttacatgtaggtggaggttattatatttctgggaaacgataccagttttctgaaggcaagttttaatgaagagagtgtgtcttgtgggaagtgtgtaatagagttaagggcaccaaactgtgcaccatcgttttggaaccaactgctgagtgtgaaaattcaaaggtgtacagagagtcagtctatgtcccagagtggacatggtaagacagtacagttgagaattggtaataaccattgtaatggcaaaatcaccaaacctctagattttttttgtttactttttctgtgtttcagggactttatgcagattatcaaaagcagaaattttgtcatggaaaagatttgaaaaaatggaagatggccaatttttgagaacatatggagagaactctctgctttcagtgctcattgtgataactagttcttcttgatgactggaatgcaaagaacacccaaagatctgaattcgcactgaaccaagcatttttggaatgaggtctttcatgaatatgccatgattttgatttctgcttttgttaagactgcaatggagcctttgttattttcttgattccctgaagagttctagattccctgaagagttgagtctaagtgattgatttatatacaaaattgattttgcctttttacgttattttgggatcttatagcataaaataaaacttactaataggcatattaagcaaaatgttttttgtttctttcaattttgtgccttttattacttttcctatcaactttatagacgttgaaagggaagacatctgttttcattgagagaagatcttttaaaaaacgagctatttcagagttcctattataatagggttctacctattgtaaataaaagaagttaatctgggccagatgaggtattaaaaataacagataactatgtgaatacactaaaatctattgagttgcatactttaaatgggtgctttgtatggtatgtgaaatatatctcaacaaagctgcaaaagaaaaaatacataaataggtaaaatggaaaagaaaaaaaccccagatgtttctgtgagctcttggaagctgtcacagtggtgagacacttgttttagaaatcaccaaaattttcgtttgagtccctagtcaccaaataaacataggaaattttttcatattatcttttgttgaaagaagagctattttaagataaatcatgctaggcactttaataacagtgtttgagtcaatttaagtcagttctctatttaactattaaatataaatattctgtgaatcaagtaggctgtgaaaatttatgtccttttcgcagtgggctcatttatatacgtagtgggcatattatgttcatttggtggtctgatgatacctgattgaaataacccaaatgggaccaatagggacaaagaatagcatgttctatccatgtagaactaaattgaaatattggtaattaatgtgtttatttggtttcatatgtttgaatttgtttttagcagccattatatggtactgtgtcctgccagataaaagactgaagaaagttatcatccaagttcttaccgtatgccttgcttctggatgaaaactgatttgtcacaaagctcagttaaaattcactacagtgtaattttaacaaacttgagagtggtcaaagtattttggccttgtaatgaattgagccagtatttgttgaatatctttctttcccacaactgccctcttcatagagcaggggtccccaacccccgggccacggacctgttaggaaccaggccgcacaaggggcaagtgagcaaagctttgtttgtgtttacagtgctccccatcacttgcattactgcttgagccctgcctcctgtcagatcagcagcagcattagattctcataggagtgtgaatcctattgtgaactgcacgtgtgagggatctaggttatatgctccttgtgagaatccaatgcctgatgatctgttaccgtctcccatcacccctggatgggactgtctagttgcaggaacacaagctcagggctcccattgattctacattatagtgaattgtataattatttcgttatatattacaatgtaataataatagaaataaagcacacaatgaatgtaatgtacttgaatcatccccaaaccatctcccccttgcctccccactacctggtccatggaaaaatgatcttccacgaaaccggtccctggttcctggtaccagaaaggttgggggctgctgctgtagaggataagaaaagagtaatatgacctctgccttcaaagaattgataatttggaacagagctgaacaatagaaatatgtgaaccatatgatgaactttaaatttcccagtagccacgttaggagataagaaagaaacagttcacctggttagatagatggtgaagaaaatgagaaaagaacagatttcggaattatttttaatgtattttatttaacccagtatattaaaatatcattccaacatgtaatcaatataaagattactagtgagatattttacttttttttaaacatatgaagtctttgagatctggtgtatgatttactcctaatgcacatctcaatttgatgttgaatttttgttggaaatatttgatctgtatttagattataaaatttagagtcaaaaaagtagattcacataccacatttgttccagttatacttaaaagtttttcaataactgagtcaaacatgttttaaaatctgaattaaaaattaatttaaattaatattaaaaattcaattctttcttcaccctaaacatatttcaaatgccaatagccttgtgcagctggcagctactgtatttaacagcacagatatggatgttgagagaagacttttctacctttaatacttaaataatcaaggtgatatgtaattacaaaaagaattttgttcttcttttgtataggatggttttgtgctacagactagctagagcttcactgtctaatagaactttctgtgatgaaaatgtgcaatgttggcacagtccagtccagtaaaggtagtcactagccctacatagctttttttctttttaatttttttgagacaagatctctctttgttgcccagcgtggagtgtgatgtgcaatcactgctcactgcagcctcaacttccaagtctcaagcaatcctcccacctcagtctcccaagtaactgggactagaggtgtgtaccatcgtgccctgctaatttttaaattttttgtagagataggattttgcttaagtaatcctcctgcctcaacctcccaaagtgttgggattacatgtgggagcccttgggcctggccacctacgtagcttttgaagacttgaaatgtggcaagtacaactaggaactgaattttaatcttgtttatttcaagtgtgagtagctacatagggctagtggctgtcgtactcaactagagactcataaaggagccacaatttgaattagtttaggcagtgagaaaatgattaagacattaggagaatagcttagaccagtggttttcaaacattactgcacactggaattatagggggatttttaaaaaaacctctgattgtctgccactcccacacattctggtttaattgatggagatgacctagtcattcggagtttacaaagctccccaggtgattgtgatgtataacaaatttgggaacagatctatgcttgtattataaattctccacaaatctatttccttgctattcatattatatgtaagtttgctaggaacaagaacaaataaagaaggaaccacatcaataccttgtgtttgctagattcctaagactactacatatatactcttaattgatcataccctgtgcattagatggggtagaaatgatcccacttggctaacaaaaagagattcaaaggttagttgacttgctgaaggtcacatagctggggggtgatggagtcctgtcttaaacctggatctcatgtttctgccaccacataagcagagaaatgtagcgtatccagcttcctccaattcgtggcttgttttctctctcttcataatagagcccttgtgcttggatttataaagaatgtttcttttgatatttagggggaaaaaatctcattaacaattggatgtttgtagtccaacagattcgttatcctctaaggggcactgtgttgggtgttagcagttctctgctctcttcctggtacaacatatgatcttggtgaccttgggttagccagttagcacgtcggatttctagttgttagaagaggagttatcaaacctgtttgttctatctcttaaaggattgttgtcaaaaaatatcattgctttgtaatggagaccaacatttatacttctgcagttatacttgctcctgaaataaatttttttcttacctttttgaaataatagtttttaaaattgagccattttcatatgttagacatgaattaattcaaccctcacaacagccctgggagatagggcctattacccttctcttggtgatgaagaaatcaaggttcagtgacttgctgaaggtcacacatcttattagagacagagctgggattagaaccaaggtggttttgcttcaaagcctatggtattatctgctccagagaactaaatcatacccttgtggcctgagtgcaatttgcctttaataggatgtttactgccttctgcattactggtaccaaggggtggcaagatttcactagtgactttgaagttcccctcttagacttgtaatagatggtggatatttcctcagtcttagataaaataaaagcatcttcagaaaatattgctactcatgtgtctcaaatttaggagcagtgagcttgccatgcaaaggtagctttcagaccatcccctttccctctcccctagtttttctaataggtatcctagagctcccggtactactcagccaggatttaatttgaaatgagttagtttataatgaattgaatgttgtttttttttctccctggcttttcccatttggagaaaaacacttcaaacctagaacaggtatctgctttgtttgatggttaattttctttcttcctttgtgtgtgtgtatgtgtgtgttttgagatggagtctcgctctatcacccaagctggagtgcaatggtgcagtcttggctcactgcaacctctgactcgcaggttcaagcgattctcctgcctcagtctcctgagtagctgggtttacaggcatatgcaacgatgcctggctaattttttattttttttggtatttttagtagagacagggtttcaccacgttgaccaatctggtcttgaactcctgacctcaggtgatccgccgaccttggcctcccaaagtgctgggattacaggtgtgagcccccgcactcagccactgatggttaattttcaaatgtatcttcctcctctgcttttctgtgggtgccaacaaatagaatggtgggtttgtttgttattcttaactcctttggctggctttaaacatgttctctttttagccttatttttctaaaagcttagtgcagaaatttcttgtttggcttccactcttcagggtgtgataattcccaaggtctctctctagctcctcaggaatgtacccccctgatggactgaaatttgtccactccagtgaaattgtttgggggagaagggagcagagtacacgttcaagatgttttctcccagcatttgtctgttgatgagcttttgtaatttccatttcactgtccttgccccagaggataaccttggatctcagtgtagactagattgagtgtaaaatgagttagcacaaatgaagtggaaacagatcagcgtgtgaggaggaggctcagacgctaaatcctctagttgggtaaagttgaaagcattttcctcagagcctccctgggaatgcttgtcctatttctcagagaaataagctactgtgtgcatgttgttgctgttgatgcctttgacatttgtgcttagcgaagtggagggttctgtgggggataccaaaaaattgccctaatctctgtcctcaggaatcttattgagaaggggagatgacctgattgctagacatccatctagcttccctctgctaggcacgagatgtacaaaggtttaaaaagagccatgaatgctaacttcttggcttacagcttagcagggaactcagccatgacttgtaatacagtgggatcagtactaccatggcagcatcaacaagaaacaagtgcgatctcatagccctgcgcaagtagtgaactaccagcaaagtcggagaggcttcatagagaaggggagttgagcagagttctgaaaagactcccctctgactagtgggacagggcattcgtgcaggcaagaacaccctgtgcgaaggcactgaggtgtgaagcagcctggtgtgttggtgagtgctccacaagagccatgtcagacctcaattcagtgctattttgtgtgttgcaggcaggaggttcaaaggagcccgagagcaggaaggctgaccaagccagatttggaaatacttggctgggatgttcctggtcagtgggctatttgggcaaagtggttaaagtgggacaaaggcacagggaaggaatccatggagggaaggggagaaatggctcctttagtatcttgaatgaggcttttggatgtgagtccaggtacagtgctatagtttaattgcttttgcttctgtttctttaaggatacattgcacttaaaccccagtaattattccagattttgttagtggatatatccccaccccccatctggctcaagctaagcagttggcataagtaggggaacagaaggctcagaattgtccactggaagtactcggcttttctttggagagatcaggtttcttccatgggaaaatgatgtcaacacacttatcttagcactttgcctcgagggcacctgtgggcttgcgcctagagcaaaggaaaggggttccctaaaacttcctttctgttttgggaacatggagatgtgatagaatatccctgataaaagcatcagtttatggtggaggtgagagtttatgaccaggaccagaaagttgctagaaaggttgctaagtggagaattatggttggttattttcaggaagcaacttaatgttgtgggaagaagcactggactaggatttgggaaatttgaggtctaatcttgattttaccttaactaataagatgatcttgatctttctgagccatggtttcctaacaggcaaataaggagactggttaggagactcaagagagcatatagcaggtgtggtaaaccatgcagcactttatagtgtgaggactgtctgaaccctgtcacttggcgcctccatccggacaccacgtgtgccctcctgcccgctgcgggggaggacatgcccctgatgggtctgggctgcactggcctctgggtgactcattggcgttttgtaaaccaccttatctttgaagaaaatgttttccactactagtaaaatttctttcttttctgtctttatttgtttctctttaaagttttcttaaactgagctaacttcaaagaagtatctggaattctcttcttcctccttaaccacttatagcccccttatccccagtcatcattgtagtatatctaattgttggtggatataatgtgggccactttggatttgagtagtcaaaatcagagcctggctagtaattgggtttgaaggagagttgagctgaagtcatctcatgaaacaaaaatggcaaaagaccatcctattaacactggacttcctttgtcttccttcataagatccctcaggctttccttagtattaaggagcagggggagaagacggtggcatatactgccctttaaatatggcatttctgaacttagctctccttgtactttatcaagtgagttgtcttcctctctcaactagatccaaagaaacatggcagcctctgcagtccccgtgaagtgctgtgagtgggatgccagcaataaaatcatgtctttctatggatttttggttggtgttctaaggcttgccgcttctcttcctaataagcctgcaccgattttgtccctgaagatttgaggctgtgaaatattcttccttcttcctgcctcctccagtctgggaagcttcacttatagccagagggctgagtgaggtacagctactcctacaatgaggcaagccttagtgttcttggcttgcttcactgtgtttctgacactgccttaccttaactcttgagtaagccccgtttcctgggcagaatctcacttctcctttcttgctggtcatttggctcttttttttctgacaagagctggatcttgcttgtttaccatctaccccagcaccttattcttttttcttggaagtgccaacatattcctctacgtgctgaacctgttcagtaattcttgttggattgtcattcctttggcaaactgaaatgaaacacacaaatctcaaaatagatgtaaccagactcctcaaacttaataaataccgtatgtgcttacactaggaatcttgcttgtcccgtttgttaacgggtacttcaccccactctcctgcctcctgcttcttccctcggcccctgtttcctacaaatcgaaggctgacagagcttttcccctgtgaatgctgctgactttaccagcagctcatcctgtgtagttacgctgcatcttttgatgccgtgcactcgtttggatagtatatgctgtttaaggaactgtctgtgcttgtattattttgtttgtggaggatgtaaatgatatagggttaattctgattgccatcttcatagtgagctcgctgtggactttatcagtatgtacacagcatatgcatgtgtgcacacaataggttttgccatggagtgcttctttcttccgagagcaggcctggtcaactgttgatgcaagcaacaacatttgtttattgagttcttaatctgccaggcactgtgctaagctatgtgtgttttagctcatttaattgtcaaaataacttggttaggtaggtactgttgtcatcatcaccccattttaggaggacctgaagcatggagttgttaagctacttgcaagtgatcagaagatctggattttcaagctgggcagttggcctccagagctcaggctcttacccatttctaaatcactgctcctaagttgctaaggcaaatgattgaaccaggaattggtttagcccctgaatgacaaagcatagagtagtcatggcttcagtgtagcactgatacctttatttgagggattctgaagaattctgactttattacagcccttgaggcctttgattaagaaactaattcccctgatacataatgagatttctctcttgtttcctcaaaagtgagtgtgtatagatctagggctgtgccgtccgatacaggaaccaccagcctttgaggttgtggagcacttgaaatgtggctagtgtaacctaggagcaaacagtttaagtttatttcagttcaattaatttacatttaaaaacacttcagttactggaaaactttttctgtatttggaacaacttgggtatgtgaacctgtttttttttcatttgtatattttatgaaatctaaacataagtgtatctgctgaaaatttagcatgtgaattacaatgtgctgtaagtaaaaatacacaagatttcaaaagcttattttgcattttttcccctacttcattaataattttatgttggttacatattgaaatgatataccttatttaagccagtatatccaaaacattattgaaatcagtttcttctttttactttttaatgtagctactagaaaatttaattccatatgtgcttctcattttaattcttttagacaatgctgttttagagcatagatgtgaatactcccctgtacaacaataccttactgaagcaagtgctcaaaagataattattgaataggtgatttgagggtgggagctggctagagaactcattcaatggggagagataatggaacctgattactttgttgaaattggtactttaggatataaatgaagtaataatgatgcataatagactccacataacatacacaatgctttatagccctttctgtaaattacctctttgactcacaacgtgataaaatgaaagtggagaaaattaacatgagccaattactcttgttcagattgagtttcctgtttctgccatgagctggaatacactgacgctgttgattcgtttttcttccttttgggtggattttgcaattaagcatatgaagccctccaggacaggcctcctcctggcttcttttgccttcttgtctgctgctcaccacttcccttgtcatctgagaacctttgcatacgtgtcatttcagctcttcctgatatcatgtgtaacaccgaggaggaagtcagtgcctctggaatcagaattaagtctctgcattgccttgggacaccccatgccttgagaagtgacacagctattgtcaacacctctcattatccacctacttctgactacttttctctagcctccttggctagtatcccttttcccacatgctccctaaatgtttgtttgcacccacagctgcacccgtcttctgactcatgccatttctttgttattctgcatgttgcctgagccttcctattcactctcaggacttctgctcccccttgcgtggcctgtccagtggttgtcaaattggggtggaaatgctgaacctcctgtgtccttatgctccgcttggagaggtcatcaattgaaaattctttgcttaattgagcatgcaattaagagtaaggaaatacatgttctgatctttttcttctgctatgttttctggttataatttttttaaaaagaaaataatgtctccgtcctttagttttcccaccttgtaaaatgggagcagtatgtgcatcctaaggctagtctgaagaagcattatgccgtcatagagaaacacagtaattctatggtgtgccgtatttggctgtatactgcattttagagtagttaactaccattggatttgaaatagtacatgaaactgaaacactgcatttattaatgagggtaatttattcctaggaaacctttttaaaaatgaatgtctcctttaagtgtttgttggtttcccctttcctgaccataccctccctgctttgtgtctgtgttatttcttttaaaatttcaaatagatttgaataacttagcttaaaagatagcctctcccctccctaataaaggacaaaggtggctattttagaggtgggtgatatttgaggctgaataatgcaatgtttacggcatacacaggaagtgggaagacctgggttctggttccatttctgccttttcaatcattttgtgagctgagcaagtcccgtaatctcaggtgatgtgtatgtcccttagcacagggcctgttctctagtaattgctcaataaatattaaccattattattggttgtcttctgagaatatcacttgaagatttagatgaaagtatttggaagattgctgtctacgatttgtcaaccgtggctgacaactaggacgtgggaaagtagagaagaagctgataaagatgaaaagctcatctatagaaagatattgaaaatttatttcttctagattacaaaatgacattagatattataccctatgagaaaaaatacgcttaatcaacccattttcctcttatggccataattagtacatagtcgcatcaataaagattgacaatatagccttctcatattgccacttctagatccacttgtaggcttaattttggatcatatgccggatttgaattgtattatggaatcacagagattgtcatggtgatatgcagttccaggaaggagtgaatcgtatgttctggttattacatgaatgagagacctaagagctcagttagccaatttaacatctagtcaaaggtactgtggctaagggattaaatatggttctcatttgaaagtgggagcagagcaggaactttgtagttgtgtgttcttttaataaaggctattaatttagttttttaaaaaagaattggcctcctaccaccagctaactgtcattgctgttcatttctgttagtatgaccaagccctgttctgtggaagtgttacagaatgtttggcttcacataagagacctccctttcatgtctaaagaggcaaggaatgtaattttaggttgtttggaagatctaattttcaaagctgtgtgatttaaagaaaaaaaaaaaaagcagaaaagtcccgtacgctgtcgtttgcttagtcttatctgaggtgcccttacattttgctctttgtaccgtttgaacagccaaggaatattagtttaactcctaggtaatttgggaccacgttttgtcttttggaaaatgcagttacaaatcagttttttacaaaacaaagtgaggctgttcagcccttcattttgatcctctgaggagtgaggctgtttagattgagcaagtaagatgtatttattcttgacaaagaaagccaaattatttaccagaaagctcttttagtttcctgtacctagcacttgactgcagggtgccttaaaaaagcaagggaccaaaaataagcaaaagaatgagctctcagtatagtccacgtgggggtgggcgtccggcgcctggttctgtagcagccccactccagaactggagccaacatttgtttccttgtggttacatttagaaacttttaaccttggcttctcacactccctgaactttataaataggaacctcttcatatactagatggcttggaggcctgttacgagttcgtttgaggttctggatgatggtgatgtttgggaaatggtgatgtttgctaataacactgccaagacttttctttggaaacggaagtccaccttggtgtgtttttttaacccagtgtttctcaggtgtagaagcataatgaaagcttttgaaaatttcaaattccaggctataccctgtactgcctggatcacagtttcagtagtgcgactccggtagcagtattttttaaagctcctcattccagcaataacccaacactaacagctgatcacatctgctctaatctgagactggattgtgcactagccataaggagctttctttcaaatgcaaaatgatggcataacagaagtgttcttattgtgatactataatcaaacagagtgatttcattgcttcgattaatatagtctttctacattataatagcacaggcttgatgaaccaagcatatcataattatcctttattgaaatagaaacctcccagcagtgtcctgaagggtctttaagtaccttgaggtagtaccttctaattaccattaataaaagatcaacaggttttagatatccaattagtgtgtacgaaattatcctggtcacttatgtctcagtttgtgcttttttgtgcaggtccacaaccctatgttaatatttttgattgaaaagcttcaaaaaagatttttttcttttaaaagaactcattttatttacaaagcctggccagacctgagctcacctggcagccaacctgacctcagctaaagggaagctacttacagtctttatcccagttgtgtttgagtacaaacatcctaatgctttgactatgggatactgccccagatatggctgccttaaggagtacaaggcgtatgcattatctttattacctttccaaattcccaaagaattgtgaattgcaaaagacatcaggctccaggcaattcagataagggactggtggacctgtgttgtcatcaggccaattccagggtctcatttgcaatcacatagttttcctgctcattccagccctctgccactgtgtgaccttgggcaagtaacttgacctttttgagcctaagtttcctgtctgtaaagtggtgcaaatgatgataatctgtcttaagggtattgtgaagattaagagaaataatgtgcacagagtgttttaaaaatagaagtttaaggaactcgtgaatacaagttcttcctttgggcactgtgatggcacatggtaaaccctgaaatataggttccttttagtaagtgagaggtccaccttgaattacagtgatacacagtaaagtgttgttttcaagctgtgggccaagattgggttttggaatctgtttattaggttgtgaccttgagatcattctatatggaaaagaaatacagtaatagaataaaaagtatttgtgcatttcatcaaagaaaggcaatctttttttcaatacttgcacatttgtatatgtatgatacatatctttttaagagttggggtctcactctgtctgccaggctggagtgcagtggtgccattgttcactgcagcctccaactcctgggctcaagccattctcccaccccagcctcccaagttgctgggattacacgcatgagttactgtacctggcttttatatgtttgttctgagtcatgatcctagtgttgtgggagagacaaacaaaaagaggttggagtagatttttattaataataacagaattattctgttcactctttccagggaatatagatctctgtttttcatggtccacttatttttagtgtactgagatggtctaatacacaagtaatactcacatggtgattgagataattgagaaaatcatggggctgatattagtcaaaagttccttttgcatatactgtccaaaaaatcaaggcccaagatttcatattgattcaaatgatctgaatagttgccttcactctttatttcatattgcatatgcagacccagtattgaaaagtcttcatagaaaatattgacaatacccttctgttaggacagtcttagcataagaaatatgtacaatgaatatcttggaccatggagtatttgtgtagtttatcacatttggaattttctgccccttggagtttgtttaatcgtaagtcaaatttatttatttacttacttagagtctcgctctgtcgcccaggctggagtgcagtgacgcaatcttggctcactgcaacctccacgtcccaggttcaaacaattttcctgcctcagccacctgagtagctaggattacaagagtgcaacaccacacccagctaatttttttgtatttttagtagagatagcgttttgctatattggccaggctggtctcaaactcctggcctcaagtgatctgcccgcctcagcctcccaagatgctgagattaagggcatgagccactgcacctggcccaaatttacttaaaaccaaactttttcttgtcccatctcacttgcttacccagtgttacctgctcatcctgttcctgtgacactgacatcaggaaagccactagctctgtgatttacagttgccttttgagtattggctgaagagaaattttacctctaaatgtaaagctttttaattaaatggaaaatgagcttcacttactttatataattaagatgcagtcagagctgggtgcagtggctcacgcctgtaatcccagcattttgggaggctgaggcatgtagatcacctgaagtcaggaattcaagaccagcctggccaacacagtgaaacctcatctctactaaaaatacaaaaaattagccaggcgtggtggcgcacgcctgtagtcccagctacttgggaggctgaggcatgagaattgcttgaacccaggaggtagagtttgcagtgagctgagattgtaccactgcactccagcctgggtgatggagcaagactctgtctaaaaaaaaaacaaaaaacaaaaaacagatgcagtcagcacttatttcacgtacctgtttagactgtgcttagttgccaatgattgataggcattagttgggtctgaatggacctatggagccatggagcttttatttaacaattctttatctgatgtctgggaagcagaggagaacagagtcacagagccgtttaaaggcataatgttgtcttatttttatcactaagttgattgcaaggtttttgtctttttggaggctatacaacatagtgactggaataaaaacttcagttgcacccctatagcttgctctccaaggtctaagtgactgtgggcaagtcatttcgtcttccaaaacctgtttgcttatctataaaggaggaaaatgtgggtacagaactcaccttgaagaattatgcaaaaaataagtgaagtatgtgtaaaaccattattggaaactggtaactgctattcaaatataaaaatgaatggtgatagaatactggaaaatttctgagaataggatctgtatctagtttatctttggacccataaaaatatagctaacatgctttgtagcagttcattaaattctggaagttagtttgcctgtggatgactgaaagctgttagttttatttccctttttgatatttagatgtgaatatggagaggatggagatagatgtccaacctcttagaccaagttcttgacacagaatatgggactcatcacggttaatagtaatgtattgtatatttcaaaattgctaaaagaatagttttttttggtttcattttgttttttgttttgttttgttttgtttgagacagagtcttgctctgtcatccaggctggagtacggtagtgtgatctcggctcactgcaacctccacctcccaggttcccgccattctcctgtctcagcttcccgagtcgctgggattgcaggtgcacaccaccacactggctactttttttatttttaatttagtagagatggggttttgccatgttggccaggctggtgttgaacacctgacctcaagtgatcttcctgcctcagcctcccaaagtgctggggttacaggcatgagccaccgcgcctggccaagaatagatttttaacattcttactacaaaaaaaaggcaagttggtgaggtgatgaatttgttaatttgccttatttaatctttctacagtgtatacatagatctaaaatgacattgtaccccataaatagacacaatgattgtcagtttaaaaataggaaaattctgctccatcatagatttagcactttgagcaattatgtttctagtgagtccaggtatccctgagtagggtggtatggttttagggtgagggtgccccttgatgcacttcaccttctcctcttttatgaatacaatgactattcatttcaaaattcctgtctcagatggtatcctgaggagccttggatgatgtcagcagtgtggcttcctttcagagagtctggttggcatcaaaatgcaccaagattgcactattctaggaatggctttaaaacaccagctctgtttaccatttgatgatatatttgtattacttaaagcaccagctatgtttactatttgattatatgctttaaccatttatgtttggtttctatttattgttcagtaaaggaaaagctagtagtaccaacattttgtagaaggctgggcatagtggctcactcctgtaatcccagcattttgggaggccaaggtaggaggatctcttgagcccaagagtgtgagaccagtctaggcttcatagcgagaccctgtctctatttaaaaaatgaaaaaattagtcgggcatggtgacgcttgcctgttgtcccagctagtcaggaggctgaagggggaagatcagttgagcctgggaggatcatttgaaccctggaggttgaggctgcagtgagcagtgattataccattacactccagcctggatgacagaaggagaccctgtcttaaaaaaaaaaaagaaaaaattgtagatgagagatagtttggcagtcctcatgagaaccccccatagtgggcggaacaccttgtgtaaacttggtattgtttctagggtttaaaaaatattaataattattatactaattctcagattatattatattaatttctcagatgtgcagttctcaaatctgagaaatagctcataggaagagttctaagctgtgaggttgagtccattttctgattcatttgggggcagaaattcctatctgggaagttagaatgatcatttgtgtaagatcttatttatcgtctcaagcttcaaagcaggattataagcacttggttttcaatgcatgaaaatgcccttggttagaaataaacaaaaagtatgggaatcttaactttactgaaaagatagggcaagtagcttggaacctccctatttggaaagcttaccatagagatctagcacaattaagcaaaaagttagtttccatgaggattaccaagaattatagtgcagtaagccacagcagacagctagctgctgaaatctataaaaacttatttagagacgagcttactcatcattagccttcacttttggagctagagtttttattagttaatttcattagtaaaggaatactcctacaaactggggaagtctcaggtgctcagattcttcatctataaaatgaggatgttggaaataaatgacttttgaaaaatcttccaaaaaaccccacagtgtctagattttggtgctgttttacccccatcccaaacttgtttcttcttccttgatttcctgtcagctctgattgctgtagatcctggatgatgacaaattggtgtctcagagtaaggagcaaacaagacaggagcctcaagcaggctgtccgttgatttgttgtttgggtttttggtctatttgcagcttctcaggtcctagccaatacaaataggtgaggttcttatataattttacactggcaaattagaacaaaacaaaacagtggagggaagcgggagatggacattgagtataggttggacaataacgatagaaaagtggtttggattctttataattatggtctgacatggttccagtaaaggtgtctttggttaaattaggtaatacgtggtgtatatatatacacacaaactatagacacatgaacatagcagctgctaaatttaatgccccagcgttgcttcatactacatgtagattttaatgagtcagcacagcctgctaaaccaagcttctggcaccgagagcctttttaaaactcatctaaacactattattgatcattcacaagtggtggttaaatttttttttaaatagcagaatctttgttacccaaattaaaagttacacagaaccacagtatataaaatagttaaaagccaaacactgccttgttcctgggctccctggggcctccaggggactttgagaactttggttacattgtttgaaaaattctgactaaaatgtatatacttaatatacgtatacatatatacatatatatatatatatatatattttttttttttttttttgagacagagtcttactgtgtcgcccaggctggagtacagtggcatgatcttggctcactcccgggttcaagtgattctcctgcgtcagcctcctaagtagctgggattacaggcacgcgccaacgtgcccagctaatttttgtatttttagtagagacggggttttaccatgttggtcaggctggtctcaaactcctgacctcgtgatctgctggccttggcctcccaaagtgctgggattataggtgtgagctactgtgcccggcctgaaaatttttttagttattgttacaaaaaggcaaagtgtaccaaataacaaaattgcaaaacaccattcaggtattatggtggtgatctgattgtgtttttattttagtaggaagcagttctatacattgaaaatcatttgtgtttaatgttgagtggtgtagaaaatgttcataatataaagactaatgtaggatgagagctaaatttcaggaaggttcagtgagtataaattcactgaaaaaagtatttaaaagtattataaagacaaagatgagttttactaaaaagcttatatggatgaaattaagtagaataaagatgaaactttgtgacctggtgaatttcaaataagtatattaaaactacagtatatgcttgattataaggcaactctcaaatgaggtgatgtcccacattctcaagaagaataacaaataagttctgaatgtataaacttcttgggatataggtgaaataattgaaagtatgttaatatttagttacacatataaaatatgagataaattttagaaaaccttcattttcccactccaagttttcaagaaacagtttttttttgttgttgttggtttgttttgttttgagacggtgtctcactctgttgcccaggctcgagttcactgatgtgatcatggctcactgcagcctcgaactcctgggctcaaccaatcctcctgcctcagccaatcctcctgcctcagcttcctgagtaactggaactacaggcatgcaccaccacacctggctaattaaaaacaagtttttaggagggatgaggtatcaccatgttgcctaggctggtcctgaattcctgggctcaagtcatcctcctgcgttggcctcctaaagttctgggattacaggagtgagccactgcttccggccaagtgaagcagttttatttaaatcctacatgtgcttcaacattacttcatcaccagaaccactttttggctccttctatagtttgagtatgtcatctttatttctaagtctgtatgatatcaattttgcattagcacctcgactttgatgtttttacattctaaattatctacatgatgtaaaaaataattacttggaaagaaaaagcttaagtacattggctttaaaatatatataactgggagattgatggattcatggatgttgtgggttgtttttttttttttttttttttttactctgtcatccaggctggagtgcagtgtcgcgatctcggctcactgcaacctccgcctccagggttcaagcgattctcttgcctcagcctcccgagtagctggcactacaggcacgtgccaccgcacctggttaattttttgtctttttttttggtagagatggggttttttggccatgtgacttacgttgcatgggagtgtatgtcctgctttacaggtattggccttggcctataactcgttcggcggaagaacataaatgaatgtgatgcaagcatatacttaaatgggatgccttaaatgtaattgggattttgtgctaatgtgagtatcatgagaaactatgccccagctacctgctacctcttcagcctggacaccagaatgacgtaggtggtgtagcagacctgattcttagccttagcaggcaggctgaagatctctaggatacatcacacagcaactacctgttggtctatcagatctaatttgaccactacaactcacaaatctaataataatcttgcatttttttgtctgaattagcagaaccagaagttacacttaagataggttaggtaatttctaaattaaaaataactctgggccaagcgcagtggctcacgcctgtaatcccagcactttgggaggccgaggcggatggatcacctgcggtcggagtccagaaccagcctggccgacatgatggaatgaaaccccgtctctactaaaactacaaaaactagcagggcggagtggcaggtgcctgtaatcctagatacttgggaggctgagacaggagaattgcttgaacctgggaggcggaggttgcagggagccgagatcatgtcattgcactccagcctgggcgacagagcaagactctgtctaaaaaaaaaaaaaaaaaaaaaaaaaaaagtgaaaatcagcctcaaaacaaacaaacaaaacaaaaaaaactttggggataatgcccatctaccaagggctatgcagtaacttgggattcttggcagtaggcattttcaagaatacagtatacatggaaaccagatgcatgcagtaaaaaatgtatcaccagccttgagtgcactgttcatttttccagtgagaccttcaaagggtctgtgaaatgaagcctggtgttttcctcttcaaggactcatttttgagtacactaagaacaaaattttggcctctctgttaggcataatttcagagtctctctctacacattcattggattttgcaagatatgtctgtatatatacacaagtggctcccatcttagtctgcagatttgaagcatatgtatgtgcttgtgcatagtcattctgcctctgcgcatgtttcactaaatttattgcatggactcttttatggctctctaaaggaaagtaaacacttaactgaacaaaaagttcagctttacattttaaaaaatttcttctaagcagaagagtttgagataaaacatgtctagtgacgcctccatttatctactgcttacctagtttactcgccaaaatagatcatttaattgaaactatccagtttgtgtgatgtcttcctaaaatacacttaactgattgaagtttgacccacccgttcattattatccattttcattcaaataattaacttgattatgacttcgatatagcactttcaacagccaaaaaacaacgttttggcctttttagtacttttctaccctggtatttcacgtgagactcacgtggggagctttaaaaaatagtgctgcccaggcttttcccccaagattctgatttaatttgtttggggtggagcccaggcactggtagttttttaaagcctcccaggtgagtctaacttgtagtcagaattgacagccacagctacagctacagctacagcgtttttgtaaactttattattgaaactaagcaattcaggttgaaatttgttttacgtgtaggattgtcgtgataggtcctctccagtgttcagatcaacctgataatgtcagatcttctaggaaattggtgtcatgtttgcagcgttatttatctcctattttcaacgtactttggggccattcttggaaggctgatcgggaaaattagttgcataaataaaaccttaatgctagcctggggataactaccttcctttatgactccagctatttaggtagtactcaaagttgcctcttaaatcacactgcctcagtcaactttatggaaatggatttaaatagtggtgaactttcctccgtcatggagaggagcccagtggatttgctctggtgacctcagtcacactcagcacagtagagccttgttagggacccaggaggcagcagtcttacctttctctgccagatgactatgtaaatagtcaatgacaggtcgctataaaagtttcaaattcctaaatgaaaaccaagttttccaaggaagaaatacaaagccttagcatgtgtacttaaattaaaaaatacttaagtctactggaactgtgtatttttttctaccacatgaatcttttttagaagaggggattttctttctcccctagccagtaaatatttatcttttggatatatagaccagctgcatatactgcatggattcctttccattcatatgtgaaatagcacatttttttccactagccagcaagactcatactagtatattactcataataggatgcattgagtctttttgattcattcttgctcttctaggatcctcatcagcttccatggaagtttacgatcagtttcttaagactggctgcgatgggttttgcgtgtgaggcagtgtgcttaaggttctagactcaaactttttggatttgaattctggcttttccacttaataactgaaggacttagtttttaaaagacttctctaaaccatattttctccatctacaaaatgggaataatcattgctacctatctcatagggcagtagtgagactcaaatgaggtctttcaagcctttgaaacagtttctggcattctgtaaatgttagctgctgctgctacctacccttctaattactggtgtaactgcctgatactgtccccggtattactctttgacataattataaaacatcaagtaaacacaggttactggtgaattaagaaaaaggatcaacttttttttcctaggcctcttgtaggcagtctctcctggggtcttctgtttcatgagtcagaggcttatctctctgtgattacaggctcactgggggcaggcacctattttattttacctagataaataaataaatccaatcccttcccatgtaaaatttttgtgtatcagctgtattgaatacttgtgtctattaatatgaatcttatgaatagtcttattgctgtaagaattccataaagactggacattgtttttcatggtattttgactctttaaaaaaacacacacgcaaacagaaacatggtggagtggctgaaaattggaagcttaaatttccaagttcatgtctgtgtcactgtagaccctgactggaaagtcatcatttccttgaacctagaggaatgtgctgaaacagtagtaggtgttggttaaaattagaaccaactatttccataaccagaattacagacacattaaaaaaaaaaataaagtgacagaaatctactagtttttccttgtgtattcaagaggtttttgacccagttcagctaactacaattggattctgtccctggacttggcacataacaatgcatggtagactttctagacctggcgatggaaactcggaactcttcccaggtatgagcccttaaaaaaatgtcatcaggatctgaacagcaaatgacagtgacttctcatgttgtctcctttgtgccctccttccctgatgctaagccccaggaaaagattccatgttgacattatttgtgtttaatagctcattactgtgtccacgctctccagctttcctttactagcagtgagcctgccaaggcgccagcactgcaactacacatgtttctagactactgtatgaattgctcatctcttgaagctatttatttgtagctaatagctagcatttgttacctcttgagaaccagagaaatgcacacacagtttccatggagagggggaaaaaaacccaaacaacctatgatccaggatcctgtttttgtctaaggaatgcagtttgcttgagcaagactcttaagatgtatttgtatagggtgcagatgttagtcattagtgcttaatgtatgctgagatgggaccagctaatggaccctctacactggtcagtggtgttgaatcaagctattgctggaaggtcctgaggaagtagtttccaacggtaatggccctgatccctttgcatatcgtttcttttggcctttcctccctcccatgctgaattataacagagtcactggtgtgcaattccagaatgtctcagttttttcatcagatacctaacatttacaaaattactttaaatatttgcctcagtccaaggtcttgggactcagcaccttttttcttgcttacataatttaaaaagtctatggtgccattttctcaatgaacaggactagtttaaaagagagatattgggccaagtgcaatagctttgcctgtaattccagcactttgggaggctgaggtaggaggatcacttgaggccatgagtttgagagcagcctggccaatacagcaagactgtgtctcttgaaaaaaaaaaaatagctggaagtggtggtgcctacccaaagttctagctacacaggaggctgaggcagaagtattcagttgagcccaggagtttgagaccatcctgggcagcatgagacctcatctctataaaaaacttaaaaaattagccgagcatggtgggtagtcccagctactcaggaggctgagatgggaggatcacttgaacccaggagtttgagattacagtgagccatgatggtgcccctgcactccagcctgggtgacagagtgagaccctgtctctaaaacataaaatgaaaagagagctatcaatggctttaggatttgggctgtaaacagtgatacagaagagatgaactttgcgaaagaataaaagatgctcttagggattggggagtgtctggtgcattaatggttcctgtcttgggaaaaagctgtgtgtagcaatgttcttgggtgttcacagtagctcttgtatatgagacgtggtcattttcaaggttgttcaccagtggtagaagaatagatggcatttgatgcttgttattttatacttttaacttttaaaattattctgtaatttaaaaatattctggggctgggcatggtggctcccagcactttgggagtccaaggtgggaggattgcatgagcttagaagtttgagatcattctgggcaacacagtgagacctgatgtctacaaaataatgttaaaaattagccatgcatggccgggcacggtggctcacgcctgtaatcccagcactttgggaggccaaggcgggcagatcacgaggtcaagagatcaagaccatcctggccaacatgatgaaaccccgtctctactaaaaatacaaaaattagccaggcatggtggtgtgcacctgtagtcccagctacttggaaggctgaggcaggagaatcgcttgaacctggtggtgcacacctgtggtcccagctactcgggaggctgaagtgggaggatcgcttgagcccaggaggttgagccgtgattgtgccactgcactccagcctgggggacagagtaagactctctgcctgtcatagatagatagatagatatagttttcaacctctaactggttttgtgtgtgtgtgtgttgacaatttatctgatggttctttgaaaactgaaaatgtgtccttcattccaacattatacatttaaaaaatcgaatgttttaacataaatatgggaggagtactccatgaaggtgaaagccagtgattctccttgaagaagggtattgttctgtgctagcggcatctccatttcgcctagcaattgtagcagaatagagactgcatcccctctcattctacaggtaaagaatagtttgaagagaaagcttagtgatttcactgccaaaagaaagcttttaacaaaattgcttattaaaccacacctcaggctgtgcagggacatgggaggagcgtgcaatttctgaaaaagaatatttagaggaggattttattgtataattggcaaacttctcatctccgagaataattgcttgatttcatggaaaggaccagaacttgggtatcttgaggcctaagataaatagatagcaacggatcatgctagtccccatggttactgggaactgagctcaagtggattgttatcctgaacaagtctgtgtcaggatattcttgtcacctttcagctctttggtatttgctctctttcttgaatcagcaaaagaaatcgctgtaaagttaatgtaatttacgggaagttcccgtgccacactgcatgcttttgtgtgtcacaagacttaagcttcctgctaccctctgttaaaggagaactttttatgttcctaacaatatacgattctttcaggagctatttacatagctgggttggttaatagacaactggggactgggctataagcattttgacctggaaatatttctttggggttatgtgaactactgtacaataaaacctcaattaactaggattacttggagaaaagacagtttctggttgaattttcttttaaatggaaggttaaacactttccttttctcaacccttcttattcactttcttcctttggcttttggaattcagatgttaagatcttgaaaataagttaatgtttcattgagttagtccgtaacagtgctttggaacatccttgagttatgaagcttgttattcaggctttactttcttcagaggattaagaggcttgaacgtggctgctaagttctctaagttgttttctggggggaagaataaatttttctgtgtaattttgttttcttgtatctttatcagattcagaataaaaaagctatcgtaacatgccctgcatcagtaggccttgttagttacgtaatcctactatttgagggtttaggaatattctagcaaaatataacagaaatgagccgttagtaaattgcttaacttaaaatatttagttttcttctgtgtgtgttaaagtcaagttatattaatttaataggcagttgggttggctcttttgcataatccagacaatatatggatcccacaaatatttattgagtatatactctgtgttcttcatataccatgttaggcagttttgtaatatcagtaatgagaccagcataagtgtattaacctctgataaccttcacataaatcttatattctacagcaatgaaaacttgtccctaagggactttgtggtcacagcagttctgatttccttgtttgaaatttttgtaaactttccaacttctttgttttgcactcagtacttaaaaataaatttaatgccagaagtaaaagtactattattttcatcaatcataagttatagataacaaaaactcagaaatttttcttgaacataggtagggaacttaggtgaaaggactgctttaattccatctaaaagataaaacctaatactgacttacaaatatgttgctaagagtttagtgtctccaagtaaaggtagaaattttacattatctatcaatgatatcggcgaaaactaaaattattaggaagtaagctaagaataatttatagtctagatttttaacttaaaagtggaaccaatttccaatggtttcttcccttagttcttgagttagccatactgtgaccattaaaaaacatctttaaaatgtatgtgaaaaaacctgaagaaaatgtggcaaagggtaagatttgataagaaatgggtctaggtttatagggaatgcattatagtctttatagttatgtgtgtttgaaatataataaaacacttttagatgaattctttcttttttttttttttcctttttgagacacagtctcactctgttgcccaggctggagtgcagtggtgtgatcttggctcactgcaacctccatctcctgggttcaagtgatgcatgtgcctcagcctctggagtagctgggattacaggcgcacaccaccacaccagctaatttttgtatttttagtaggagacggggtttcaccatggctggtgttgaactcctgacctcaagtgatacgcccacctcggcctctcaaagtgctgggattacaggtgtgagccacaacgcctggctagatgaattatttcctttagaaattattttctgtgtatctgcaaaagtgtttcattttagtactgtgaaatgaataggccctatgctgggtcctgttggggtttgtgatttatagatggtaaaatacatttcacacttacaagatgaagcaatctacctctatataaagagcttgcctgtgggtggttgtagcaagtgtcttcttattatttcacaattgagggcaagagagaggtcagaccattggtgaaacccttagtgcaagcaagtccgcaaataagctttttagctacttaagcctaggtgttttattggcattgaaggccaagacacacgagcaatacttgcacaatcaaaagttctatttttccaagacatgctggtcacacaagaaaaactgagataacatataatttatttttccaagacatgctgatcacaaaagaaaaactgagataacgtataatttagttactgtgtatccactttggatccagattgcatatctatatctgtctgtaaacagacatatgcacacatatatatacctgtgtgtatgtatatatgcacacacacacatatatatttaaaatcacagtacttaattaatttgcctccaaaactaatggccacattaatgcctttgagctaagttagactggctggaatcagttggcaagatcctggtaaatggttttggtgtcaactaggacacaagccaggtgtggtggctcatgcctataatccttgcactttgggaggctgaggcgggaggatcacttgaggctaggagtttgagaccagtctgtgcaacatagactccatctacaaaaaataaaaaattagccaggtgtggtagcatgtgcctacagtcctagctatttgggaggctgaggcaggaggataccttgagcccaggaggttgaggctgcagtgagccacgatggtaccactgcactccagcctgagcaacagcgagaccctgtccagcagggtagagtgcaaaggatgcctgtggaatgggagaatctgttcagcatccatcctcctgcttccaggctaaacccatgagaagagtgctgtcaacaaaagaagtgttccctacagtggggaagaattgaggttagcagaaagggtaaaacaagaacaaagtaattcctagccatccgaagaggtggaatgggaaaggcaacacctataacaggaaggaaatactccatctggggctgagcctgtcttattctgaggcccaagcttggctgcctttctcttcattccctctgtgtgccacttaacagtatgcatttcaactttcttttcagggaggggccagatgtagaaatgcctcacactacagtggaggagacctcaccagctacctgtaccagtaagatgggattagctcaggaaacgttgttgtttgtttgagggacaagaataacatgaaagaaggagcaagattaacagaacagctgacctagagctgctaggcactggatggtcctctgtgcttatatacacaatgtaatacttgtaaggaaaaagcaaaaggcttggaggaggctgtggactacctatagttgacagtattttcctttgtgggggtggtggatgtgggacgtagaatgtaaacttcctaccttatacattgatgttacttcattgattatagtgaacactttatagactgaaacaagtctaagaaaaattcatcttgagctgaggagatagagatgacctgccaaagatttcacatccacaaagtttgtatgactgatagttttaataaaaaaaatttgtcagccaaaacatactgagagtttcttagtcgtattaactgatctgaaactgttgccactaggggatataaaagatactacctgtattttagtgataaaccacaaagaataaaatgagtttttaattagcatcatgcagccacttaagtattagcaaagaaaatttgtagctgatctttcagttctctgtaatatagaaaaacagatgctgcatctctagttttgcctgtgcctgggggatatttaaaacttgtactaaaatgttaatttcgccatggtagaggtgacggggaaacttgcaaaaaaaggggaaagaggagggaattgggtgcatagaagtgagcatgaggccagcagtagggaatgagtttacaataaataaggtgtgagagtggttggggggagtgggagaggtttgggggctgggaagacaagggaaaagaaaatgcagggatatgctatttgtgttcattttgtctttgaaaatcgtaagtgtacagcatcattctcgggcagagtctgggaggacttgagttgactgctacagtttatgatcttccctaaacatcgacgttcctggaaatctttggcctctgagctgacttcttctctgttgcttgtgagccaggaatttaacagctctgttgtatgtgcaggctgcagatgcttctcttcagcttttgctatccaatgtgtgtgtgtgtgtgtgtgtgtgtgtgtgtgtgtgtgtgtgtgtgttggataaacttaaaaaacctgttgcttccatgcaacggcccacacaacttgggactcatggtcagcctcaccttccacattggctaaaactctacaggaaacagtttatggagtttaaggaaaaaaaaaaaaaaggaaaattatcagactccaagcaagttatttatggaccagtgtgtgaacagaacatctgattgaaaaaagaaaaaattacagatgggtggggatggaaaggcaaatgtgttgtgtagctggccaagtaatatctggttgtgtcaaaaaacgggaaaaaacatcatcttcaatgagttacgttatttgtattccttccatcttgcctgccatgtgccttggataatgctgctgtctattaagccctctgtgtcctactccctcgccagctttgctccattgtgctgttggtggggacacagcccaggtggttgggtgatgcctgtgctttcctcctgccctcttttggtgttgctatttgaaaatcacttgtataatgaatgtatcctctccccactcccattgttatgtgaaaaaagccagtaaaaatgaacatctggcaaagaaactgtcccaatttaaggaggaagtttgctagatttatgatcttcctttgtaactcaagtataaactggccactatctgaggagtgaggtcttgctacacagttttcagggtcagggggccaggcaggggtcgggtagggtgagtggaagctctggggttgccgcctaggctggaaaaacactgtgcatcagctgaatggctgccggcctgccaggatgctgctattttctatcctgattcagttttgtgaaaggacagtgggtgtgaattgttggctgggtctctggatcactaaccagaaataagcttagctaaattgaccacaagaaatttcactgttttaaatcccaccagccaactccccaaattttgccttttttgtctctttccttgaaattagtttaacattgcatagtgtattttatcttcataatgactacttaaagatggttttaaaactgaactatagatcagccagggtgtgatggctcatgcctttaatcccagcattttgggaggctgaggcgagaggatcacttaaggtcaggagtttgaggccagcctggccaacatggtgaaacctcatctctactaaaaatacaaaaattagcctggcgtggtggcgtgcacctggaatcccagctactcggggggttgaggcaggagaatcgcctgaactcgggaggcggaggttgcagtaagctgagattgtgctactgcactccagcctgggcgacagagtgagacttcatctcaacaacaacaacaacaacaaactatatattgtaaaatagagttatactgagctaaagtatacattttaatcatttatgtactatgaaaaatagtaaattgcttttgtaaaaataaaaagtactggcatgaacacagcattgttccagtggaaggagtttgtgggtttcagaagtttattaccctctgatttagatatggtcctgtctgttgaactcacggtcatggtataatgacatctcttcattccgtcccccaccctctgcccccagaacaattaccttgctttatgtaatttcttgttagatcagtctctatctccaaaagcaactggaatagattaaatcaaggctcatacacagcctataaaaacaggaacttcatttcggggaagatttttgtaagatcgttttctaaaatagcatagtatcagaaatatttctgtaatgcttttcggcaaggaaattagttcaatatttttggctttgtcaactcagttctcaataatagctgtactctgttgtcattacagttttggcttttctcaactggagaatgattttatattaagtgctttgtaattatttttttcttgcatttttatctaaggctttgtaaggggggtgttcaagtacagcgtggaaccagattcttcttttccttatctttcataattttccatgtttgttttgaattaattagttttgattcaaacaaaaaaactagcattttaaaagatctggtgtttcagtattttgttttgtttaatcaccccttgtttcttttgacactaaatttttctcaggaactaagcagatcggttatcgttcctctactttgctttattgaactccctaagtgaaatttgttttaacaaagaggcagtgtttatgtgttggtgataaaaagaaaatagccgatatattattactttttttttcttctatgtcaccttgttatgtaaggttatttcattacctttgtagtgtttttcatggaaaccgtcaacaaggaagtacctaacactgcccaacatgaagccaaccataattgtggatagaaatagtagactcctacttcctagccttaaagaatgtataatttagttagcaagtgaaatcccaaggggtacatcataaagcaatgaatgattcaaattggcactgtaagaataagttctaggtggtatggggcagcctataagagctattggaatttaaagaagcaagagattcttatgcaattatggaaaatgttctcgaggtagaggaatttgagagttcaaattgttttctcatcaaacttctcctcattttagattcagcatttgataggtaggcttccagtgtaatttcttttttcctgttaacaaaatgaacctcagaattctgaaaaggaaagatactgattcattcaaatctcaaatgtcctaactttatagaagaatgtggtactatggaagggcacaaatcaaggtgctgttaatatgagcggtgttgtagtttggatatttaaccctctaaacctcatgttgaaatgtgatccccaatgttgggaggtggagcctagtgggaggtgatttgggtgatgggggtggatccttcatgaatggcttggtgtcctaatgagtcttcctggtgttatcactggtggtaatgagtgagttctagccctattagttcatgcaaaatatgtttgttaaaagagcctggcacctctgttgccacgtgatctctgcacacagcagttcctcttccccttctgccataagtggaagcagcctgaggctctcaccaggagcagatgctggcacaatgctttgtgtacagcccagagaaccatgagccaaataaaccttttctttagaaattacgcagccttgggtatccctttatagcaacacaaatggactaagacaaatagtcacctttaatttgggtttgtaggatagccagtgtttaggaccctgtaattttgcttttaaaaccatgaaagctcatttcagatattaacaaagcatttggcttacatatcttatttgcttggtgtgtacacaggctggattaaaaacaaaagcaaatacagtttggaagaaaataaagccagcagcatcccctggtgaatccctttaaccatccaccccaggaatgtctgcagtgctggttagggcagagtggggcagttcctctggaagacggtatgataaacgagggtcacccaactgtgaggccagaggaagggagactatcttcaggaagctgtgagcttttccttttgtatggagagtgttttgttggactaaagttgtagaaggcatttgacctctgttattgtatttagtgtttcaacctcagcatctgacccaaaataacacatatcttttcagtaacttgggacagagctgacaaaaggcagtcaaattcagaaggagtctcattgtaaaagaaggattataaactacacaaagagcaaaattagtagggaaactaccaccacaataataatgctgcagtgttttcagagctgatatgtgattgtgtttttcctgtcttgattgtttttaagtttggtctgaaaaatacgggtatcaaattaaaatttcataaactgctacgagtttctctccttccagagagaaaggatattcatttgatttgagaattgtcgttttggtttaattaacagttgtttgaaggatgttaaaaatcatcgtggtgaattggtttttatcctaacaattgcatgataattttagattactcttgaaatatgcctcaaaataaaaagttagatgtagtggtcctttctcatgtgccttgactattgtcagagaaagccctgggttatcagcctgtttagaagaagtgacctggtacgctttttgactcttggctctgaaatcttatcatcaggaggaccatgtggattttattcatttgacagatacttactgtgcacctattatgtgccaggccctgttatgcagaggacaagtagagtagaaaatagaactactaacacttgcaacacacacagtcaactcttttgttatagctcagtttaattaacagaaggaaaaactttgcgttggggaatacacataacacctggaaacgcagcgttggaacacccgatttgtctatgatgcttgcttactactcctattattctatatattacaaagcctgaatatgtaaatggcagttcaatggtcttttaggaaaaaaatttactggaaatatactaacaggaataacactaaggaattcaggagctacaagaattcttggagttctgttatttcaggtactttctttgaagtattaagtacatattatcagtaagttttgttgtgttcctattctacgtagatcatattatcagatagaatgtaaagatagattaagatgttcatgctgggccaagtgtggtgactcatgcctgtaatcccagcactttgggaggttgagatgggcggatcacttgaggtcaggagttcgaaaccagcctggccaacatggcaaaacaccgtctgtaataaaaatataaaaattagctgggtgtggtggcacattactataatcccagctacttgggaggctgaggcacgaaaatccgttgaaccctgggaggcagaggttgcaatgagccgagatcgtgccattgcacaccagcctaggtgacagagtgagactccgtctcaccaaaaaaaaaaaaaagatttttttcatgccctaaaagcttttacacctcctagttgagaggacaggatacacatacacacacacttccctacctgcctgcctgcctccaggaagcatatacgaaatgccaatcaactaggatgccttgtttagtgttaagaactagagaatgacgtggatagctgttctgattctacgttagtatttcttagcttctttcttaccctagtcatttcactattaggttggcaatagtaattccccatgtttaccccagcattaagcttgtgtatcttctatcagcccataccttataggtggcaagattaattttaaaagaatttcagacttaaaaaaagttgcaaactagtacaaggagtactagttgctatataatctttcttactttccccaaataatgtctcacataatcatagtgtgatgatcaaaactaggaaattaacagggacacaatactattaatcattgtcctgctgatgcccttttctgggtccgggatctagggccggttcctacattgcatttagttgttatgtctctccagtttcttctaatttggaacagtcagtctgtctttgttctttatgattttgataattttggggattactgaccagttatttcatagactttgattcaggctgggcatttttggcaagaatatcgtggaagtgatcttgtgtacatattagtgcattatcatcacatgcccatggtatctgcatgtctcgttactttgctaacttgatcacttggttaaggtggggcctgccagatgtctccacagtaaagctatgatttttctctttgtaattagtgtcttgtggggagatactttgcaactctgcaaatatcttgtttcacatcctacatttgctaattaattttagcgtttgttgatttcctggctgcatcaattatcactgtggtgtttgccaaatagtgatttttaaatttctgtcatcccgtcatatgagttagaattctgtgagggtgagctattccttctcctcttattatttattcagttatttatatctgtatggattcatggatatttggttatgggttacaatctcttcctatgattatttattatattgctcaaattgttccagatttggctattgtgaggtccttaaatttggcttgtaatgttcttttgacatgttccaatttttggaccaatttcttacttttggtaccataagatgttccaagcttatcttggatttttttttttcttttcctgctccagccctggaatcagtcatttttctaagaagctctagttcgccttattagagaaaggtatatagaaaccaaaatttggtgctagatgtgcttattgttcctaagatgtcagtacttctagccgttctcaacagatagagctaggaagtatatgtgtatacatatacatatgcacacgtttgtatctatatattaaaaaccttagggttcattctcactttcccccttatatgtaactcttttatctgaatgtgagaaacctggttgtcattatccacaatgtgtttacttatttgtgcaattctaagctacacacatagtagttttcagaatgctaacacataccccacgagaaatttgctaactagaatgtaacatttgtgtgcatttttttttgtttttagtgttagaatagagtactgttttctaaagttatttaggttcttctctacctactttgtgcttttgttcatttgtaatacattaggttctcttatttcattttgattaaaatcatgttggttttatttatttttaggtgatgtcaaatattgtcacagttctaagacttataaatacatgaaaagtatgctcagaaggtgtcatttcttcctcattctttctgactcattcctgtcctctttctgtagataatctcattacttcttggtttatccttcctgtatatatattttttacacacatcagcagatgcatactgtattttcttatttcctttttttatacttgaaaggtggtattttttgttgttgcacaaaaattgccacaaacttagtggcttaaaacaacacaaatgtattagctcatagtttctgtgggtcaggagtttggacatgggttagtcgggttttctgcttttctgctcagactcaccaggctgaaattcaggtgttggccagggtttcgatatcatctgaggcttgggagtccttttccaagctaactggttgttggcagaattccattgcttgcggtggttgcactgaagcccttatctccaagaagctgcccacatgacctctccctggtttgtctcttagtagtggctctgctgctttggatttttctaatattttctctagccctagactatctttaaagggtatacttcttaaggtcagacccacccaggataatcccctttcacctttgccatataatgtaacctaatcatgggagtgaagtcatgtcatactcataacctatctacagttaggaggagatgataatatatgacatgtgccccagaaagcaggaatcttggaggctatcttaaaattcaccttttaccatgtagcatactataggtagaattgcaagatagcctccaagtgcaaaaatttgaaaaagtattgttatattgtctatgctttttctccatgagatgtagagtttttgttcaatttattaaaaatactaattttggcagttagggtttgaatttctgttctagtgttatgtttgtattttaccattttttttaaaaaaatgcccacagccacaggtttcttatttaactttatattatctgggttgtcagtttttaaggatattcttgaacccttacctatttcctgtacaccaatccatgaactcagtcaaatttccagttttactcttccttcttctatttgtttaagtcgtattacttctatgttgtcacaacatataatattgtcacattgttctttcagctctgcatttcgatcttctggcagattttactgacgataatgtttttgtgtaacatatattgttgctgtcttatatcaggaatctctctaccaccaccctttttctttaaaaccttgagaatactgagatttgggagatcatcaaggaaaataaaactgaagacaaacaaatgtacttacctgaatgttcagagacctcaccattcatgtgcattattgaaaacatggcaaatggttcctacttcagaaagaggcagaattagtcccccttcaacttaattagtgaaggaatttggcatctttgtaaacataaagggcctatgtggttcatgtatctttctgtaaggcaataaccgtgaagggcaaaggggcccttagttaattataacttgagtaggatgggaggggtcaatggcattttaacgtagaagaaccaagtgttagtaaagagcttttcttctccgggagcttggtcagctatgttttctgtgaagcctgattggggagtcaaagtcccagtggaaaagtgttgatgagaaggcagattctagaggatcaatatttcgaacctccttttaagctcatccaacttcacagctaaaaagctgttgaggcttcagaaaaaggaaaggcacaaaggaatgaatgaatcagaatttgcctggatgtgatgttcctgatgatggtcaaaagtcctgagagttccagccttgaggcctggcttccctctctctgcaggcctcttgctggttgcttttggaggaagctgagtgtttgggttgttgtgattgctgctgttggggatttcatataacatagctctggaaggtcttgtactcatgactattagttattcaaggccacctaaaatctaaatcaaagaaatgactagacagaagtgaaaaaaagggcctgattcgtgaaacgatttcccaactttgtgataggtcactcaaggcttagtgtaggcttttttcaaggtaggtgtcttttaggactgaatcggttccaagctatatgagaaagcttgtgtgtgaataggtttctgctggcagatggttggcaggctcaaccatcagccttccagacttgggattctaacaaaattctattctgtggcacaagcctagaataagtatgatccatataaatacattcatttatgcacatattagcagtacactgagttcttgtttttgtgattttgatgatctggtgcttttggttttcctaatactggttcatggagaaataagttgtactgtgttggctaaaacccgactctggatgcactaaataattcttctgagtttctttctctttttcctctagcctggaggaagtctgtctgctttctcttttgcagtctggagatagagcattgacccctgaagcaatgctgggtttactttattagagctcacccgcagatgttaatgaaagcagaacagtgaattagtgctgacttcagagcagaacaacttgggtgggggaatctgtgaagagaacatgttgttataggcaacacccaggggaaaattgacaaatcacagtaagaatcattggatatttctgccccaccaagagagcaggagggtgagaactaaatcatcctctgaaatacacttagattaagaaatcagtctgatgttcatttcacaacattcatcagaaagaaaaacaggactgatcccaggcaaaatttattggtgggaaaaatgtcgtgttctatctcctcctcctctctgcttagccccccagcacctgattaattaaaactctgccatctaccggctcagaacgtttttcttagaagcacctgagattcgttcagctaaagaatcaacagctgtcaaccgcagcaaatagatcccctaccctctaccatatcccagtatcctaacaatgccttaaaatgagcatcaagccgggtgcgatggctcacgcctgtaatcctagcacttggaggtcgaggtcggtggatcacctgaggtcaggagttctagaccagcctggccaacatggcgaaaccctgtttctactaaaaatacaaaaattagctgggtgtggtggcgggtgcctgtaattctagctactcgggagactgaggcaggggaatcacttgaaccccagcgaggcagaggttgcagtgagccgagatcacaccacttcactccagcctgggtaaaacaaacaaaaaaaccaggcatcaaaactcggatgtctacaggagtcagttaggtctcttaaatttgtaaaatctgcctggatttgacacaaaagggagtggtggaaccttggcaagcctgtgagttaagtccctgaccgaggcaggcgccactcggctttagcccatactggcaaggcaggccggtgctgtgagggcttccaaattttcatgagaagatgaaaattttgattcttctatgaaatctttcacatttttcatgacggttttaaaagttttacaggcagtaaaaacaattctttgtgcccttatgccctgaaatcaaaccctgtgggccagtaattcccaaatagagtcctcaacctaatatgctttccttaaagctaaatgtatttaaggattatctctttattttgatatttttatccttgctatattgttgatgtaagaatgtaattgcttttctaaagtgactcggggatagggttagcttttacctgcattcagttgaacttgaaggatgaccttcccaaaagggaactcagaaaatgtatctgactcttctaaaagacatgtaacttaaaagcataattctttatgagctgatattgagagctcccaatgggttgatggaaatgctaatgaaggctctattcaattgttaagtttatcttcaatgagcagccagtacagaggctccaaaccaaactagccagcttgccctgatgctggaaagcaaaatcccccaggatgtccacggttttgggtgagagggtctcaggaatatttacacagaagggagcaaagagcctgattgtgttcctggctttaacaagtaaagatattctgtttccatctgtgtaaatttgcgtgacttttttttttttaattttgagtaattaattgccaagactccatttagaaggaagacgatgatgagaatgaatcttgtgaaagtccatactgtactgtttctctaatggggtcctgtgaaccccctgcgatttacatattggcagaaggtccagtgtacactttgaatgtgatccaaacgttctagttcatttaaatttcataagttatagtttccggaaggagaaactgtaactgcatggtagcaagtatggaaaggaacctagttttcactgttatgccctgtcatttaacagtagctttgagtagtttttaaatcaaaaacaagaaaatgttgatgccttaactttttaaccccttgttcttcgtgcgagtctatagggtaagttcttcttgtggaaaacacttgggttattttgggcgaggtggcgctaacagagttttgcttgaggatgtgcttatctgattctctcttcccattcaaatataggattgattgttttcatccttggagcacccactaggtacaaccctgttggaaaccttaatggtgaaagcagcgtctattcattgaattctttttaatgtgtcagaaactgtgctttgtgaaacacaggttataacatttatttttcacaatggtctatgagagaagaatataagagggatggtctccaagataggaaaaaataccgcctttgggccgggcgtggtggctcatgcctgtaattccagcactttgggaggccaaggtgggtggatcacctgaggtcaggagtctgagaccagcctggccaaaatggtgaaaccatgtctctactaaaaatacaaaaattagccaggtgtgatggcaggcatctgtagtgtcagctactcaggaggctgaggcacgagaattgcttgaacctgggaggcagagattgcagtgagtcaaggtcgtgccactgcactccagcctgggcaacagagcaagactccgactcaaaaaaacccagaaaacccaaaaacaacaaaataagtaccatctttatttcattgtgcggagagtgggagaggaaggtacagaagtatggtgggtttgcgagtttagtagcaggaaagggagcgagttcttgtataagggggtttatttccttcatgacatacaaggggtgaggctatattgagagaagggggtaaggagagggtatggaggttggaggttggaagagattgtaaatggttgaccagaagaaggtagatgttccctgggcagtgttgagggtagatgttttccgggcaagtgatagttggtgctctgtggttgactgatcttcctgttgcatggcactctctgcagtctcaggtgcttctgtatcaggagggacaaaatggtattaaagaggaattactcatgacactcgttcaagatggtaaggcagactttatttagtaccatcacgataggcgtagggaccactgcagtgggatttttgcagtgagggagagagattgagctcaattctgaacagagcatggacaaataggaatttatagccaaggagtggagtggaggtcagtggatggaaaattactaggaggaaacatcagggctataggagtgaagtaggggaagaaagggagagaattctggttaaagtgatcctgacctattataggattcttgttgaaggcaggccagggtgatcagataccatctggggaatgggagaggatgaggaacccaattaattagtgggggtgattagacatagagggtggggaattctggataaactgacttagagttcttgccaaaaccagattttataaggaagtgtatacacggatgtaggagaatgtaaaggagcctgactaaagtttggtcaagcaaaaaatctatatcactggtcagtgagtttgtctaggtttgggggtgtgttgggggctgtgctaaaaagacagctagaggagcaagaaacactggtgcaagatcaagaacattatttacctgggccatggattctaagttgggtaaggagggaactgcagaaaagagtgagctgatgggagttctttactaagggtcagacaaatttggggaaggtattgcagtggggaaaaaaattgttaggacaagagccaggatgttctctcacaactgcatttccacccttgcttcaggtgggggaactgtttacacattccacaatgaagaacaatcaagctgggcattgtagcacatgcttgtaacctctgcgctttgggaggccgaggcgggtgggtcacttgagatcaggagtttgagaccagcctggtcaacatgacaaaattccgttctctactaaaaatacaaaaattagccgggcgtggtggcacgcgcctgtagtcccagctacgcgggaggttggggcatgagaattgcttgaacatgggaggcggaggttgcagcaagccaagatcgtgccactgcactccagcctgtgcgacagagcgagactctggctcaacaataacaaaaaagaacaatcagtatgtcctttgctaagatgactcctacccacatgcagggaggcttttttttttttcttttcttcgagacggggtcttgctgtgtcgcccaggccaatctcggctcactgcaacctctgcctcctaggttcaagagattctcctgtctcagcctcctgagtagctgggattacaggcatgcaccaccacgaccggctaatttttttatttttcgtagagatggggtttcaccatgttggtcaggctggtctcgaattcctgacttcgtgatccgcctgcttcggcctcccaaagtgctgggattacaggcatgagccaccgcgctcagccgcagggaggcttcttaaaaacctgtttagtgtctctccatagccgcatctcattgtgtgtgtgtgttttaatatattcatgctcaaaattttgagaaatgagtaaatgggttgtttactgaatgtaagcttctatctcttatgcactgaggcacttgtttatcagtagacctaagaaattatgtacatacggatctcatctcagaggcttgtaagagatgtagattcctgggcccagatctcagaattcctgaatcattactgtcaggcgggggcttaggaatgtgcatatctgtgtattaatactctgaagacactcagagttctagaaggtgaatgctgtcattcatgttcatcttaggccttaaatgtagaaaatactgacgtgtaaggaaaagcaaaggtgaaaccagcaagttaattttgtcttgaaatgccatcacatttaaagcacagttcttcagaaatcaagttagagggatattgcatgatatttccctctgtttatctaaagttatttgtagtatttctgtcctgtgtatgttatgaaaagtcacacacgagtctgctcattctttgagagtctatatttactaagtcagaagatttttttttttaaaccctgaagcatgagagattttgtgagaaagaaaatctttgcaccttccatttttagagaaaggaatagtagagagtcaagtgtgaaaaccagccactgggtttcttgggaagaaaaaatatagtgttaatgagtaagaaatgttgttttgtatgaagaaagatattaaaatttatctaagggcaggttgagttacaaggaaaaaaatggatagaattagaaacaattccaactgtgactattttaaaatgaaatattaaatttgttacaattgaacaaaggagaatttagaattaatgaattgcttttcttgtaatattttctttactcatttcttcttatttctttaaataaggaaacccaagtcattacttggcttattattacaggttatcaacaacttagtaaaacgtgcatgaaatctgtaaggtacagagcctaattcgtcagtagctttggcagctagatgtgctgattcactgtctacccattgtgacttcagagtcacaggactgtgggttagaagaaggatactaagggtcatcgggctccagccggctccagccgtgtcttcgagtgtctgataatgagttatttaaaaaactgaaacccagaatcacacctctcgttcttgcttagctagtaatacaagcagacattcataccttgatttcttcaacatgtaattggcttgtaaatcagggcggccatataattgatcatccagattggagtacttttcgagtgaaagggggcattgttaataattatgccaggacagcaggcattttagatttgtactctatcacaaagctaagttctagcaaatggttttgaaaccgtgtttagtctgaaagatttctttagaagttacatgtgaaaaaaacttacctagattgaagtttatttgccaaggtaactagggtgctgcgtactatgtgatagcctggttacatggaacccctagggaaatatctcgtttttatgataaaaatttctttagttgaaaaatttgtgcatttatttctcaaatcaatgtccaactgttttaataatttctcatatgcagcttaagattaaaattcttcatagagggccttttattttagaatatggtctttccttggtatctatggaggactgattctgggaccccctccccatggataccaaaatcaatgaatgctcaagtccctgatagaatgtatttgcctaaaacctatgcatatcctcccttatactttaaatcatgtctagattacttataatacctgatatagtataaatgttatgtaaatagttgttatactatattgtttagcgaatagtggcaagaaagtctgtacatgttcagtacagatgcattttttttcaaatatttttgatccatggttggttgaatccacagatgtggaacccatggacacggaaaatgtactgtgctgcgggaaagtagtaatatcaggtgtgatgggggtggaggtagatagtatctagactagaggtttccaaactttttcagtcatagcatctttagtgtctcaaaaattttcatggtgcctcctagaccaaaagaaaaacctaaccattccatttattaagtacttaggtctaaacaactatttatgttctactaatttagtggctgtttgagaaaatattacatataaattgtgaggaaaaaactcattttattcttctaaaagcataattacttatcaatatgtgtgtagctatggggcactgcacagctttcacacgttgaattcagattgtgcacacacttcctttcctgttcagttttcattttctcttgttacttgcttttatcacagcaactgctaaaaaaacagtttcgcaaaggtaagatgttatggaaaggaaatgttgcgtgactcagggtagaaacttgaaccacctcaggctagtggcttgtgcggtctctgattttgagtcttgttgcttcctttggaaataatcccatagcttccattcatttcactgtagtgcttgggggtgccttggcactcaatttgagaaccacagatctagacatttctatttagttcattatttggctgttagctaaacatccattgtgtttatggcaccagaaatttttatgtctgtgtgtgagaagctctcaaagccattatgttaaagaaactaagatgctccagcactttacccctcccttctttgaattaggttgtatcatattctggtactgaatagctaaagtttattgaacacttatgtcaggcactgagcttgatgaaacactttgcatgtgttctctcattttctttttgattttcataacaatcctgctatataaagcttcttctatcaggctcctcctgaaatccgcttggagtagatactgtccttattttacagatgaggagactaaagttcaagtaatttaagtgatttgcctatgaacatcgagcaagtagtttcagttctgtgatataaacttaaattttcttattttacctgaagactagaatctttgtctgcagccacagcctcttctgtggacactgtgctaccgtccatgtgtctactactgttttgataggtactttttgtgtttcgtggtggtcctaacagggagatctttttgttctcattttcaaatagaaacaccgagactcagagaaatttagttacttgccagagtgaacagctagtaattggaatttgaacccaggtatgagtaattccaaaggttgtaattgtaatttattgtgatgaccagaagacgttttctaaaattctggagttatttcagagtcattaaagaaagattaagttacgataatatggcttttgtgttaatttgataaatcgtattcacttagaaatcatgcatggtatgtgtggcacctctctattaaacagtgtgcctgttgcccaaccatgtgcaataacagagaatatattgtgcttatcatttataaatatatgtatagaagagagagacaatgaatggacctatttgtcagtgggcagctgactgggatggaacactgcagcaacgctgaaacgacagacccccgagataggatggtgtgtggaggatcagattttaaaggcttgtttagggaggtgtgtaagtgctaagtagtttctcaagttgaaaattaggaatctcttgatcctgtcacttctctataaaacctaataatcaaacagggattcatttgcacttggagttgcatttccctctggaagaagacagatctaaatcagaggtatgcttcaagttggcaaacactttgggtgggaagcaacattaggtactggatgaagtgcgttgcattagccctgggctccttaggacttgaggtgtaatttgcagaaggatagattggttcatgtgagttagctatggttcatctcttgagtgatgggggcggagttgttatagaatgtaagaatgcaaagattgaatggtcaatgtggtattttggcattcttccaaatccttgtagctcttttggagaagcataacactgctttgtaggaaagagaaaagtgtttacatccagaacatattgagtgggtgtactgagttcagcagccagggtcgtgtcccccaggcctactgttgtggtttacccagctgagacgcacagagggtcaatacagtcagatttctgcatcctgccaccccccgcccattttcatctctgtcttgcatgcatgcttgctttttcctttttcttgcccacaaccaagtccagcacttaaaatggaatagtgcacactctagggcctgcttcccagaaattctttgtctgtaaatgtaggtgtgcgcccaccctggaaaatgctttcttcttattgccttgcttggtgcatgcagtgcacatgtcaccatgcttccttgttttaggctgaaaccagaccacacacttgggtagcactttacacctagaatgtaccactgtggtgtgagaatataaaaccaggcataactcaaatgacatggattttatttcacatgaacctttttatctccaaatagacaaacattgaaaaccttatgccccaacaagaaagaggtacttcttattgaggtatctaagggtacctgtttataatatgatttagttcagccatatttaataaataatctattatttaatgttatagttgttgtgcattgtatgtataaattctaaatttccatgtaccacacatcagaattaattttattatgggattttttttttttgctcaactcataactgttagatgtgtattgtgtatctgtccatgttctgagtattatagaaagcatccaaatatgccagagaactttccctctcattggataaaaagtgtacacatgtgaaatggcaaccaatacggtcacatttggtcccttgaacaagtgctattagagataatacaaagaaaaggtcaccccaaacatggtatatagaagactcaggtcttgggttgagatgtaagtttgatggagagaaggtgagtgggatggtaggagaggcaggtcaggtccaggcctggagtataagagaaggtatatctgtactctggaccttttttttttttttttttttttttttgagagagggtcttcctctgttgcccaggctggagtgcagtggcacaatcatgggtcaatgcagcctcgagctcatggctcaagtgatcctcctgccccagcctcctgagtagctgggactataagcacatgcagccacacctggccaattaaaaaagtttctctttgtagagatgggatctcactatgttgcccaggctggtctccaactcctgggcccaaatgatcctcccaccttagccttccaaagtactgggattataggcatgagccatgatgctcggcctatctggagcttttaaatatatatttttaactttacagagttgaagtaaactctgttagtatttgtataatatttaacaaccacgtacaaatagataatgactaaatttgacacttgcttttctgttcctaattacttatttgtttaaaaggagattaaagatcttggagcagaatgccttttgtttattgaaatgcagcttgtttggctgagcagaattctgttagacaataattatgcaccatctgaatacaagatactttattggggtactgtggctgtaaagaggactaacaaattatttttccttccagggacttggagttttgtaaggatagaaagagaagtcagtaaaatagaatgtgattggtggtcccctcaaaaagatcttgatgttgttgagttgctcttatgtcagttgttttgggaattcttctatttttatgacatcttaaggagtttagcagtttaaaaaattatgaaagtgttcccttagacattatgtgtgaattaacttgttgattgttggtgttgaccataaaaataccagcaacgttaaagtattactttaataccaggatgtcgtacacacagatgcaaacacttacttcatggtcttttccgctaccacgaggggtgagagccaaaagctaagtggcaggctaaaggagtgcaaagaaggagaaaactaagagcagaaaaattaatccacttgtcatacaccagaaggcctgccacgcaagactttccagctttcctgcctatcttggctgggcttgtctggagagacactgtgggtttctggaaatgagaccatcaagactgataaacacgtgttgtggtgaaaccttaagttgtctcagtgttactgtgtgtttggatagggcagaactttacttcagaacatggctccttcatgagttgatagttttatttttaatttttttggtaatttaatcttaggacatcataacttcaggtatctgagtctctgtttttaattcctttgtatatatacctcattgcagaaatgtagggtcctctgttgagtgtgtggtcaacattttcaggaaccaccacactgatttccatagtaggtgtaccattttatattcccaataacaataaacaaaggtaccagtttttccaaatccctgccaacacttattccgcccccaccttttgaaattactctttcacttttaaggaccctgtgattataactggttcccaccaaggtaatccaggataatcttcccatcgcaaggttcttaatcatatctgcaaatcacattttaatatgtaaggaaaattcacaggttcctgggatagagatgaggaaatctttgggggccattattctgcctatgacagcaagtctacctttgaagttgcagctgtttgcaaatgagaagccatgaatttgaggctataattttgatcatggttatggcaaaaatattcatttttaagacaaaagcataatctttctcttgttatttcagaagacgtgaccttagttgaacataaacttgaactcttttcctcctttggtgatccccatcataagattgaatagtatgaggctgtaacctgggccaagcttgagtatagaatccaggttcagtaatcgtttccagagtgactgctgtgaaagagaagagggagactagcgataatcttaatgtcctgagaagggaattacagatatgttgctgggaaagggctgggggagagtgaggccagggttccagggcagtgggacaggtgaaattatatactgcttcagatcagcaggtgatacagactgcagtctcatggctttcttgtggtagaatcttgatatctaatatgttacaatttgagtttggtatcttcagttatcaaattgagtttactcttcagatcttatcacatagaaagttgacattcaacagcagaataagaacactttctctggatttcgatgcattttggtctgtgccagcaagcctagtaccttaatatatttggcctcatgttgtctaatcattgcccatgaaggagttttctagcatctcaagtgtggcctcttgtgtaactccctcattcagcacacaaatgtgtggattcagacacagctcctggcacagcagttagcagacagtaggtgaagagttctttgaaatccagaacatgtcaagaatcgttagacagcagacctctaatgaaaatcagacatgaagtttgaaaaaaattgcatgagtgattctttccattattctctttgtgtttaaatgcaataggaatctgtattttaggggctggcactttggccagaggagggatgtgtggtttttccatctattagatgttgaatcactaagccaatgatatggggagtagtaggaagatgggctgcgggagagcttgtccttgactgctatagctgcacccttttgtcctgtggacaagattggctctcccacctagcttggtctgtattgatgataatctggccttgcaattaaataaataccataaacataaatatgtacatagtgagctccttttttaatgaactcctgtttatttgcatttaaaaaggatggcaacagtgtgactactttaaaacagtagataattcacatgagatttagggaattcatttttgtctgttaggttgtgttcactggtttaaaaaatggataattttctagaggttcataaattaacaaaatgggttgttttatgtggatggagcccaaaatcaaggaggaatgaagacagtggcaagtgctggcacttctgttctaagaaaactatagtcaggaaaagatggaggtgcattaaagtagcaaatttcaagtgttccaactactttacatgcgttatctgatttgatcttctgaaacttctgtatgtgtattcacacacgtgcacaaacaccctccaacatatgtaagtgatccttctttcatgttaaaagagaaataataagagacatgttggcctgagttctctttaacagcttcattgagatataatggatacagaaaaatggtatattttaaactgcataacctgatgtattgatatacagttttgtgttgcttaacaatggagacaggttctgagaaatacatcattaggcaatttcatcgttgtgtgaacaccacagagaaatgataaccacctagagacatgatcacgagagtcagactaattaatatatccatcatctctcaagttaccgtttcctccttttttagtgtgtgtggtgaggacttaagatttaccctcttagcgaatgttaactatacaatacagtattgttaactagagtcaccatgctgtacattagatcttcagaatttattcatcctgcctaactgaaacttgaccaacatctcttcatgtccccctgagcctgaagtctttgctctaccattggtaataaccagttctgtgaacttggacaaatgctttcacctttttagtctgttttggtcacctataaaagacagaacagaatgaatgtatcacaagcttctcttgtagctctgtactttttgattataaaaaagttatggaggagtcataagaaagcaagccttctaagaaaatagactgtacctaagattgtgattgagagattagaggtatgtctcattaccacagtttccccagaaaggacagctttctagtcagcttttatttccaagatgttactagattagggagagcctaatttctccctttgtgagcttcactggctacggcggtgatattagtaccctcaatgattcaataaaaataacagtgacaatgaaaaatgactgactggtgattcactttggggaactatttggctggctgcctgagacctgtgccaggaaagaagctgaatagattttagcagcatcctctaggctaggaagataataaaatttaggatgccaggtagttgtttggaccatgaatataggtcatggaaggaaatggattttaggtgaggggaattgatgggcaggccatgtgctgaatttgcagccaccctgctgaggccctcagctgttgtaattttcaagtgaactcaggagaattggtacattactcagttccaagtgacttaatttgatgtcccaataatggtataaggaaaaatgtcaatgtaggaagagttaacagagcaggaggaatcatttacctcatttgatttgaagaccccttgaagacttttcctagatatttctttggccgatgacttctcactgccatagagtaagtttgaaattatctggtttgatgtccacatgaacttggtctcacgctacccactccttacctcctggtttattctgtgtgatgcacagctctttgccttctcctgtgttcatgcctttgttcatatctttccttttacctaaaataatgaggataatatgaataatatcatttaacatactgagtactttccgtgtacttacttttgtactattttatagtaatcctcccatatccgtgggggatacttgtcaagaccctcagtggatatctggaaccttaaatagtactgaaactaatatatactattgtttttcctacatatacatacctatgataaagtttaatttataaattgggcacagtgagaaattagcaataagtaatcataaaatagaactattgtaacaatatactataataaaagtttatgtgaatgtgttctctctctctctcacaaaatatcttattgttctccacgaacctattttggggccatggttgaactcagggaactgaaatagcgaaataacagaaagcaaaatcatagatgtgggtgaggctactgtacatacattatcgaatttaattttgcccaaactctatgatgcaggtagtaacattaccaccatcctcatcaccctcatgatgcttatcactaccatggtgatcatttccatgtcacaagtgaggaagctgagatttagtataaataacttagctgagatgacactctaaatgagtggtagtcatgattgcagcccaggtggcccatctccaaagcccacacattagaaaccatattgtgtcatttaatgccattctttaccatcctccccacacatccaggctcaatgcatagtattttctactttccgtagcaaaaagtaatggctccttctctgaggttctgtcggattatttgacatgctccgttttatatttgtgtattcatcttctttccttctgcttcattgatgccttgtcaaagcctgagtttaccatgtatttgtatcctcaccttgatttgttatttggcagagtttattaagtatatattgatttgacactgtaccttgctatctgtattcagcccagtcagttttttggctccagtttatatttttcaacatcttaaaatacttcaattaaaatgccagtatcttatatgaaaatattaatatcatgcatttccaccttcacttttcgtgctaatgactgtgtctggttatttaagtggaattgtgagattgcttagttcaaataagtcatattttagaaacattgtagtttaaatgtcatggaagggggatgatcatacagacctctattctgagtcctggctttgccacctacctcatgcatggaggaattacttaacctccttgtcctccgatttccttctctgttaaatagaaaagataataactacttgtcaggattataagacagactaaattggataatgcatgcaaagagcctaagtgcctgagacataccagtccgtcaataaatggtacatcttgttgtttttgacccttgatttcgattcttcagttttgaattacatttactggctttttcgactgtggggtgtttactaatttcatttgctttaggattcaaatagtgtggtttaagatcacccgtaattagtagagtcaggattagaatctagctagtctaattccagagcccaactagcaaaaactaataaatgagtaaatccttgcttgcaccgtctcattagaattcattgtgctacccagccatccagttgaaatccatcccatttccttttttgtagcgacaagtaatggctccggggaagggaacatggggagttgttgtttgatgggtacagagtttgttttgcaaaatggaaaagttctagagatccgttgcacaataatattaatatagttataaacactacttaaagtataaacttaaaaatggttatgaggtaaattttatattatgttttctaccataactgaaaaattttttaaagtaatgactccttcttttgagttcctgtaaacctctgtatctctattatttaagagctctaaaagattgtctaagccatttcttttgtgacatgattttccctgcttccataagaagcactacttgcaaagtccatgttttttctctctaagcaagtggttatatagtagaagagttcctgttataaaatctggtgactgaatgcttgtgagttttaatttagagattacaaggacaaagatatattacataaggtgtatttcatactgttcaatttccctcctgtgtgtctccatatcactgtgggtttctaagtatgagccttgagaatatttgggtaaaagaaggattttacaagtttgcattaataccatgaaaccaggtcaggagctgatatcagaaaactctgttttgctaccacataggtctatttggttgtgaatgatttgggcaccatcattctgttctgtgttgtgtatgataatctgtgggtataacttgagatgtataggctaccatagattcttcttcaccataattactttctttataaagtactcaggaattttgggatattctatttttctttattttctagttataatttctattttcaaaaggttctgagatggaaaacacatttaaaagcaaattaagattgtacaattatggataaaaaccaaagtagagaccatacatgtaactaccacttggaatagataccaatctgaattaactggcactgaaacaaagttcagattcatggtttcatggtttattgtatgtggcagaagacgctcatttttcttttcaggaaaatattgctagaattgaagatttttttcccccgtgagttttttttggaaaataataagcaacagatattatcatggaatgatgttttacaagaaactgaaatactgttcagtgtgtagacattgttaatagctataatataaatcctaattcattaaggatatttgcaggctgggcagtatggctgattttgtttgctcttcagtattcaacaacctgcttaatgcctaccgtttgccatactgtgccatacgttgatggttaagaagaacatcaaaaattgttcttgaagcactcagtccagtgggaaatttaggtaagcatacagattgttagggtacagtgtactaggtgttatattagagacatgtaaacagtgctgttagagcccaatgagagggtatgtcttcctggagtagtggggggaaggttctaatgataaatgacatttgaattgattcttacagtttgccaggttgagagtggaaagaaaggaacaattttacagaaataatactcttggatgatctaatttattttagctaggaacttgtacaatctagaaaaacaataattaacatccactgaacttttcaattcaaatatcatatgtcttccatcgacctttggcgatacttgcaggcagttacttggtgattaagttgtctcagatgcctacagtgcggacattctggtatatggttaaagcccaggaaatatgttggatggaacaatggatgaaaagaatgaaaggagagccctatgtcacagatgtcactaagagtgggtgaggtagagttgtcaccgtgttaggaagactcggaaattgattgatattttcagccaaatagatgagcagtccatttttataaaggcagcaaagggacctggagatagagccaatattttcctcacacagtaacttggactcatgaattacctgctcaaacatttagcttggactccagagtcttgccctgaacagcacaagaggaatgagttcactcgaaagaagtttaaaggcagttattaccagctaatcacaacatccctgaactttaaccagacctctgtagagtgtctgattttaaatagaactgcttcctcatggtccttatggaattattaagctgtacaatgtatgtctgagtagctcagaggcttggctcatggaaggggttattttagatgcttggtgaatgattacccagtggagctttagtttggatgtattgatgttgcactgctacttctgacaataactaatcatgctcaaaaagacttcttaagtctcttcttgttcagagattcagacctttcttttgacctccagaatcatgtatctacctgcccacttgagtgctctcttggttatctcatagctatctcaggcctaaacagggtcatttataaatcttattcttcaccaactcctccagatttattttgccttttgttacgtgcccctcttattaactgtaccccattcacttagtgactcaagctggaaacaaggtacaaatcctccccagcccttaagtctaaccagtcagtttcacttaatatttctgacatttgtccacctttcttcattcaacgtgccatcgaccccatctaagctgccatcattcacttgaactgcttagtcctggcctcctactggctctctgcttttgctgtttctaatctgttctcctcatagcacctattgttatctttgaaaaacaacgtcattatgttatttatctgcttaaaagccttcaatggcttcccgtggcacttcagataaaatatattgaccctggtctgcatgtctaggcatgatatggctttgactcacatttccaacttcatctttttctcattccttctcttttactttctctctggctgttctgacttttttcagctccttaaatgtggaaagctaattcctgcctttgaggcttcccttgttcactgtgcccagtgtgctttcgtccgccctctgcctggccaatccttctcatttattgggactcatttgttactttttcctgagaggtttttccagactgtctaatctaagactaccctctgataacctttctcaagccttaccagagtttaaaaagctttgtttgtttcatatgtgtctccccaccataacacagtgctctctgggcatcgcgtctgtttggattcccaccgtgccacccagcatgttgcacagggcttgtacaggggcagtgctccataaacatttgttgaacgaaagactctttaatcaaaataagagttagtctggaaggggcatcttgcctttctctttgcagaaaacgacagagcctgtgtgtaattcctgtggcgatgtttgccaagtgcttccacgggaatgtctagtagagtactaatagaaggtcataagctattgccgttttgctctcctgcaaaaaaagcttggtggcatattcagaatttatccttgggagcctaacagactaagtttaggtcctgtctttgttcctgtaaagctgtgcaaccttgagcaagttaaccaaattctcccgggtctatttccctatgttaaatggagaagattatgtctatcccacatgcttattatgagtattaactgagattacatatgcaaagtgttgaatggagtacttggcaccttgtaggagttcaggcattctttttcttattccctttatatctcgagattagtgaggactcaagaggaaaagaactcatttaatttataatcttattgttcttacttaatgcataattatagctggggtgctaacatgaaggtcaacaccagtttaagaggaaaacctccttctctggagtgcaaataagcaatgatggactgaccatttaccagtaaataacattagacttcctcagaaagatacacatgaaattctcctttgccttatcccaggagtttttttttaacattgtcaaattgtaataactaataattacaaatagactttttccattgtagttcaagtagatattccatgaagacaggccatatgaaaacattttcccatattagatgtttctatatctaagaagctttggcagtaccattgaaaactctttataaagtccaaagctcttcaaagtaattgtcagctttgagggggggtgattaaaatattaaatattttaggccaggcatggtggctcacgcctgtaatccccgcactttgggaggccgaggcgggcggatcatccaggggtcaggagttcaagaccagcctggccaacatggtgaaaccccgtctctattaagaatacaaaaattagccagacatggtggcaagctcctgtaatcccagctacttaggaggctgaggcaggacaattgcttgaacccaggaagcggaggttgcagtgagccgagatcgtgctattgtactacagcctgggcaacaggagtgaaaccccatctcaaaaaaaaaaaaaaattaaattaaatattttaaagacaggttattgtaaaatctgatggattagactcaaataggtggcagatatacttaaggcataccaatctagatgttagattgagtttaagggaaaatgcttggtttaatttatcataatcagtggttgattttctatcattaagtcaggacagcatactcacctttgcctctgttaaacttgtttcaccctataacacaagacaataaccatgaccaggggaattgtttctccctaagccaagtccttcagagagctaggagcttgagtattaaaagttcaagacctttgcatttgtctgcttgaatattgacccagataagggactacattgtttatttaggaataggtgtgacttagagtgctgatgccaggggatagacaggatgataaataggtataatactttaattgactacttagctcagttgtttagcacatgagaactttggggaggccaaaagaatagatctgaattctttctgaggctctcttactctgccatggtcttttgccaaagacctcactttgcatccaaacctagtatcttaaaaatgtgtatgattggtcatttgggacattagattcatgacatgtgaaagtacctgggaaaaaatccatgaccagcactacagaaggtgtgctgtgttaagaggagggtttatacgagtgctgatgtctggacatctcttttgcctcatgattaatttcctactgcaaactcaccttcataaaccaatatagctcaactgagaattgtggttattaatgttgacataaatgttaacatatgtcctcaaggaatactgtcatctcacagaggggacaaaaaatagttgcattgttgtcttttttttttttaattcttttcctcatagttgtttatcaaagtgagtataatttgaatctatcagtgattctgatcattgtgttctcttttggtgttttctgttttgtgtctggtggggctacagtgctttacaaagaaattggataccttgtgacctttttgttgagtagaaagggagtctgccaaagcgacaaggcatcacctttgctaaaatgcaagtctgattgttcaaagcagatcatctcacatgtcccaccatagaacttcagaatttcccgcctctcatctaaccgatttgatgtttaagtgacttctgtgggtgttttggtttaatcagatactaggaattgagagaaagtcatgaaaaaaccatagtggtattatttggtctgcctgcaagttaccaatttggaagcctgctgtggaatgtgacatcttttctctctttattttttttaaacagaatgctatgaacctacctcctgacaaagccaggttactgcggcagtatgataatgagaaaaaatgggaactgatttgtgatcaggtaagaaacagtgacactttcttttatgaaaaaagtaatgaaagaagagatccagtgtgaattttatggtatgtcaatatcatgattgaaaaacaagatatttgcttctgcgacagagataggaaaaaagaagagaacttcagagaaataacaatatgtttgtgtggatcttctttggatcccagtttgaacaagctaattattaaaaagacttcttgagaaaattgggaatatttgattagtgactgagatgcttccaagaaattattgttgattttgtttgatcgtaaagtacatagaataatactgggcacatagtaggtgcctctaaacttgtgtggctgcctctgttgctgctgaagggcccagatattaaatattgtgactgttactgtttttattttcaacttgtccttaaaagattcagagaaagttatatcaagttgatatggtttggctgtgtccccactcaaatctcatcttgaattcccacatgttatgagaggaacccggtgggaggtaattgaattatgggggcaggtctttcctatgctgttcttgtggtagtgagtaagtctcatgagatctgatggttatcataagggggcgtttccctgcacaaactctttgctcttttctgcctccatatgagacatgcctttcaccttccgccatgattgtgaggcttccccagccacatggaactgtgagttctccattaaatatctttcctttgaaaattgcccagtctcaggtatgtctttatcagcagtgcaaaaacagactaatagacaaatatatcattatctgttatccaaacatactttatggtttgaatagctgttatatgatgctgtcagaaaaagcctcagctatagatttccagtctaaaaatattactaccaaccttatttgtgaagccttaaaattatgactgtggggtggtgttgatatccaacatacaggacacccccgggccccaatgccgtgtgcacgcaaatattaatacaaatattaattttacttcttggatacaaatattaattttacttaagcatatagcatggatatagtatatgttatttaggatacatgttaacaggaaaggtacacaaagtgatagataatgttaaagaaattgatttccaaaagaaactatataaataagagtgtgaggacttatggagaaattatttcaggtttcagtttcatgaaaaattaccatatggacatggtgaatcatggaactggtcattgttttccttggctgctaagatgctcagagacagatttgtggcctgagccacaaatttggtataaatgcttataagagaccatttataccaactacacagtacttcaatgacatgtgttttaccaacctcatccatggcttcatctcattattcctgcctgcattttccctccacactgatatcctcactgaaaaaaacttacatgaagttgtaaacttttgtaaattatcattttgaacaagatatatttaaatatatcagcattactggtgaacaaagattattcttgcattgataactaaactgaaatgttctctatgctataggcattgtacaaattagtgcattgaatctgttctgcttctctctaaggaagcaaatatggagtgtcacaataaatgctttctcatgacttgactttatcatgaagtggccgttcattatttaatttggggcatccattttttcatacttctgtatgattgcattagtctatcactttgttttgtaagtatttatttaagtgtgtctccctcaagagtaagttcctttaggatatgggcctctaacaacttgcttagtgcttgaaacgtgcttattgaaaacatgttgaatgaaagaaataatggctaatatggaagacagtggagaggaagcttgcattattggcagagagggcagaagggaaaaagcagttgaaagaggtggcctggaagactaagcagaagtttgctgtttccatatccttctcaccttcctctacctgtcagtgtggtttgcttttggtaaaggaaagcaattcactgctcatttttaggaattactttaaagagagaaggataacatttttaaatgtaataattcagtggtactaaatacattcatgttgaagataaatatttcttaatatgacagatgctgataggaatagagaataaattccagaaattctgtcccaaatttaaccaaattaagattaaatcccaaagagctttctatagtaacaatattgcagaaatgcctcttggtcctttcctgactcattgcataaatacaaagatgacctgagcttctagtgggtctcaaaggtgaaagtaacatgggagacgtgtctaactaattctggagggagtggggctacggaagccacggaacagagacatctgtgctggattttgggtgcagtgaggtgtatcccagcgtacccatttctgtgttatagtaggtgaacagagttcccatgaagacattattaatttaaggactctgtggggacacagaggcaaattttgtagtgtgagcgtagaaagctagaaatgtcaggtttctttgataactgcaaataaaacccctgaagctacttagctgtaagagctctttcagtggcatttacacttatggaaagagagaaagccccttaatctcacttgtgcctcagtttttggtgcagaccctgtgctgcacgttttggttttggagctttggccatttcccgtaagtttagaactcttagcacagtgggtactgtggataaatgctggtttagggggtttagagatcctggatgaatttagacttttagatcatttatatctagaagggctgttagagaccatttatcccaagccactctgactttactttttctattgaaaaagttaacacatgcttgtccaagaaagcttgtggaggagcatgtggagtgaagtgcgcgtcccttcgcctttcctatctgtttcccaagccccttattttatagatgatgaaactgaggttcatagagcctaaatgagtaggccaatgccaaggtcacccagatagtgaaacgagaacatctgtttccaaactctactcacaagctttttcatttgttgcctgttataccagggatctggaaacaagccattgaagcaaaaattatagtaggtaagggtttcttaccgaagttttgtgtgtggctgctcaaatgatttagggggtgcctacagaacttacaggttgtggattcataactgtgcccctgctggatgatcaagtggaagtggttagtcaaagaattcaggacattggagatgactaatgcagatgggtgtagattccaccaacatataatccagtccagaagctgttagaggtgccatccctatgctgggttataaaagcttccttctgtgtttgctgttgctgagggtgtgattggttattttctgtggtgatttggcatgagtggaccttgcctcctgatagctggctgttgctttgcatagtagccttggggcaagggcccaacggaagggtgagacatggaaaatctcccctttctttacttatataaagcgatggagagaagcagattaaaaaacaaaacaaaagatgagcgtgaagaggtagcaggaaattgtagccacttagactcagcttcctgtgcgaagcgtttcagggaggtcagactgcatctctccaggcttggcatgggtcctgatctagggaaggggaagccctctgctgccactcagccggagcagagtcaggccagtggcactaagaagcctcattactctcattgtgagaggtgatctcttgtctttttcaacacagctgacccataccatatacatgtatttaatcattaagaatataattttttttaaaccctttacttgtggtcaaatactatttctttaaaaaagaagggcaggttttttactggagaacgtgcatcaatatttaagccaatttgccattggaattaaattttctaaaacattaaagagcaaatatatctccatggtttttagtgttggttattttttttgaaagtgttcatgtttttgtgagccagttaaagctctttcctgcctagtaaacaagtactacagaatcctgataaattagttcctgtgggccattccaggtaaggaggacttgtccttggagcaccaggggtgctaaatgagtagtgacagtggtggcatttttatagcctattttgatgttggtggctgctatgttagagtcatttgagcaagcataggaagagcagagacagtggtgaagaagctgaaggaaaagatggtgatgccagcaataacctttccctggccctttccctcctttttgctcctagacttcagacttagtctgccttttagccctgtttcccaagttccaggctttgattctacatttagctatgctcactcctttctggcttctcactcccagctgttgggatagcagacagccatttctccctctccttctcctcccttccttctatcctctggctaactgacatgcttcctgtacttaatatgttaaattggttatatttttatcaagtttacaatactgtggtatgattaaatgctattttaaaattattaggtttttgcgatctgtttaattcttttcaaattttgtcttttgacccttagttttctcttatcattttgatatccagtcttccccctctatacattcattcttttgattgtgcattagtcagattttttgtttggtatttgttttctagttcatcttttttttaaaaaaatcggtatgcaccttataaaatttttctcttgtattcaaataaggtcatcacaattaaaacgaatagtaatttcttaatatctcctgttgtccagtttattgttctcaattttccttaagatgttcttcctatctagtttgctcaaatgataatctggtacaggatcagtcacatattgtatctggccatgtattccttaaattactttaaactggagtagacttttgtttatgatgctcatgtggtgaatatagtaggcaagccctcttgtagaaagttttgttttctgcacttacctgtttcctaggggtgccttagctcctgagtttcctgttaactagaagttagacttgaagtcattacagattgatgttgaacatctttgtgaagaatatcatagaaaaataatgtctggttgtcccatcattaaataagtttggccagtgacaacttgatggccccattgtgtaactgttttccccttgtgctggagagaattctgtttggtgtcactttgtcaccatatatacgtccagttacctatcaaccttgtacctaatgggtttgaaaccaattgataatcttttgttgaatcagtttcattacaaactggaaaaagattattttctaatctctctttccttctattaatacagtaaactagtaactagagctttcaactgggacttggtttatcctggaatataattattcctggaatttttcccctcaattgccatttttttaagtaagaatttggattaatagatacctcataagatgaccagtgggttttctgtggtctccttttttgaatatcactacgaactcatgaattttcatgggttcatcatgtttcaatcaatgtgatattatttttgaggctcatatgatcacttctttgatctatgggaatcccttggtgctggttcttgtgtccttttcacatgaccctcttaatccttgagagcttgttttatggtatgaaacatatcttctttgtatcttaacttgtatcttctttgcccaggcccaggataaatcatttctccaatgatcccttttctttttagtgggaggtagtattagagatgaggaagtgcatgcaaaaggtttttatagctgctgagtgaatttgcttctcagtgtaagtttctagaccttgaaaatacaggtccagaatttatggattcaatattttcaaatcaattttcattaattttcttaatctctttgattttatagttacctttcttttacaatgaaatgtttgattcctaacagtaatataattatttacctttttctatcatataaaaactttcaaaacaaatatgagtatcattactacctaaaacattactaagtaaattactgactgtagtataaggttttttgtagttttctgtgcaccaaatgatagggtaacgaatagatgctatcttagcgtcctacggctgccataacaaattactgcacatttggtggcttacaataacagaaatgtgttctctcatagacctggagaccagaagtctgaaatcaggctgttgactgggccttgttccctcccaaggccctaaaggagatttcttcctttcctctctttccttctggtgtctctgggcattctttggcttgtggctgtgtaaatccaatctctgcctccatccttacctggccttctcctcgtctctgtgtcttttcttgtcttttataagaacagttactggatttagggcctacatggataatctgagatgatcacatcttgagatccttaacttcatggcatctgcaaacacccttttttccacaaatggttatactcactggtggttgggggaggaggttaggacatggccatatcttttgggggccaccattcaacccactacagacactaagatgtataatgattcacatagtaaggttttaatttacataatcaggttggatattgttggccattgggggtcaaattctacacaatcagggacccaggtgaggctattttcaacacacagcttccccttcaccctgggagtcatctctttccagtcaaagggagaaagaacatgcaaatgcacacctgggaagtctgtgggccaggcctggaattggcacatatcacctgcactcttacttgttgacaaggacctgcaaaaaaggatgagaaacggagactagctgagcacccacggggagaagaaaatgtttgttaaacaacgactgctagtctctgccacgattaccaattttgatagtcttatagttcatttgttttaggttgtattcagtattaaaacttgcccttatgtattcattaatttattcattgactaggcatttagttttataggtgagggaaaggaaagagtgaggtgagacatggagtgtggatctgagttttccttataagtcaaggaaaaggctccaaatggttggtagtaccaatttgtttgtcccgagttccagcaatgtaccagacaagaattggctgtgggacgaggttatttttcccacacctcagaagaaaaagaaaggcattttgtatctttgctactttctgcttgagatttcgaagggactcttcattttcttgagctctccaaacctgagaaaaggcactgaattaattgctgttgaaaagaagtcaagtttcttttcatttccttcctaaaagcagtttcctttcctttaagactcactccaggtctctgattctttgattctgaaacactggaaaagcaatcaaatagcagatgccaactctttgtatgttgagcttttggagttttggaaagttgggtctgaacctagaagtgaatttacattacgtctttcctcttctagaggtttcctttggcctatagctttcacatgggagagaaaaatgctggcctaccctacagagattggagtcaggggagagaaaaagggagaaaggtagtgaaaagaggagaggaaacaattatcccttttaaaaccatcctttttggtggcttgatagaaatactctgtcagaaatgctgtttggtattcgttgccagagctagacatcaagggcttagtctcgtttgaaatgtttaggctttagaaggagcaagataagtggggaaggaaaaaaaagaaaagaaacttttaggctgtattttgccaaaatgtatatcacagtgcctgccttcctgcctagcaatacaaatggaattatagatcccccactcccaccccaccttttaaaaatgacttaattgcctgagctggcttagactacgtggttgtcttgtttaaagtaaagtttatcatatgaatgacttttataaacttgaggacactgaggttgatctttgactatcttttagaaaatcattgctaagcaaattaaaatgatttattaaggcaggttagctaagaatttctaccaagtgatacagatactaccttatgtcattttaacatttgactatttaactcatactctttgtttgtagaaggctgttgttgctcacctttcacacacaaacacacacacacacagtcaaagggctttctagaagttgtacagcaagtgcttgagctgaaactaaaactgaagtctactgatgcctgattctgaaaaattttatgtttaaaaaagttttttgagaaaaccaccatacaattgtagcttctccaccatcaagcaattaaataattaacttcaccttgtgaagcgtgatgtgctagatgctaagaccaccacgcttcagaaaatattatgctgaatgtttcaaaacaaggttgaaaaaagatacatacacttaaaagtaaactgtaaaagactaaatatataatggaatgctcttagcccagatacatactgtttcctggttgcctacagtgttcttgatgaactttcaaggaaagaaagagtttaaaagaagtcattttctaaagtcattgaggaaattgaggtgtctacagtctttatccctgctgcagtagtaaaacaacatttatttaggtagcagaaatacaaggtaagttggtttaaatttctaatgatactgtaggtatttgggagtacagcaagactggaggaaaactaattagaaatatggtttgggttttgtaagaaacagctatacatagggcagagactgtgtatatcctccgtcaacatggcggatactagctgtggatgagtccaaggcttgtagcagcatcttcaggtactagaaatatccttatacagatgtttcttaccggtaaaaccactgttggttctcttcacaatcaattggaccacagccacttagttattgatatatgtacccatattttcagatagagtataacttcaagtcagtctaaaaccctataagatgagcacatctaacaggttaggtgtgtgcttatatatttttgtcctcagcaatgacccatttagagggacctcctttctactttccttctctgcctatccttagatcctatttgaaagtttggcttaatgattgattttgaccatgtgggtcacagattgaaactattgtttgcttaatcatgggatctgaagatgaaaagaaagaatgtggggctaatttgaaggggtgtttgtgtttattatgctaaatgtaaaatcaagatgtaagatctttttttttttcttgagacagagtgtcggtctgtcacccaggctggagtacagtggcacgatgtcggatcattgcaacctccccctcccaggttcaagtgattctcctgcctcctgcctcccgagtagctgggactacagccgcctgacaccacgcccagctaatttttgtatatttagtaaagacagggtttcaccatgttggccaggctgcttttgaactcctgacctcaagtgatcccagagtgctgggattacaggcgtgaactactgtacccagcctaagatataagatctaaggggaaggcatacagtgggatcactggagcctgggtttaagatgtaggtcttcatgttattagcacatgttgctttagtttttatgttttagaaggagaatatttatatatctaggagaatgggatgtggtttaggggtgagggtgaggtacagaagttggatcaagctagtgaattaagcaaatatgaaatgacagtgaagtcgtattaatggtttgtggtatggaggtacatttttagcctgactaaaaaattgtggtgcaattaccataatttttaattctttaaatagaattatgaatgatatgtttttgaaatagtaaaactaaggtttataggatcccttggagtactttatttcctgcaaaagtattaattgacaaagatgaatatttggcttgtctctggtgcatttcttcttcattagggcaagataaactttttcaagagagttgtgctcagtaacaaagtaaataaataatatctaaaattactttgatatactgtttttaattatttttattgaggtctaatttatatacaataatgttcaccagttgtgttttccaaagtggctagaccattttgcattcctaccagcgatgtaatagcgtccctgttgctccaaatccaatcaacccttggtattgtcagtccgttaaaattctagccatttttatgggcatatggcagtatcttactgtggttttaatttgcatttccctaatgactaatgatgttgagcatctttttatgtgcctgtttgacatttgtatatctttgttgaaggatctgctctgttcaaatcttttgcctattttaattttttttcttattttttttttttttgagatggagtcttactcttttgcccaggctggagtggagtggcatgatcttggctcattgcaacctccgtttcctgggttcaagcgattctcctgcctcagtctcccgagtagctgggattacaggcatgcaccaccatgcccagctaattttcgtatttttagtagagacagggtttcaccacgttggccaggctggtctcaaactcctgacctcaagtgatccacccgccttggcctcccaaagagctgggattacaggtgtgagccactgcgcctggcctcttttgcctatttttaaaaagtgggttatttgtcttagtgagctgcagaagttttaaacaatattctggatacaagtctttatcaaacagatactttgcaaatatttcattagtttttgtctcactttttagtatttataatagtattttctgaagaacaaaagtttttctgattaaattgaatttattttttaagtggctcttgcattttgtttcctaagaaattttttgtctaccttcaggtcacagagattatctcttatgttttcttctggaaattttacagttttggttcttatgttttagtctataatctattttgatatgtgggatgagttaagggtggagttgtactttttcctcatctgtctatctatcatctgtctgtctatccatccatccatgtatgcttctgtatttatctaactttacctccaactgtttcagcacaatttatttaatagactgctctttttttcatgaactaccttggtatctttgaaaaccaattggccataaacgtgtgggtctatttttgtgttctctattctgttctactcatctatatttttatccttacgccaatatgtctctggtttgattactgtcttgaaatcaggtagtgtcaattctccaactttttttttttttttttttttgctaaattattttggctattctagttcctttgcattttaatataaattttagaatcagcttgtcagtttctaagaaaaaaaaaccttccaggagtttggcagaagatgcactggctctgtagatcaatttcagtagaattgacatttatacaatattgactcttctgatctatgaacatggtactctattgatttaggtgtttttaatatcttgcaggaattttttgacatttctagtagtatacaggtcttacacatattttaaatttatctctaaatgtcatgattttgggtgctattttaagggatatatttttaaaatgtttccaattttttgttcctagaggaatattgtttttgaacaacctcccaccacttcatttatgcctttgtagagagagatggtttatgttatatcatcgtacttaccaaaacccagttttataattaaacactattttatggcttctgtaatagaaacaactgccttggataaaagttgaagttgagtgttttgagcttggttcttatgtttaaatctgtgcctaaattaaataaaagcaagtggtaagggtaggatgattaagatctgatgaatttctcttattttcaattattatgttcacaagcatgctttctttgcatgtatcagacccttcgcaccacttattgattttagtggaaagcagcttctttagctcctcccatgctacttgctttaaagtttcactgacaataaaaccgcctcagtgaatattccagttcagtttgattcagctagcacctattgaagttatgataattatacccacaatttgtacactgtttgaattgaggccaatggagtttcagataagccaattaatttaactgtagtcagaaaagcaattcttaaaatcggagcttgtaatttaaaaaaattcttgagtaattgaaaatattagtgctcttgaattgcctaatggtttctacaagaactcttaaggcttattttgtcttttttttttttttttttcctgatcagattttgaactctgttctctcccaacccctaatgttttatttgtatgatacatgaccatctctggggactctgaaagatcatctgtactttctttttgtttgaaaggcattcctaagtaagaggagtaggattaaagaaacctactcaatattacgtattagaaaatgagttataggatgttttggtcaggaaagactcattgaactagaataaattctcgctagtctaaataaaagaaagcatttggaaaagtctcatcagaggttattttcagtctgagagctgtaatggaacacttggaaagttgtcctttcctcttcaactagcaaaatgatttcatattcagagctgaagaatgttttgaggctctccaagaaactatggctgtggaatgaatctgtcgtgctgattttcaagtccagtctagcgcagaaatggccaactttaaaagttgggaacggaggaaagaggtacacagtattaatcatgcacgttttcactattcaagactccttgttgtctgtcctgtattcctaacctattatttgacatccactgtcgtttgttctgacttaccatttagatcctttgtgcaattttcataaactggattactagaactcagctaaacctcttgaagttactaccacatatccctcctttctctgcttttgttcccatgttcctgatctggaaaactcctctgtctcctgcctcttatactgtcccaggatatctgtgcactgcctgccttccaaaattcaattcaaaagccactttctccagggaggttcctttgatcatctcagttgggaagagcctcacctttctttgaactttgagaggatcacatatggctcttatcatattctactttgtattacaactatgtctgttgcatctcagagatgagatttaatactttgcaattgaatttatttctttttgtgctttttacagtgtcttctgtaatgtgttctggataggtgaaagagtaaaaagccttttttaaagttttcgtgttagtgcctggaaacaggggatccaaacatgttagtaagatttaaaatgttcagaggcaggggcttgtttagcaagatgttttcatccaataatgaccactgggatccctctaaatagtagcccagctggcactagcttcctctggtagtcattatacaaattagaatctcatctgaacttgccttcttggccatctattatagtcagtaggcagagacttaatactttttcattttctgtcaattgtcctctcctatctcaccatccccaacatgctcatacgcatactttctgtagatggggaagtccgccagctactctgaaatttcagaatttttattttgggggaaacaatgagcatgcattcttttggggactttggttctctcagttctttgggaatccaggtctatttgtgtaaatcattttttatttgtataaatggttagccctgggagggcaaggtgttagggcttacctcaggccctcctgtttagggatgctgattggtcttggcaaccctctcccctcttctagcccaccctgcaccacgcaggtgcactgttcttggcctcttccgtgttggataaatcatttctgtccatatacaatattattgcaacattttattttcatcttttcctctccctgttacttgtgtcagcattatctattttagagggtaaaacccttgaggatatgaattatgtctgtcagcttaactctgaagagtacttagcactaagctaaatcttacaaattagtacttactaatagcaatagtgctggttgtaatattggctcatttagagactgcagtttgcctactcagcctttggaaaggatgcccaactacttccagcttccaggaagaaaacattcaagtgtagtgacattatgtgaacaaaaacaacgccctttaaattgttactatctaaaatgaattattttaggatcaagataataaaacattaatactcacataatgatggtgacatctaattcatccctgaggatgttcaagcagtttatgtagctctgctaatacaccactgaaatagagccagtgactgtgtggctataccaaacgggagagaaactcaacagtgtgtgccctgagagccattcatcccctgagatttctattttcagatgtcatgttataatttctttccttaagcctcagaatatgaaggtataagataaactggaatggaattcttgtttgattgtgtatccaaatgtgatttatggagcggaaatgcttataacatgcttgttctgagtctagctcacaccaaattaaccccaattaatttctcatgtaattggatagagaggatgtaaaagatcagaaatgctaagctagatgagtggaatgtccaaatttcaaacctttacacagaaaggctttcaatgacaaactctattagatttaagtggagaaagaggaggaggacatgtagggagaggacgaaccaaagaaacagttcagcttgttagaaagaacttaagtctgcctgcctgtgtctagtagaaaaggctatgttgtagcatagctgatgaattctgtttgctgtgacttacctaattaatttactacacccctgtcacagcccgtcacttagttcttttcacaatggtctagtttcccaccttgggttgcagtagacttggtcattaagtggagtccaataagtgttttgttttttccttgtctgcaaggcaggtatgtgtataggcagcctaacgttccaggcaaccagtagggaaagaggaagctaacatacgccttaggggattgggttaatgaggaaacgtatggttatgaaaggcattagacggctttagatctacgagagacacagctgcggctcatcagcaaatgttctttggctctgacgtgagcttgactaacttatgtctactgaacctgctggggtacatcctgtagagtgtgcttatagtctctttgtttacttttacatttaaaagttacccttaatttatgaaagaagtgacttgtatgtgacatttttaaaaagtttaattctttgaacattgttgaagatcaactgtgtgccaagtattcttttacatactgggactcaatgaagaatagaacatgtttccaccctttaaaaaatgtttatactattaaattcaagatgagcatgcttattatagtgtagtaaaatgaacaagcatcagaaaaagtcagaaaactgtgtttgaacaacagaaacattgggaaaatacatcagagaccttacacatacacacacacacacacagtatatgatttcaggtaagtcatttaatctttaagcctcagttccctcatctgcaaaatggagataatatctacttgccagatatagaagcttgagtgagctaagaggtctaaagaatgtgataaactgtgaagtatcactgaaagataagttaaaaatcagagaaacaaaaagtactgccccacatgaaaagttaattgtatttgaaatatctcactaaaagatatttgaagaatcatctacatgatggattgcacgtagctgctaaaggcaaggagttacgaattacattacttctaaattaaccagttcagggaagaggaagaggaggattaaaattcattatctggaatattttatatgaggttttttttttttgtttgtttgttttttgagatggagactctgtcgcccagactggactgcagtggcatgatctcagttcactgcaagccccacctcctgggttcaagtaatcctcctgtctcagcctcccaagtagctgggattacaggcacgcgccaccacgcctgactaatttttgtatttttagtagaggtggggtttcaccacgttggccaggctggtctcaatctcctgaccacaggtgatccacctgcctcagcctcccaaagtgctgggattacaggcgtgagccactgcacccagctgtatttttatgagttcttaaataaaactcatataaaactttcatgggaaccatgaaagaaggagagagggagagggagaagagaaaagaaaactcggcctacatccagggacccaaataaaagtgttatggaggaagaatacaaagccccaactgtttttgtaaaacttggggttgcctgtctaatatctaaaggaaccactgtttgagttataaattcagcacctgatttgccaaaccttttctctctgtttcaatgtggccaatttgaacaacagaaacattgggaaaatacataagaaaatttcagcaccttgccaaacacatttattttgaaggacttcagatggattatgggcatcctatttatttgaattaatatatttttccctctaaatattagaattttagatattgtattaaaagtcgaaactgctttggttggcagtcttccattacccacacttttaaaactgcttcatatcccatgttattttcaggacctcgttgcctgcttgcttgacatcaatgatataagtacctttattaagttaccaacttgagttgcactgtgtagaaatgttattctttagtcatgatgagctatcaaaatgaattgaaaaggcacctccaaagtcttggtgatcttgctccttttgatagttaccacccctccattgagattcccagcttttctgttcattttgatcctcttgcaaaaagcactcaaaattggcagcttccatgactccatcttctagagggtgggtggaatcaagagtgaacttcagaaccttctttttctgtcttccttctccccatttgccacaagctttttcacgggttccatggcagcagtggaggtagaaagaggagatgggcagactatgccaaggcaaatggccccacctgagttttcttagaagtggatgcaatgtggaccaactgtgttttaaagcatgaggcttccttattttctctttcttaatacatcagtaagctgctcaaacaaatgaagaatatgtggaatacaacgacaaatgctaaataagcatatttgaaaaagtgtgagtttattacatgtagaccttgttcataatttcaagtcctaaggaaatatagtccagtcaacaggaccagcaaatgtatgtatttgagtaagccttctgagtcgccacagtcccaaataggaaatgaaaaaaagctgcctttactgactgtcaaagatagggctcactaaatgagtgaatgctactgcgttacatgtgctactccaccaaattttattattgtaaaaataaaattgagcccaggagttcaataccagcctgggcaacatggtgagaccttgtctttagaaaattagctgggcgtggttgcctgcacctatagatccaacttcttaggaggtggaattaggaggattgcttgaacctgggaagtcgaggctgcagtgagctgtgattgtgccactgcattccagcctgggtgacagagtgagactctctcaaaaaaattttttttgaataattggaattatattatttaaaaggataatatttatttatattctgatatgtgtttggcatcagctgttgtcatacatgaggttggaaataatgactggcttctagatagctcatcagttcatttttctgagcttcttgtgattattttagccctcagctggactactgctaaatccccatggcaataggatcccctctgattccttggtgaggtgatggtgatttaaaaaaagtagtttatacacagacacagtgatggcactagagatgttgaatagttgtgattacttagaaattgctctcgagatagaacatttgaaggaataattagaaaaagtgtgctgttctttttttaaaagcagcttgattgagatagagttcatatactacaaaattcaccctgattatttttaaataaagggaaaatattaataggtgtcctactacaaaccattccccctattttcaaggataaacaataacaaatatagattttaaataataagattatctcataggtgggaattgaacaatgagatcacatggacacaggaaggggaatatcacactctggggactgtggtggggtggggggaggggggagggatagcattgggagatatacctaatgctagatgacgagttagtgggtgcagcgcaccagcatggcacacgtatacatatgtaactaacctgcacaatgtgcacatgtaccctaaaacttaaagtataattaaaaattaataataataataagattatcttttcagtattattacagtggcctttagcattttaaaatctacaagcaagcaaggcttcagtggaccatgcagaatgttgtggttccctgtgttggagaaatacaagtttctatgggataaacaaatgcatgcacatgctggccaattgtcagagtgaaataccaaaaaattccgttgtggagtaagtgataatcagattataaagaattaaagtaagaaaataccttttgggttgtacgtagaaaagaacatgataaagattatcctcatttctttttttcttttcttttcttttttttgttttagacagggtctcgctctgttacccaggctggagtgcagtggcacgatcagggctcactgcagccttaacctcccaggctcaggtggttcttccacctcagtctcctggatagctgggactacaggcatgtgccaccacacccagctaattttttgtattttttgtagagatggggtttcaccatgttacccaggcttgtcctcatttcttgatgaatctttatttttcctttagagctgatttaaacttttttttgtgagaaatatagcatctatatagaaaaggtagttaagcccgagaaccagcatagtaagtagtataaagccagcacctttgtaactgctactcagatcaagaaatagaactgctggcctcttaggaatgtgccatatttccccctttgattatgactttccccacttcagtcctccaaccatgactttcaggctgatcatctccaagtacgcatatatacacacaatataaaaccatatatctatatgtatagtgttaccccttgagtgtgtatctgtaaccattaaagtttaatgtcacctattttataagtgtgaagaaatgaaatcaggtgttcttcttggctcagcatcaggtttgtgagatccattcataggagcatgcagtacatggcttgttttcattgtaatctagtataccattgtatgaacgtaaatataagtactggttcattttatggtttgtggacatgtggcttctacccaggtttttactgttgcctgttctgctttggacattagggtctataaaacctgatacacgtggcatgaatttttcaaagtatggttcctcttttggcagcattagcataaaacgtgttagaaatgttgattcttgggccccacctctgacctacattcagatatcaccttggactgtatattgtgtatgtttatgcttattccagtgactgcctttgctcaggatacttttggatcttccaggttggaatccattcatgtcggcacacacatgtgtacccatgcaaacataacactcccacattccagcaattgactcgttgctcatatttgaaaaaaattagctttatcagtttgagtcaaatcttttgttattttcaaagataaaataaatatccaaaagagaaagatttgccaacattgaagatattcaaaagaatatgcaaaagattgaagacctgctgaaggaggacctgaaacaggttgggcaaaacaccattcctagaatggaagctgcagggccctacagagaaagcagtactgactctggagttgagcagatgtgggttcaaacccacatgtacatgtgaccagcagtgtcatcaaagagagttctgcatttctctgagcttcagttttcctcctatgcaaagaggggatcacatctactaccaagatgcaaaacagttagtacaaaatgactgctcgcagggccacatttatactgtggatgcattttggtcatattttggtaacataatctgatgtggctgactgtgtcatggcttcatacctttcatgctttggacttttgtgctttctgcaggaacgattccaggtgaagaatcctccccatacatacattcaaaagctcaaaggctatctggatccagctgtaaccaggaaggtaagatggatttgtttccactctttgttattgcttccttattagcgagcagaatcctcctgcattggaagagaccttccttcctctgcattagagcctctgccagagcctccacaaaaaacaaccttgggagaccaacaacgtaagaagacaaaggaaaaaaaacaaccttctcacttgaagatgtgtataaaagttctttcctgacatgagagtcacgtacctctgatggttgttgagtcactgctatttccaattacgtagggcagtgagtgcattccagaggtattcaggcccctagaagagcaggctttgcaaagggaatacttgcctttcagttttttatgccttggtgcatttccagagaccttgaaaaatcactgggcctttgtcatcccagctgtgcactcacatcctgtgttgatgcttttagcagctcccccctactccccccaacccctgcccctggcctgagaaggtaagtagagaatagctgattccattctcaacagactctccccttttacaaacaagccctgctttgtgcagccacacaattggtttaaactgatgcctcgtggtaaagcatgtagcctggcacggccctgtgggcctgaatcagtcctgggatgtctcagggcagagctgtccttgctcaagatgggtgaaggggtgctttaccagatagcatttgtttttccattgacctacaactcctgcttttaaggctcctgcgaaaatctctcaggctgattctctctgttgtttcagtgtgtgattcttgagaaaagaatggtatactttacctagttagccattttcagggctcttgatgcttgcattaaaaaaaaaatctttttctttatcttctactctaactcttcctcccctcaccgcccaccccccgaccaaaaaaaaaaaaaaaaaaaagtccagcaaaggagaacagctattatttccttttggaagtttcctaggcctttctcttacggttaatatgtagacaaggggaaataaaatctagtagtgatgatgacagtgtagtgcagaacttcatcactggctgtatgtcatatgtgacttgaatgtgacacaaccttcaatccaggaacgtacctgtcaaagtatcatgatacttctcccctcgtaaatgtggcacacacatttctttctaaaagacctgttgtcaggtcttacacctgcaaatgagactattgttcagttcttgttaacttctctcatttctccctttccctaagaatgtggcagtcttaatttcatcatttaaagaggtctgtaaaggaggatacacccaggcctggcacagtggctcacgtctgtaatcccagcactttgggaagctaaggtgggtggatcacctgaggtcaggagttcaagaccaacatggtgaaaccctgtctctactaaaactacaaaaatgagccaggcatggtggcaggcacctgtaatcccagctactcgggaggctgaggtaggagaatcgcttgaacccaggaggcggaggttgcagtgagctgagattgtgccattgcactccagcctgggcaaaaagagcaaaaaactgtgtctcaaaaagaaaaataaataaataaatacagacacacccatatacacaaaatacatccccagacaggtgtttttctgcactatttctttgcaaagggacagcaagattctgttttagaatcgatttctaaaggttttctgaaatctccaaacttgtaaccttcaggctagatggctcagacctcagcattgagtcctaatgctcaccctgagttgagtgtggcagagatgctgatgtttatacagaagactgagacctttcctcatgcagaattcatcctacctccaaaaaattccttccacatttttccagttctgaatagaaaggaaaaaatatgcacactcctagggagtgctgcttaggcccccacttccataccccacatggaggaagatgcttagaaggaagaggtgggcttcctcctggcacagttccaattttcctttagatcagctgtttctgggtttaggcaaagagaacaaagtgaaacaaaacaacagataagcttcccagaaaatgttttgcttcctcacaaataataaactggagcaggacataagatgtctgtttgggccttcattcccgacatttctgccctggcccatgtgcgttcacctgaatggccatgtttggtctgtgcttcatctttcaagatcagtcattcagctcagaaaaaataaaatggatggtggattaaccacccctgctttagtaagattctgtcaggagctggcaggaggaaatgatctgttccacacaacataattgtaatgcttaaagcctggaaaaaaaggagatttgttgaaataagacatggcttgcagttaaaatgagcttaaaattctcagctgtattatggtgggggagaaaaagatttcaattcggggctttaaatttcagccagacagtctaggttgggcagttttcctttaactgtgtctggagtcctcgaatacttgattcgttaatcttttgtgcaaattgaatagaagatacttaatttgctttttttaaaaaaaaattttaagcattttctatttagattttcttctaaatagttttaaatgaaacctctcgggcagaaaaggaagagcctaaattagatatctctatgaacagaactctccaaaccagcctccttatttaataccaggaagtgattagtctgtgtttaaaggattctggtcctttgctggcgctgcagttgtgagatgaaacctattgtagggctcatcctgggctcagctgcctctgggggctcatcccaggcctcccttgatggggagggaagggagaatagtacagactgctcatggatcctctgtggctccccatgggcacataatttcttttcatagtgttttgcattctggatagattttagaagtgcaaagtgttagcactcattgtgtatatattagagaagtggactccaagacttctctgtggcccagaatctagccgaaaattgagccgttccttagataatgtaatacaggagtaaagtcagtttagtttgcctccgttatcaggcagttgcagaagggtagtgcctaggtagcatagtcagtgcccaaaaacagcgctgctgctgttattattacctcatcgtgttttgatttagttacctggtttcgatacatagctcttagtccttcagtggaccctcttttatactctgctatgtcctcagtgctacgctgggtgcccttgtgcctgatggcatacgtaagggatgaccttgccccgaggaagcagaaggcggcattaggggctgggtgttagttcctttgtgttgctataaagaaatacttaaggctaggtaatttatgaggaaaacaggtttattttggcctacagttctttaggctgtacaggaagtgtggtgctggcatttgcttctagtgagggcctcggggtttacaatcatggcggaaggctaagggggagcgggtgtgtcacatggtgagcaagagggaggaggtaccagcctctcttaaacagccagatctcacaggaactcttaggagtaagaagccacttattatcacgaggacagcaccaagcagttcaggcgctatctgcccccatgacccaaatacctcccactaggcccacctccaacattggaggtcctatttcaacgtgggatttggaagggacaaatatccaaagtatatcaggggcccagcagaagcaaaggctgcagggaatgagtcagaagtgcacataacacagagcttggaaggctgagttattttctgacaaccacctgtgcaggcagcccgagacttaggactctgacacgggagtggccacactgagcagccagcatatctggaaatggttgccttagctgtgtgaccagagaccctagaattttttgtctcctttctcttcccttctctatatacacagcagactgcctgctccattctactgactctcctctactctattcctaatttttagctccaaggaagagtttaaagagagagaatacctttagctgcccatcctgcattacttgcccccattctttttttttttttttttgagatggagtctcgctctgtcaccccggatggagtgcagtggcccgatttcggcttgctgcaaccgctgcctcccaggtgcaaacagttctcgtgcctcagcttcctgagtagctgggattacaggcttgtgctaccatgcctaatttttgtactttttagtagtgacagagtttctccatgttggccaagctggtcctgaactcctgacctcaggtgatccacccaccttggcctctcaaagtgctgggattacaggcgtgagccactgagcttggccattactcccttttcaagccaagtactgtgccgagcctcctcattgctgggaagtggtctagggagctctggggttgggtgtcctccaaactctcaagtatgccaccatttgttaggcctgtttcgacagaagaggggagtgcctctcttttttccatcacattggggacatttttatttcctacttcttactatacctggattctggaaacctgacatggtctttttagattgtcttgggaatggcatttatggaggaactgtgagaccatctgcttccttgggggctctgcttagaagcagctggtggggaagccaggggctttcagaagaagatgacagggtaacaggagcctgctgtgctgagccgtgcttcaggccttcatgggccaccaagtcccaggtgtgggcgtagctcttgccaccccacattctggaatccttacttccatcctccttccttttcttcttgtccttggagctgaaggactctgtgtctgctgcaattgtggcagcagaggagagaggtcctttatatcctgagccagaattctcaaagctctttcctgtaaacagtgtgacataaaggtggttcaggttcgtagcacagatagtctggaactccgcttaggaggcgctgacatcaagttttcttccttcaaagtggcctgagactgtcactttatatttctgtaggaaaatgtgttccaaaggactgatgtgcaatgtagcccattgatatcttggaaatgatttagggtcaagaggctagagaggtgtatattaacacatttactatcagaggtggattcagtgaagaaagaagccccgagggattcctggaagggtaggtgggattttaacaggcaagggaatgaggaagggcagttcatgtcaggagggtggtgtgctctggaggaaggaccctctaagtgaggaataaggggcagaggtagctctgcatgcttatttttgcaacgtgttaggtcacgcagaaaaaaaattaacatagcaggcctgagactgctatgcttagcaaagggcctgcctgcaaggttggcccttggctggcatctaggaacttgtgtttgacgggggaaagttcctaccatttcctgataagactgtttcgctgtgcctaaacagtttatgaaaacaatacggcttatgctgaatgcctcttttccctctgggagtctgaatttgtgtaatgtactaggcagagagttgcctattaaaccagctcccaataagaacctggccactgagtctctaatgagctttatgcatgttgtcatttgtgtctcctcggggagaggactcctggaagattgcacctggtttcctgcacgttttatcctatgcaccttttctctttgctgatcttgctttgtattcttttactgtaatacatcatagccacgggtatgactgtatgctgagtcctttgagtgctcctaatgaatcattgaaactggaggtagtactggggtccctgacccataggaatattggtgaatactgttgtgtgtgtggggtagggaaataaaatctacttactgaaaggcacattacataaaacaaggactttttgtagtcctttctcagtagttaattttcatggtgaggaaaatttgtgtgctctgcaacaaaaaaagtgagggaagcccattttagaagtgaagatatttttcatattgtgttaaatttattataactaagcttcagttatagcagttgctaaaatattttgtgagaatatgtgttcttgaattatagaaattcagacggcgtgttcaagaatctacacaagtgctaagagaactggaaatttctttgagaactaaccacattgggtaagtatacccctttaacatcttagctctaaagcttttggacactttacaaagtaactgaatcatacccaaagaattgagcttccttatgggccattataaattaaaagactgaggttttagtagatgaaaccttgttagtactcaaattacttactgcccaagaatcagcagaagcaagacagatagtccttgatgtggaatttataacaattctatatttctttgagcgggtgcagtaaatatggacacttggtttcatgtgtgcataacaattctctggcaaatcagaaacccccaatagtgcatgtagactgagatcttggaaaatctctaagcttttactgtagttctccaagttggttggttgaagctgctttatttccctttcgttaattctctagagtttctggccagaaggggacggaagctggaataatgtcacttgactcacctcattgcactcagacacattctcagtctctttttcatacatctcaaaacctcaggaccatgaagtgtaaatccactgtgggaaaataaagttcagggaatctatgcactaagcattctgagtttctttcagacaatgacatggtgctttgcctcaggcaagaacagcaatattatattctcccttacccctgggtggcctaattgtactatgtcttaaaacaagatggcttctctctaaggtagaatgatatcaggtatcctattttgtagccctccttctgcccaaagcacctgcgtaacattgggcaagctatttaacccctttggttttgattctttgagctttacaatgagaggactatcgacttttagatcttttagaattttcccatgacattctttgcaagtctattggaaattaattttgatgtatatatattgcactttagttttacagagtatgctgtaacatacagtaagttctgtctcgttgatagttcttcttgaaaaccatgagtttaagtgaaataatgttgttataaaaccttttccccccctcatcaatgtcataatgaaataatgttatttgaggttaagtaaggacttgatgtggatttattatgtagataaaagtttacttcagactgctgtaagccattcaaatggttaattagcatagttatttcaaaataaacttttagaaactgtagaaatgctattgtgattgataggtgatggaacttgggtaagaatgtgcatttcttaaatgataaccagcaggtttttcaccttgagaatgaaatattcagaaaatgaattaattctagactttgtccctggaaatgggctatagaacaaagaatcatagagtcatgattttagaactggaagagaaattaagaattgcctgatgcctacttttacagattaaaagaattaaagaccagagaaggtgagtgaattgcacaaagtctacagctgtagagccaggtgctttggctcaagttgctctgttgtttttcctgtatgacttatgctggcagccgtttccctgaaagtaaataagattatcagggatctgggatcaaagcaatgaggcttgtctgctggggatgaacatggtagtagtttaatacttttgggcatttagactcagcacatttaaatactttctaatatttatgaatcaggagctagattcgattttgtttggtccaaacctttgcctttggcccttttaactgaaaatggtggaatgaactgcagccaagatttctacaaattgtcaaaaagcatttcttaggctgtgcgtggtggttcacgtctgtaatcctagcactttgagaggctgaggtgggtggatcacctgaggtcaggagttcgacaccagcctggccaacatggtgaaaccccatctctactaaaaatacaaaaaattagccaggcatggtggtgcgtgcttgtagtcccagctgcttgggaggctgaggcaggagaatcacttgaacctgggaggtggaagttgcaagtgagccgagatcattccactgcactccagcctgggtgacagaacaagactccatctcaccgaaaaaaaaaaaaaaaagcatttctttaagcattgccgaagtaatgtgaaattgaccatcaaatacaaaaggaagatgatcatttccaacacaaacttggctgaatagaagaaccttggttgggttgaagccagtgcagtctgcaagcaattggagtggtttgttgttgaggatactataggcatattgaaagattcttagatttctttcatccttaccaggtgaagttttcccttgcccaccatctatgtgaggaactctgaaagctttggctttagcagcagaaaaattcatggagatgcattgtctgattatatgcaaccaatcactagcataaacttacgtgaagtaaaaccacacaaccagattgtgaccatcttgcctgttctgaaaacccaaacctgaactcactctttgttatgtaaactaactggcttgctctcacttgatagggatatcttctgaaaaattactcaataatgatgaaaataatcagttactaaaatgaagaattcttggaatgcaaggtgctatttaaggaagccatatattttattgtactgtttaaaatactgtaatagatagataattcagtgagtgtggtgacccacgcctgtattcccagtactttgggaggccgaggcaggacgattacttgagcccaagagtttgagaccagcttgggtaacatagtgagaccttgtgtctacaaaaaaataaaatattagccagtcacaatgtcacgtacctgtaatgcctgggacactgaggcagaaggatcaattgagcccatgagttcgaggctgcagtgagcagccattgcactctctgagtaacagagtgagaccctgtctctaaaaataaaaaatcggtgcccatttgctcaaatttttgctatgcccctttctagttatttgaccttagataagttatgtaagttttctgcacttactatgtgacccaagttaaattctcattgataaaattagtataatacttacatcacaggaatattataaggattagatgacataacttgtaaattcctaataaagggtctgaaacataatagttactcaatatatgatagttgtttgttatgcttgttgcaaataattacctgcagtattcaacagtattatatatctctaaggatatacatctcttatatatatctctaaggaattccctaaggcagagagtattatcatctttatctaaaatgatcctgacacccaggagattatgatacccagaaattaaaaaggagggattacatttacaatctacttgtcctaaaaaaattgttctgggcacatgcttgcttttcaacgttaaagacttgagctttcccaagataacattctgagctgcagctttgtcaagcaaaggacttcttctgagttttgatataagcctaaaactctataaatggaacaatcttctgagaaagaaaattaattttctttgagtcaaattgaaataagaattggactagaaataatcccattcacttactcttaggaactataataatagagaagaattggattatgacttatctaagcttttgaaattacttgaaatacccttgaaatgatccacatagtgttagaatacactagccatgcagtgtgagtaggcagatgccatggtgcttaagatgtcagagtgataggatttaaatggtggtgagggtgaactggacagatttaccagctttattctatggaactgatgtgtacactgtctctccttgcagggaatttattgtagtaaagctacctataatgatagaaaattacttttcatcctcagtgcaaggtcacagaagttctgaaagatgctcatttcactttctcattgtggtgtagagagaacaggcatgagatggcagaaggaatgtggcaagttggcaaggaggggaaggaggtttgtagaaaagggaagatgctgaggaactgcttagttgatgtcttctctcctgcccaccagacttctttatgaatcagtgctggctgagccaggccaaaagaagaaagacaggagagtgacaaaggctgcttttaacatgcatacaacacgtatgggagtgtatgtgtgtatcaagctgccttatgattaacttattcctagatggtacttttttagaaaccatcaaggttataatcattttgtcatttattaagcacggtgttaggtactttacgtttgttattctgtgtatttcctacaaaaatcttattgaccattagccctgaatccctgttttatggatgagaatactgagggtcatttattaagtaccttgctcaattccacacaagttagaagcaccgagatttgagcctagatacggtcacttctaaaatttattactaaaccagcaattctcacattttttttttttttttggttttagagtgcctttatacttttaacttatttttgaaccccaataagcttttgtttagatgtgtcaaatctattaatgtttataatattagaaattaaaactgataaattttaaatgtctttaataaaatgtaatatttaataacatttaatttaaatacatataaaataaatgttatgtattaacataaatattaatacattataaattaaatgacatgttttatgaaaaatattcttcaaatccaaaaaaaaattggtgacaaaggctgcattggtttaatttttgcaaatctccttagcatctggttaatagttggcagctagattctcctgagtcaacattcaatttgtcgtgatctgttttgattgatgtatatgtagaaaattgggtcttatacacacttagagatgagttttttaaatggtcttttcagataattgggatattctttttttagtagtacccccaaaattgaacggctagtaactaattcttacagatagctataatgtagagtctgaaatcatatcagtgaactttttgtgctctgttatattaaaatccattggccaggtgctgtggcctgcagtcccagcaactttggaaggccaaggtgggcaggatggcttgagcctgggagtttgagaccagcctgggtaacatggtgaacccctgtctctataaaaaatacaaaaattaaccaggtgtggtggcatgatcctggagtcccagctactcaggaggctgaggtaggaggatcacttgagcccaggaggttgaggctacagtaagccatgattgtgccactgcacttcagcctcagcaacaaagtaagaccctgtctcaaaaaatcctttgtgctgtcttacactttgattgggtctttttatccatacatgaacttgtgacatgatttgttaacatcatgttggtcatttggaagatcagaataactcagtaaaatcatgtttctccactgttgaagcatatccctttacaatgtttttaaaaatcacatttgttaataaccaccagtctgattagaatatatgttaagtattgagaagctgtcaaactgacggtggtgaatacaggttttccagaattctagtttttgtttgaaagctcaaagttggtcatcagcaacaaatactgtgttgtccttgaaaggatgggctcacttcatatttgagtaaatgtctgccacataccccaaactgaatcaccatagtttgtcagttatttttacaagtaaattgacattccatgaaaaaatggctagttcagctcgcaactcaaacaatttcacaggtgcttttccttgagacaactgtgctacttgagcaggtagcagaagtactttatgtgagcttcctgttttgtcacactgaaaatgaaaaagatgtgtactaaatgagtaagctttaataaaatcaatattttttattgcttatctaagggcgttcttaagtgaagctggccttttccccctcctgagtgcacggagtgacaaatacaataaataagtgtcttctttggttgcagcagttttatacagtatttctttggcattgtaagtgtcagtgtcaacagattgaaaacaactaatgtcctaatatttttgtgaaaacagttttaccttcacaggcgccctgagagggtttcagggacccctagtggtatatgggctatactttgagaatcagtttgcaacactgcctaacagagtagatctgatgaccagtgttgaatccacacagtgcttctttctcttgcttttcatgatttttcatcaacttcagttcccaacatatgtctgtaggacctctctctagaggaggctggcaaaaggaattaactgctttttcctttctgttgtgcaactttgggctacttggcttgatcttagaaattgaaagccaggaacatctcttaagacctatatgaggagaaataaggttctaagatttggggagacagaacaaagatttgatattaagctgtgaccagcctacaataaaacagtgactgttggcattggcacttacatctcttccttgcacccaatttcttccagagctatttgtcattgtccctgtcttttccagctcctaagcatctgatttagaatttgcctaaattcagatgtacagcatatggtaattacattgaatccgtgaggcactcaggaagttatgcgttctgtcagagtcagaaataattcaactttccaaaacctataatcacccaatttgaaactgtttgcctattggcaacatattaaaaagtgtgtgtagcatgcacagaggtgaaatggaactaatttgctatgggaaccctgaatatatgatatagtccttgcatgatcatttacataaatctgcaaaatgaggcatccatattctttgaatgcctttagattccagttactgctttgaaagttgcccgtttttatctttacctgttttctttccttactcttatatttctgtagaagttcactttcaactccaattgaaaatggccagttctctccaatacagaaagttccaagtcaagaaggggtagggactgagataatagttagaaaaatgggggctcttttttcatgtcatccatacccttattgctgaaatgactttgctaagctaacctgataccatttgataaagtggggaaggtagccagccctgaaagactgatctcattctttcctaaagcagctgggggtgtcaggactagatcaaatcccagggaggatcttgtagctttgaaaaagatgttaactgcatgaaattaaatcaggggtaaaacatgtcacactttagctgaccttttaggaggtaggcagcaggctgttaccttttactcagaaaattgtctttgaggccctttcactcaaagtcaggaagtggtgatgggggcatggataaggactctgaagtgaagtaagaggagccaatgagtattctttatccctgcattaaaacgtatgcatattagcatgttaagcgaattgtaactctggctgtacttggctatttcctaccttaaaaaaatttagtttttcttctgtaggtcacttgcctcttgtccaattggtggctgaactttccaagtgagatggaggtgcctgccagtagttgacacaagggcaggcactgagtgcattctgaatggtctgcactctacagaggctgcatctggaaaatcaaccagaagaaacgacaatggctgtttctcttagctcctaaattagtgtgttcttatgggccactgagaatatgtacaactgagactgccctgaaaaatctgcccccctccccccgccgtgattatttttcatattaaaaagacacccaccaccgagggccagtttaaattgtacaatcacagcccataggccaccaatggaaaagcctaagcaaggctaaggggcttgaatttaaagattttctaatcatcagattttgatattgagttccagactttaagtctccagccagttacaaaaaagaaaaaattctttttactatttctaagcttctaattactagtatttaaacgtgatcagtgtctcctgagacctagcaccacagaaagtacttaaaataaataaaaaataagtatctagtaggtgctgtgagattgtgtatgtggctgttttgaaatgaaacttcagcctccaccagtagccagccctgttagttttgtctaggtctcataacaaagccactttgtgaggcctaccaggtggtattttctttgccaccgttgccactccaggtctctcttaaattaaatgttatatgtttacaggcagctatgccaagtgcataggttttgcagttgcctctctgaggcgcttgaggggaaaacacaaggcaatctttccactttcccactttgccgcctcctggaactacctgcagacctgggctgggtttgcatcatggagatgacaggactagaagaaagaatgaccttgaggatgaaacaaagaaccccttccccctgccaaaaattaaaacaaacaaacaaaaaaccaaatatcctgattccatgggattgttttctgccttttaagacaaagacctcaaggggttgctcatgcttaagggatacttggtagaattgtcctactgttattttaataactaacaaaactggcttccatagtcactatcatgtccatagctggtcagactttttagcttggtgtttctggaggaaagcaaccattgtggaatgcaggtggcagatgtacctcaagtggcatttcagcgatagtagtagatcttttaacttattatttgttggagtttgaaacttagtgaaggtttaatcaggtaccatatgttgtttgaagatgaatgcactggaggaaatctgtaaaagggggtggtgacattttacatccatctccctaaagattctgtttgacctcccatcaggattattatgaagaacaaataagaatgtataagcattctccatgcactgtggagcaccattcaaatgcaaggaggtattatttaaaaatgaattttttaaaaaacctgatatttgtcatgtgccggccttgatgatagtatgcggtgcctgcagctttttaaaaaggttttaacattcatggaaaaagttaagcaaatcattatccctattgaatttctagaagcccataaacagtggtctctcattggctagtttagtggtttctgtagcttagtgtgccaaggacttgaacttggatttggaatcccgcctggatttttgtggttatgttgtcatgtcccccatctgcctcattgtccatagtcttgcttccttccacaagcaggctgtagatcaattgtggtggaaaaagtacattaagcaagtgccttctttaaagaaagtttcttacagattatcttaaatcctctaagcagtaaaatgcaaagatggcccacgtgtactttttggcccttatttttgcacattaaaaagttgtggttttcttagttaccatatctgaaaagctcctgcctcatgtgaagtagtctaggccttcctccctatgtcctttcaggcaatgaaagtttctggtggaaaaaacaaaactttgcattgtgtccgttccatggcaggtcatgtgatcaatttctccaatgatttttttttttttttccccaacagatgggtcagagaatttctgaatgaagaaaacaaaggtcttgatgttctagtggaatatctctcatttgcacagtacgcggtaacgtaagtaaaacttggcttgcttgcatttgaattttatgtggtcacagcagatgctactcagtggtaaaattatacaccacagagagggcagaaactcagaagcagatgtgctagggcttagggaggtttgtttctgtttgggtaactaaaaacaaatcacataatggtattagaaatgcctttaaggcagaagtaaaacaggtgaataaaaatcactcttaaaggagcccttattttcaaaagtaacgctttctttagggcttaagttacatatatggaagaatagtctaacagttggtgaaagaggtatgtgataaatcactaggcgatgcaaaagagtgactccctttttcttttaaaaatgatgtctgcatgtatatttgcatatgctagtaagtgcatagaaaatgattgcagaaacagataccaaacgtagtggcactggagggagaggtaacaggaggctgttcctttttccttgatatgcatttgtattgttttgattttctgcccataagctgaaggggagtaaaaactggagtgcagtggcatgatctcggctcactgcaacctctgatcaagtgattctcctgcctcagcctcctgagaagctgggattacaggcacccaccaccatgcccggctaatttttgtattttcagtagagacggggtttcaccatgttgggcaagctgctctcgaactcctgacttcagatgatccacccgcctcggcctccccaaagtgttgggatttcaggtgtgagccaccgcacccaacctagaagcactcatttctatgtgtgtttcctttttctgctgtgtgagagtgaggatgagctgagaggaacacacgctgaatggcgtgggagctgtagagtagcctagcgagggcatcaatgccacgagtgatttcaggatgccctcctcgtcttaccttctctcatctcagtgattgctttctctttttagcagttaaaattttattagattaccccattctaactcttttatgttcagtattacctcctgcagccaaaggcatgacagaattgtgaccagttgcctccatggactttgtgcatctatctctgctatctgattagtcttttataggtgaaagtcatcaccaattttcagatgaaggttctaaccaaatattttattttggcagttatacttttataaaaagttacactttgatttccaatatgtattattgttttttcttctgcagtatcctctaagattttcctgaggatattaagtgtagctaccttctgattgttctactgtctgatcaggtgttgctatggatagaaacaattaatacaatttcttttttttttttttcttttgagaaagcacagttactttgtgaggggggaaatgcatggagcacaaaagcctgtctgtttaaaaactttgttcctaaaactatacaagagtgagcaagttaacttgtcatttattctaacatggttaacatgagtaataacctcaaaaaatgtcagagaaacaacagtcttactttaaagagcaccacactgggaggagattccaaaatcaaagcaaatccataactttgctagtaatgtatcacatatgcttggaaaagtacacttgccaacacactaggagaaaatgctcagtgaaaattgatgggtaggaataaattagtataagcctaacatattgacttgttaaagcaaaatgaagacagctgtaagatcttttcccccttccatcataccaatgttagtgacttatatattagcaagccttataaaataaaatacaaataatatatcactatttaatttttgctgctcattgttccattattcttttgccagacccattatttgtcattctgtattcttaaagctaacactgagcccatagaaattccattatatttcctttccagttttctttgtttacaaagactttccatactaaggtgcagatgtcttgtaggaacagcaagttatacatgttcgtttatacatgtgaatgtgaatttttcagtcttcaatggcatttctcttttgttttagttttgactttgaaagtgtggagagtactgtggagagctcggtggacaaatcaaagccctggagtaggtccatcgaggacctgcacagagggagcaacctgccctcacctgtgggcaacagtgtctcccgctctggaagacattctgcactgcggtgagttcgtttaatcaggaggcaactttggcaggatgcactgggacagcaggctcctacttcttttgatgattctgggcactgtatctcataaattgccatacagcactttcatttgcaatgactctaaatgaatgtttctttaggagttcatgggatcttcccttgggcaatgtttgataactttaaatagcttctggaaacaccataccttgattcagcatagaaggtgggaaaattctgctgccaagtgatagaacaggatagtctcataggcagataaggttttgaaaccaggggaatgttgacatcctgatggaggtactgtttccagggtagaggcagcacttagagatctgggatctctgccctttgttaccctttgtccttccgctctctttcatttctccagtggtagctcaggttgtgtgctgtgggtgttttcttagccataggtacagaatgctgtagtgataatttttattagtgagatgccattaaccagtgttcctttgattagatatgcttcacttgtcaacctttttttttttttttgagatggaatctcgctcttgttatccaggctatagtgcagtggcacaatcttggctcactgcaccctccacctcccaggctcaagcgattctcctgcctcagcctcccaactggctgggattacaggcacctgccaccatgcccagctaatttttttttgtaattctagtagaggcagggtttcacaatgttggccaggctggtctcgaactcctgacctcaggtgatctgcccaccttggcctcccaaagtgttgggattacaggcatcagccaccacacccggccagttgtcaaccttatattttctcctaagtattccctttctcatctcttctggctaaaatagtaccatgctaagggaggattggtgctgaccacctgtactagtaatgggtttaatattgctgaggttgttcattcactcatacctacaatcattcattcactgaaaaatatttttgtgcttcttatttgtcaggcgtaacacttaatactaattgtatgttggtggataaatcaaactcctgcctatgaggacagagatatcatctagaacaagtttgtaacggtttctgtggttcatgattttaacataaaattttattaataagaccttcattccaaaatgttgcttattctttcctttcatttttttctacactacccccttacttactctttctagcttaaagtgtttctatcttatttcaggcatgatctggcaagaggacattatttctctaagtgtttacgatcactccgggtattcagtcattgttgtagaatccatatgtcagattgcagccagtgaatatgtggctttcagacctttggatttggttgtctaattacctcttgtccctttgacttggtttttggtcatggaaagttaaacatttctctgtaatgaagttaagttctgctgaaggatttgatatttgagtatgatacctccagtaaatcatttagattttccttgtttagaactggaaaaaaatgttaatgggtttggaatgaattgattcaatattaagagcagtgtttcaattcaccttattatatttgcagtaggccaaaggttgtgcaacctgctaatctgcatcagcttcacatgtgggcaggaatatatgggctgatttggcagatatataaagaaaggctaattgtctgaagaatttcctgatcaccttggaaattcaggatgaatttcctgatcaccttggtactggaatggaaattctcaccactagtttaactgtaattatttgtaagggatttaatttacaaagtacattttaatttggttttctatcattggacacttagaaagtatcatgtattgccaagctaccaccttagtaaggatttgtttttctggttaataattcagtatgcttactttttaaagtattttttccagtagagcagaagaatcgggaaaatctgggaaacttcccaggttcagggagggatgtaaccctggatgctggaggtcgagggacatccaaggccagcctgttttgcttcacagttttgcttcaaagtggatcttgctagaattaatttcaaattggaaagtcagaccaaaagcatgcagatagggaaattgtatctggaaaaacataggcattatatatatgatgtttctggttggcaggtgtgcttgaagatgaccagctaagaaaccaataccacattcttctgttttgtgttttaatattttcaagctcaagaacagaacatttaaatttcctttgattctgctttatggtttctagtagcccaagaaagctgataaggcagtaactttcatgccacttaaggacctgaagcttagatttttgttttgttttttaaacaatgtatatcaatagttttccagctcttgtggttcatggatttatgtctggattctaattctgtatttggtcattggatatagcatctgtgacataaaaacagcaatcagaagtacaggcatatggtacatgttgcttttcatatacccaaacattgtttacatttttttcttttcctccttctctcccctttctttctcttctccacacgctgccttcacttttggctttctttttaccatcctcccttttcttttagccatctcatttctgattgtcttctcctcttctactttgtcctttctcatcctgctgtctccttcttctctggtttcattaatctctcatgccaccaccagattggtttctctgcctgagtattttcagttccattgccactagagctgcttctcccctcttgcctctggagcagcttcagtttacatactgatgatgaggcttcaaaccggaaaatctcataagtctcgggtgaaaacgacatccaagcgagttcacagtgcatgctggcagggcaatccgactgctctccatgttataatatgataaccttgtggctttgtgctgacatgccatactagaataaagcctgctgccttttaaactttgatacactctgttatcatattatgattcctcatttttagaatttgaacctttacagtatcttgcattttaatagcacaggttgtttttttttttgaaaaagaaaaagtatataaattcatgctctatgaaaatgatttattctggtagctttgtttaattagtatatgtcttctgtatccaaatgcagattttagtttcttctttttaatctcccgataataagacagacatattaatcttatctgataccacttggcaaaaggattggttaatcttggaagaaaaaaaatgagatttcaggaaatttaaaacacattgtaaatgggcatgattaaagaaaaaaatgaaaaacactgtgttcagctgggcacagtggctcatgcctataatcccagcactttgggagacaaaggtgggaggatcacttgaagtcaggagttcgagaccagcctggccaacatggtgaaactctgtctctactaaaaaacaacaccaacaacaaaaactagctgggtgtggtggtgcacacctgtaatcacagctacttgagaggctgaggcatgagaattgcttgaacctgggaggcagaggttgcagtgagctgagatcatgccactgcactccagcctgggtgacagagcaagactcaatctcaagaaaaaaaaagacaaacactgcgttctaaaatacaaggttggttttttttttttttttttttttaaccaaattctaatgttgacacacattttcctccttgtagtcatactttactttttaattattcaaaattgattgttaaacattttatgtcataacataccccttgagtcatatcagctatgggattctgtattaccatgtatttgtcagcttggctagagggaaactgttgctattgatgcagtagagacctggtttgtattgtcttctaaaattagaatgtggtgtgccttcggttaagataggtttctgtcagtgcggctacagagctagctaaatttaacaatgccatataggcacatatgtgcacatcagatctatgaagacaaaggctgtgttatttcagatgcaagagaaaatactttctgatttttaagaaggtccaagttaatgctattaactcgagtaagaaatgacatagcaagtaaatgagtttttaaagaaagaggtggagtactaacttagggtttggaggaagggacaaatttaaactggactttaggcaatgtccagagttggtcctcagggtaaggaaaggttgctccaggtggaggggaagtgaaagaacatgagttgagcacagccctatataaagatcaggtgtgctagggaatgagagaagaacctgtcctttcaggaacaggtgctttgtgatggaggtggagagctgtccagtggagagagagtcataagacagaaaccaagattcacccttgctattgatctttgtaaccaaggatgatcttttcaaaataattatataatcccgctcattttttccttaaaatttttttgtcttcttttactttcctgaatatgcccatagtttacatattcccattgcaacggtttattttcaaataatatcttttctttaaaaacaacaccaaggtccacattgcctttaatacattaactaccattaatatttcttctacactcctccagagtaagagtttgtttttcttatgatgatgatgatgatgacgatgattttttgagatggggtcttgttctgttgcccaggctggagtgcagtggcacgatcatagctcactacagcctcaacctcctgggctcaagaaatcgtcccccttcagcatcccaagtagttgggcctacaggtgtgtgccaccacgcctgcctaatttttaattttttctgtagagagacggtctcactatgttgcccaggctgctctcgaactcctgggctcaaacagtcctcctgctcagcttctcaaagtgctgggattacaagcatgagccaccatgcctagccaagataattactttaatggaatggcatttcatgaatagtccttatctgaatatttaccacttgtatccttagtggatttacgtgaagagatgaagaattcaaatgtaggtccttgtttatatatttttaacactgcagtcccattcctggcgatggttttcatagaagtaattattaaaagtatttttcagtggtacaaagatacagatagcgttgatgtaatttttattggtgagaaagccttttcttaaatgtctgttgtgtggcagccactgtactaagggcctcgggggatttgctgttcacagtttactgcctctgtgagattgctactgttataccactgtgaggaaactggggcctgaagtagtagtgaaacaacttgccttgggtcgaacagtaagtgaaggaggcaggatctgaattgaagtggcttatcaaggattggaaaaaacactgaagaggcctcagcaaattcttgtagctgtggtccagtgccttcatgggcaagactgattatggacttagtttgtaaagggtgccttgccaagggttaaggatacagaaagatatattaaataatatatttgtatatgatttgtggctgacaagggacttaagtatatatatgtttgtgtgtacacatgtttgtgtacatgagcacatatatgaaatgtcatgtgagtgtaacaaactctaacaatacggaaatgtagaggtgagagtaaacagcagaacctagggagtgattcacgagacttggtgtggatgtgaaacaacaatgagtaagacccagaggggtggctgggaaaagggagaagtcaggagagtgatctgagcggaggttcagtggtaagaccgcatgcttcctttaggagacagtgaagagatgagcctggctgcaagtcgtttagagacagtttatgtactattctgaaggttagtctgtgaaattgtcactgcagctcattggcagtgattttgttggtttttgaaaagaggggataatatgggaagaacatagaaatatttccatttaaaggtcacaggagtgagatggtttccttggacacatttcacatggggctatgtcctgattaattagcccccccaatagcaaatgcctttgacaaatggaatataatgaaaaataagaaaaatcaggctaatagtgactctccattcatatgatgggttgccagcctcccctttcatttgctccattcaaaaagtatgcactgaaacctttgattagaggctctgatctagctcttatctggtcctctaatgggacgtatagacagcgtttcaatgcctgatttaaaagttcattaggaattttgtttacttttttctttctttccctctttctcttcttgatccctctacctctcctttgaattatctggattcagctgtttcagctctatttcttttggctgtagagacagtcagaaaactgcctggcccctttttttagcatcatatattttatgagtttaattgatagaaaaaatatgcccaagtgatgtcatgtctgaaggataagaaagaggaaacctaaaaccccaaatcttggttaaagttctattagcccagaccttggaaccataaaagactggtacaattctgccaaattctgtaacatacctcattggtgttgcatttcagtgggttgaacccttatgtcagcttccgagggagttctatactattctttatttataggtagatattagtttgagatctgaatagtgtgacagactgcattttccttacaaaaatgctttttgtcagcgagaaaatatagcttttcttttacttgttcccattagggcttagatattatgaatctcacaaatgttggcatggaagctccatagaaggcttgtggaaaacctttttgctagactccaggaaagcctggttagttcaattcaggaaacattctttcaaggttctgcggtattatgtagtctgggtattgaagctcaaggagaaagacagacatatacacaactcacatactagaataagtctaaatgtctagaaataagtgtatattgttgagacaatagatgggtgatcacagttacttcaggacattactgggtgagcaacggcttccattttggtgggtttttttttttttttgagacggagtctcactgtgtcacccaggctgggatgtagtggcgtgatctcggctcactgcaacctccacctcccaggttcaagcaattcttttgcctcaccctcccaagtagctaggattacaagcactcaccaccacacccagctaatttttgtatttttagtagagcagggttttaccatattggccagggtggtcttgaactcttggcctcccaaagtgctgggattacaggcgtgaaccaccgcatctggcccattttagtgttttctaagtgcttggtgctttacatgtattagcctgttgtcacactgctataaggacatacccgagactgagtaatttataaaggaaagaggtttaattgactcacatctcagcatggctctggaggcctcaggaaacttacaatcctagtggaaggggaaacaaacatgtccttcatcacatggtgacaacaagaagtgctgagcaaagggagaaatgcctcttatgaaaccatcagatctcttgagaactcagtatcatgagaacagcatggaggtaaccacccccagattcaattatctcttactgggtccctcccacgatacatggggattatgggaactacagttcaaagtgtgatttgggtacagacacagccaaaccatatcattacagatataaatctctgagtaaatccggtgtttgatttcttctagctttttagcttatgagtagaggtctttctcctctactccaagaattttcatagacacaccacttagtacttacgtttaccaccattgttattatttttaagaatgtactactttatatttttaaacatgaaggactagctcaaaattttgtagcttccccccccgccccaatcttttttttttttttgactcctttgtgatgggtagtggtttaaagacagcaaaacatgactttaaccagaacactaactagctttatacataattcagcctatgaacatgtatctggcaagagaaattcctgatctgtggttcggcagatccatgagagctgcttctccggattttctttgctggccttgcttgctttttgtgctcctgtcaaaaactcaggtttcgcttgctggttggagctcactaacaaaaatagcttctttccctatagcgcctgctgctggtgctgtgcaggttgaggtgttccatttgtgctccttgatagattcattgttgagcattaagtaggtggctgggtgcagttgtcacctgagtactaaataggaaatgttctgtgtagatttcttaaaagatatttgcttagccgggcgtggtggtgccacccgtggtcttagctccttggggggctgaggcaggaggatcacttgaacatgggaggtcaaggctgcaatgtgcggagatcatgccactgcacttcagcctaggtgacaaggtgagaccctgtctcaaaaaaaaaaaaaaaaaggaagttaaaaaaaaaaaaaagatacttgtggctgggcatggtggctcacatctgtaatctcagcatttgggaggtcaaggtgggcagatcacttgaggccaggagttcgagaccagcctggccaacatggtgaaaccccatctctactaaaaatacaaaaaaattagcttggcatggtggcacatgcctgtaatctcagctacttgggaggctgaggcaggagaattgcttgaacccacgagacagaggttgcagtgagccaagagtgcatcattgcactccagcctgggcaacagagtgagactctgtctcaaaaaaaaaagaaaagaaaagatatttgcaaaaatcgcttagttttttaaagtctatcactcatactagcattgagttataactttttcttttattaatattttatgtacatataactattggtatctgctgggatatgcataacactaataaaagggtttggagtaatttgtttggttatgatcttaagtcagttttgtaatctgtaatctgcttctttctgcattcacagagctttgtgaattctaactggcagctcttccaagatagaatctcatctttgaatgctagggtaacatttagagttttagttcagtggaaaattagcaggtagttctcttaagtttatgtagaagaggggctgggaaatttggtgctgttagtttccgtacaaaatcagccctagatatcccttccctattgtatttttctacaaatggcaggagctccaaaaattagactcagctattttctgtctctgggaagcccttcttttgtgtacaagcatccagggccccaaaggctcttcttgccagcctgggagaagaaaggctatcagcatggcatttagataatcagcctcagtggtccaggaattgggtcacaacttctccatatttcatttcctgtttttctctttggaatctgagggagtcctttccaatcctcacatctcagggaaccttccccaagtcaccagagagacctgattgttccatcaccttcttagacctgttcccatcaacttgaaagttacacttcagaatgaataggttggaaaagttacacttcagaatgaataggtctctaaatgtctgttatggaatgctggtgaaatggttgaattaagccctctgaaaatgttctcatccataaaagtgataagaaaactggcaaaaattactggaataaactttttcagaactctagaaattaaagtcttgcagtaacccagggagcatctattcaggaaaagggactgattctcagagcaggaagttttgtggcattttaacttgttctcattcccatccctccctctccagttccacagtagccttgaaaaccagtagctgcaatcacagtgaaaaccagcagcctggcagcctctggcaggggcaggatggcgttggagtgtcttcaaagcacctctgcctcctccttttcctccttctcctctcctggctctcccttctctgagatttgagaactgctggtggagaggagggcccaggggagtgcattgctgctgaaactgatttcaaatttcagtttagggaacatgcaccattagctgttgacagagtctgggatcatgcaagatgtattacatgggacaggactaaataaagctcatgtgtgccaattatccatgggagtccatggagaaactgatgctgcctctcactggagcttttaaagtataccacagtgaattggagggacactctccaatttggttctgctcaaattatgtgaagtttcataatagcttcaggaagaaaatattatagtaaccgtttcactttatgtaattctgtaacagaacacatgccaagggtgttagtttgccacagaggtactcatgcctcctactgagtcactggcttaatccctgcaaagctcaggcctttgtagaaagtttattcaaacaggtaaactaggatgatcagtgtttggaaaacgaagaaagtttagcctagagggctgtggcaaaggacctgatgcaggctgccttatcctctctttcaaagatagtatattgaattgatttatttgtgttaagatgattatacaacagcatcatgtatatacattattttatagttataactagtttcatttgagcggtttgaatgttaattggtgacggattactgctgtgatttttttttcaatcttaagtgaatcggtgtgacatttatttagtagagttttggggcactaatcaattagcctcatctttttttctgtggaaactgtttgccactgaattcagccttattgttatctaggtggacatttgcaacaccaggtagtaagattttcaaagctgagtttttctaatgatatttggttcttcagtcctgtgtattgtggagggatttggtctcatcacagaaatctgcaaatgtgcttcatcgggtagatcaggaccagctctccatctaaaaaggccttctaggagacatcctacagggtgactgaggaagagtgtgatgatccccttatctagttagctctctatcttaaggtctaaacctagaccatctcagtaatgtttagcataaacaataggtacttagtaaagccaactttggggcttaaaaaagagatttggtttgatttcctgtggctggtgagcaccagaggccatttcctctagattgcttaccttgtctaggtgttcttgttgtggtaaagtggctaatatcttgtaaatcctcattctgttgctgttttagggtcagtaaagccatctcctcagggaagtggttattagatagtgtgagcttctgcagggcgcagtggctcatgcttttaatcccagcactttgggaggccaggaattcgatacccacctgggcaacagagcaagaccctgtctctacaaaaaaaaattttttttaattaactgggcattgtctcttgagcccaggaatctgaggctgcagggagccgtgatcatggtactgcacttcagcctgggtgacaaagtgagacccttgtctccaaaaaatacatggtatcaacatcatgcgttggagctgaattcaaaacctgtttttttttttttttaaagtagtcatttactcacatggtaattaaagcaaagaaaccaaatatacagttacaaaaattgtcagattccataaaatatgcatgatgaagaattgattaatgtacatgctaacccatggcacagtccctaaaatctagtcttgtatgtttaagatcatcctaagttgagtcctttgaaagtaaattttcagaggtaaagaattatgacatttctcagggtgcatttatttagtgagaggaaatccttttaaaatgattctaaaatatagagcaaaatttcctattaagtcaaaaaacatcctcactttcctaataagtgtcatatatagaataaagatttaaaaagagaaacttgcttaccaaggtattggccactgtgttctgtaagagatgcctatatgctgctgtttttgacaaactaagccttaattcaccatgatgaaataattattcagggtgagaaatgacacctatctaggactgaagcagaaaatgctgccaggatgacaggatgtgaacatttgataaagaactagccagcacagacagctgtaggcggtagctttttcacatgatcacccagcagattgttgatgagtcaggttgatgatgagcaactcgtggaaagtgactgtcctaaatcgcagtgaggagacttctggttttgcctggtctcatctcatcccttatttgctatgtagatgtaatgtctctgggcttccgttttcttaactgtatcaagaaaggattagagtaaatgataccatagctcttcagtgctatgattttgttgttgctgttattggtcgtgatggaggtttttaaatttataatgttattattttagacatacaagttcagatactaccttttattactactctatttttatataaacaaataattggagaaaataatttttaaaccaaataccatacattttagaaaaactttagctctattgtttttgagcatagaatacaactaataaacaagtttctcatttttttattgacatttatatattgcgtattttctaaagtctttaaatgttaataagtatgtatgtgttatgtcatattaaatgtattttaagtgttgatccagaaaatgtatttgagattagctatctactgcaacaaatagaagccctttgtgttaatgtttgggaagtagaatattattctaattaattttgttgctttctacactccataaaataatgacagggacattttagcttcttagaaagagactattgcaatatagatcaagaactggatcagtaaataaaaagaaagaatgtgctacattactttacacctcttaagaaacacaaataaggctgggcacggtggctaacgcctgtaaccccagcacttcgggaggccgaggtaggtggatcacgagatcaagagatggagagcatcctggccaacatggggaaactccatctctactaaaaatacaaaaattagcggggcatggtggtacacacctgtagtccgagctactcgggaggctgaggcaggagaatcgcttgaacctgggaggtggaggttgcagtgagctgaggtcgtgccactgcacgccagcctggtgacagagcgagactctgtctcaaaaaaaaaaaaaaaaaaaagaaaagaaacagatgtgtaaggtttgtctacttgctggaataatgaaactgtattaatatttcaaagtgatgcagaaatatgacactgtagagaataacctctcccattttccttagagactggttttcattagtgtatcttctcaatcattgctgcatatgaatacaatttaacaaaaggcagttgattccattcaaattactctttctttttaaaacttagattactttgttttacactggaagctattgctatcaactaaaaatgaaaactctttctagtaaacagtcatgtacttaacaagtgattccattaaagaaattcaagactgaggttaaaataagaaagatagaggaaggggaagaacttcagatgtagattaagaagatgatatatgcttgggtctcattggctgtgtgattagtttttaaagttgtaccagtctctgagacctccaaaaagtgtgttaacaagcatacccaagatgggcttatggcaaagtgacacattataaagctgtattttagaggttgaaatcaatcttactgttgccatttggtggcggttttaacctacaatccttgttttggtactggtgaagagtagtgtctgttaagtgcatgtgcctatgctaagaaagtaacctgttgttttatagaagtttctctttttgtttgtagatataatacattgccaagcagaagaactctgaaaaattcaagattagtgagtaagaaagatgatgtgcatgtctgtatcatgtgtttacgtgccatcatgaattatcaggtatgttggagcttctggttcttttaaaaaaaacctgaattaatcagactcagaaatgactgctgggtgcagtgtacaccgcttgggcgaagggtacaataaaagcccagacttcatcatcctacaatttatctgtgttaccaaaagctgcttgtacccctaaagctgttgaaatttttttaaaaaagaagaaaaaccaaccaaacaaaaaaaaaaacagactcagattttgttctctttggtttctttgtattatttctatttgaagtaaatgccaggatttaacgagattctattaaaaaagaaaggcctggttcatcctaattctcaaggtttaattctttgctctcatattttaataaatatatataatttgtgacgtatttaaaggaaaggtgttttcctcctatagagataaacttacctagattgcttggtgaatgcttgtgactactaaagattgaataagctgctgttgcaggtagtaatgaaacaactctagaacaccaggaatggatagagacagtggttctcaaagggttatatggcaaacaggcaaaaagttacaattattgacagttgggctcagtggttcctaatctttataagaagcacctagaagatcgttgaaaatgcagattcctcctttgggtaattgagatgcaggttgaccccactgtaaaaacactggaagttacggtggaacacgtgtgctgggttaatcttaacaacaaagtggaagttagagcctgtagtacctagcgtgaactggtagggtcatcagtttaattaggtcagcaaagcaggggtacaggggttccacttagaaaagtggaattcaaatatagaaataggatttgatttccattaatatggatgctacagtgggtccaagtagaagtgggagataaatacataggtcgagggttggtgttagagttcaaaccaacacaaaaggtgctgtgttaaatttaagaagggaaacatgcatttattctttccatttttttttgaactttgccagacggcccctgttccacataggcaactgagaatacagcattgaataaatctgtggcccagggaacttactttccagggaggggagacagatgaccaacaaataaattggtaaaatgtatatgttccagataataatgatgaaatgaaagctaatgcttacatgttacacttttcaggtctagtgcttttaaacctcttaagtcatgtaaatagccctgtgagatcaataatattactctccccattttactgatgaagctgggacacagagaagtttggtaatttgcctaaaatcacatagctagttagtagtggagtcaagatttggacccaggaacactttgaacccagagaaccattactaagtactgtagaaaaaataggaaataggaactgctgaaaatgtgtgcgagttttaaataggccagctagggaagggtcactgagagggtaacatctagtaacaacttgaatgagggagcaaagggagggatattaggggaagaaggttctaggcagagaaaagggcaagtgcagagaccctgaggcaggaatgtctggtttgcccaaggcacagaaaggaggcttggctggatcagaatgagtaagagggagaagagtagaagatgaagtcagatgtgacagggagtttgattatgtagagctttagaggccgctgagaggacattgacttcactatgagtggaaagctattgaatggttataacgacataatctgacacttgcatttaacatgagaccatgctggcttctgtgtttaggtttgatcttggccaggcaaaggcaagagggggtagaccatttaggaggcttttagcagtaatttaggtgagctttggtggtcatatggactaggatcataggagtggagatgatgagaggtggtcagattctggttttattttgatgttaaaggccacagcattggatatgagggagaaggtgagtagtagagggtggcaccagggcttttgtcttgggcacctgtgagatatatttgctatctacaaagatgggaagactgcaggatagatggatttgagggagatcattaggaattctgtttcggggattttaactttgagattccccttagacattcaaatggtgatcttaggtgcatggttggatatgccagtctggatttcaaggcagtggtctaggctggagttagacatttgagagtaattagcatataaatggcataggaagccaggaaggtgaatgagatcagtaggggtagactgagaagtaaagaagtccaaaatatgaactctagggctctctgtttaaatgtcagagagacgaagaaaagctggctagagagcctgaaaaatagccaagtaggagccaagtgaaggacatatttcaaggagaagggagtattcagctctgttagatgctgctaagtcaagtaagatgtggagtgaggattggccattggcttcagcaaagtgcaggtctttggtgatcttggcaagaacagttcattgggatggtgggggtgaaatgcttgattggagtggtttcaagaatgagcaggaagtgaggatttatactgagtgtctggaggagttttgctgtaaaggatagcagagaaatgagaggcagtggctgaacacaggttgtggtatcaagagaggtttttattgttacttaagataatttgcattttttatgctaatggcaatgagtctatggagagggaaaaataagggggaagggaggaatttctggaacatatgatgttcgtgagcagatgcgagggaatgggatggaggaaggactcatgggaggggttggccttagtttggagcacagaagagttcctctttaataggaggtgaggaggtaagccacaaatctgtgtggatagattgatgtggtataggaacttctggatgttttctctgatgagctgagagtgagttttgaggagaaagaatatagttgacccttgaattttgtggggtgtgaggggtactgatccctggtgtagtcaaaaatctgtatataactggagacctcaccagtagcataaagtctgttaacacacattttgtatgttatatctattgtatactgtggagtcaccctggaagcttaaaaactcaggtgccaggtccctgtaattgagattcggagtaaatgttttgtttagtcttccaggggagtttaaggagcggccaaggttaataatcactgggctagagcctttttatcattttaataaagagaaacatgtagttcatttgtaaagaatgggaagataatcttttgataatagcatcattgccgatttttttttttttttttttgagagatgtgggtcttgttgtcctggactcaagctgtaccccccgcctcagcctcctgagtagctgggactggaggcacaaatcattgcatctggcattcttgaaatttttaatagagaaatatgctctgacagtgatatactagagacataagtgcatttataatggtgtaagtttcattaggtagatacttcgggtttttggttttaaatcaatactgacagttccctaacttgtctcccaatgctttgtgtttctttttttttccatgttaattttagtatggtttcaacatggtcatgtctcatccacacgctgtcaatgagattgcactaagcctgaacaacaagaatcccaggtaagctgcttttgtagtacgcaagtctaaatctatctagagaaaacagagggctagtcaacacttaaccaagtttgactttggaaactttcaagtgttaatctctgaaataagattggctataaactctttggctgtgtaagaatttttccttttagccaagttacattcttagatgggccagagttgagcaactggtgacaattctagcccttcactgttctcctcaagcttttgttcttttgaggcctggtttccagcatccttgctgctaaatttggagaggatcaggttgccaggactcgggggccaggagagtcttgataaagatttacgtatatcagttattgctggaagctagctaaaaccaccatccttcgtctacacttcgcttgataactttacatatgtagctttaattactgaacgaaaatagaaaaataattgtagtggccagccgcagtggctcatgcctgtaatctcagcactttgggaggccgaggcaggcagatcacctgaggtcaggagttgcgaccagcctggctaacatggtgaaaccccatctctactaaaaatacaaaaaattagccagacatggtggcacatgcctgtaatcccagctactcaggaggctgaggcaggagaatggcttgaacccaggaagtggaggttgcagtgagccgagatcgcaccgctgcactccggcctgggtgacagggcaagactctgtctcaaaaaataaagaaagaaagaaatagaaaaataaaattgtatatgcagatttcctttcatattcaccaccttgtaaaggctagcagcagatataattcacatcacacgttagtcgtaaaagccagtcttcatcaattgtagttattttaatgtgctttccattttggtgaagtattctgtacttcaaatgtgcaattccttttcatccaatacctctctgtagacaaaatatctgaaaactgttaattcaaaaatctgtttataaattagccatttctgatttggaaaatgcaacacgaactatcaagtcctctttactgaatattattctttcaaacttcccctgattaaaccttttgcgactgtgcgattccttccttcgtttactagagtcctaagtagccatgcttctgtgtctctgccttctactacagggaagacattattttttaaaagacaattgacattgtggagtatcagaacagtttttgtttagaagttggtgaaagctgttattccagaaaaaaaatgaaatacttaagtggtcttatgattgaagaaacaatgctgtttctttcttgacattgaatttgaaaacttagagtgtatctccatgttctccttccaaaaatatttcagattgagttttattttcttgagtcaaagaaaatattcttgtgttagtaaagctagtaaagctgtaatccagctccttccagttgtcctgcgtaggaagaagaaaggacagaaacttgtattttcgtgggagatttatggatctgtccctacatgagcagatttgaaatgtagaacatgagtttcagttgattttgaacttttttttttgcaaatgttctctcactgtctctaaaaccagagcaaatacttaatcaatagtttgtttttcagcatattcccattccctttgtttttagcgtaccagtaaacatttttcatctgtattgtactgagtcacctgatgataggtctaagagattattcttctcagaactagttttcattagtgagtgatttgtctttttggtaagtataccttccaaatttgccatcttagacaaatcacatatgtagtagtcagtaaaggtttaaaaatgtactttgattaaactgtaccttagtaaaattttttaaaaatgtaagggcaaatgttttattctcatgtatcttggaaggaagaaacagctgactcatcatgccattttcactgatttgtgtttttcttcttcttgttttggcagaacaaaagcccttgtcttagaactgttggcagccgtttgtcttgtcagaggcgggcatgaaatcattttatcagcatttgataactttaaagaggtaggctacactatagttttcataagaatactcacacatcttacatttggacatctttgaacggaattatttaccttttcatttatcctagggcctaaggaatataatagttaatttctaagatctcactgagaggaatgtaatgaacttagtctaaatttggtatcttatttctaggataagttaaaaataatcacagtactctttttttgttgttgttgtttttgttttaatttttatgtttttagggaacatggaataatccagtttgaaaaccggttttgttacatgtatgtggttttcattggggttgatattggcacttgatcgtccaccatgcaaattttatgaactctttcatcacagttactttatttttgctggatgctatgaaaaacctggcaaatactggcactgattctgggagcgtgtaagcttaagtgggcttgtcacagccaaacaataatgcaacagttgagcatggttggaaacggagactgtctgaccacaaagaaaggagggattacacaaagacaatatgacgccgcgggccctgccccagcgtatccaaacatcaccgccgcgggccctgccccagtgtatccaaacatcaccgcctagatagtagctgctttcccacagggtagtgggcagtgttgtaggaccaagaagagtacctgtttgttcccctggtatatgcctgacatcagaggctactttgaggtgagaaattacaaagtagtccttagagaacaggtggaagcccaggttacaataggacccttcgccaagttgtgtgttatgctagaagtcccatttaattccaaatgcttttggattaagacccgagctggattaaaatccaggtcacagagggactgttttctctcctctttcctgaaaggttctgaactagaaactctgatagtatttattgagaacctactatatgccggggctataccagctacatgcatggcatcatttggttctataagaacatctttgagacaaatattaatatcttgattttagcgaaattgaaatacatagtttacctgtggtcacatagctagataagtgacagagccaggaacaggacttggtgctcctgatcctgaacttccttgaaatgtgttgaagttgtggccttattgtttgtgaatcccttgaaggaaataagggaaatactgaaatgagacaggacttcggagctatttcccctgcctcctacctccttaattggatttactgcccagctgccaaatgttctagacaccagcctgtgagcctctgcataggctgggaagcttcaaagatgtgaacagggcagacactcctcttgctcctttatttgcattgcctccttactgctagtccattctttaagattttgatattatccattttgtaaatgccaactgtggagacaaccaaatattatctttttttttctttctattgagccccaaagatagtgaaaaaatatccagcttccaagagaatgaagaagaataatagtgaatctttaaattcatattctggcttccaagacaaatagattttagagacaagaatgtacgaatgcttgtctgtgaatgtttttatatatcatgtataaatatataaattttacatttataaataaggaagtatgtttgggtggatgggtttaatatgaaagagaaacagtatgtgcagctcatataacgcccaaatctttatcattaggtcatatttgaaaatattgcatgctgagtacttttcacattggaaacatttactatatagttatcagtggcccttgttataatgactcatattataacaggaatctgattatactgcaggtcagattatatcctaaagatatatttgtatagaacaagaataaaagccaggaattcatgagatgaatgataatatttttttctcctaggtaagatagagtacctttcttatgcatagtaggcccacagatacttgcagaattgagttttaactctttggtgtcagacttatatatgctttagctatttagggtgtagtatgtgcttaattgaagaaaaatgtaatcctaagtctaatacctggacaatagtaatgagaactaaattacttttgacattgaattcttagagctttaaccaaaactggcctcatttctgtaattaatcaggagtgatggtaggtcttcaggtactgtccttggcataggcatttgcatctgatagaaggtgatagcagtgggctaggggaggtcctcaaatgctggtgggaccccaaaccctgctggtgtctaggcgcttgacatcctcacaagaatgaattcaagtatgagttagaaaatagtgaaagtgtggagatttattgcaaagcaaaaagtacacactcaagaaaggggagtgtgggcatgcttgagagagtcacacaaggtggtttggggctgctacctttatggatttctttaaccaagggatggagtattcacggagattcctggaagaagctggagatttctcagaactatggtgctacccatttttacctcaaataacgatgttctggaactgtcatggcactggtgggtatatgattgaatatgtgaatgagcatagaataaggtcctaggagaaacctggatcaaatccagcaccatgttggacccagtttgtctttgccagcttggcccacaccctgtttttcagggtcttatcagccccaagcttctgcagctatttcagcagtttccttttgcttagtcatgtgaaactgctgcctagaattttttattctgctgcaaccatcctgcattattcttgtctaaaaaccatatagacagaccaagcaaatggattattatcctaatagccatgggaatgaagacaaggtagcaacatgcccccgacaaacttagttgttatagataggtcagaagagcctcaaccgatttatccaatcttgaggtgcaaaaggtgttattctgtgttgatcttgctttctaaaacatgcaatgccgctcacagctcaaagtctcttaaatcccttcctctttttctcccatctttgcgtgagtgaattttttttttttcacatcatagtaaagtgaattctttaacctctttaaccaaaatgtcattggaatcttctggttttataataatattcattattatattctggcatgcctgtgcagatagggttttgttcagtgaataattccttttgagccacatatggcagagagagtaccataccaggtaccaggataccaggaaggaggaccaaagaagagtctttgccttcgagaagattgtttttaaagcttttcatcttttttagtaagttgggattccattcatctgcctaagaaggatgaaaggattatctttgtttttattggcaggaatgaggggtgaagtaggggagttcaacatctattttttgcaaataaagtaatatgctttagagtagccagatcctttgggctttgatcactgttagagcatagccaagcgtactaacgcaatatggaaccagatgctagaaagacatttaaaaggccatgtatcttaagtagtttatgtagcaggatttttccccctctacctcttgagccaataaatccattctatctaatttgaccaccactaattaattagttcagatgtaaattaaaggaagttattatttggctgttgaaagatttttatgtatgactacatcattttctcatgttttgatgaatatttagaatcccaatcttatattttttttccttaaaaaatcttgctacaaatcttgtaatagctgaagtgcatgttttaggaaggcagggagcacctttagtttaatggtatgtgatggtggcaagaatgttaacccaaagctttgcttatggtgggggtgggattggggtctaagcctgatgtcactgagcaaacacatacatggcttcaatgtacatgatgacaaatgagtcttaattacatgaatacagatagtaagcttatactgtgcgtggtttgtgacatgcctgaaaacatgagtgtattgagtagatgaagactaaatcattaacagtcaaccattgtgctccttgaattcttttttccttaaaaaacaattttttaaggggattaacacatctggttttgtgttgaaatatctcttaacgaaaatttatggtcttgaaataaagaccagggtgagaaaaaggagtcatctattttttcttattggctaatttattaatagccccatggaaggacatatgaccatcttacctaaattgatgttttcttagttgtgtggcagtgtatatttttgagccccgagactaccaaacagaaaaaaatacatttggaagtaaaaaccaccctttggatatttatattagttcagagtcttctttgcaagaagcagaaactgactctaacacatagaggaaagggttgatcgaaaagatgttgagaaaagcacagacttgacaaggagcctggagaaccaggcttggaaaatgggcaggcattcctaaaatgtggctatactctggctctgcctttgaagctgcgccaccagaaataccatttggggttctggtcatgctttttcttctcttccaaatgacatggaccatagctagcaatctgctggctcataaaactcttatctactggttaaggacctcaaccagtccccacttcagatttctaaacactacgcttcatctcattaccaaggggaaccttgaagtcttcaacctagctcttgctctcaactttttcttagtctttttactttttccattatattctttgatatatttgagaaaatggcttgcttttaaaaagtgtctccaaaggtttggcaaaaaaaaaaaaaaaaaatgcttccttctgaagtcaaagaggaaaagtactgaggccctgtagactctacagtggaacagccactatgacatgagtaataaaatcctctgagggctttgaggcaccagctctcccaggctgctgggaggtgcacctggaattcatcaggatttcggatcaattataactgtattctcatctgcttctgtaatgacagcatctggctttagcaaaaaagcctgagtttggttattaaaggctcaactccctcccacttttgaccttccagtacagaaagatggagccttgttgaatgagtcactcgaggccaccagcactcttgtgcacagcactcttggcagtagttgttcttttttctgcctgttgctagaaggcttcctaagaaagctgatgtgtggtttagctactgggcatctgaaggcactcgtgctacacattattaagttgaactaagaaagcctgtcaagttttatttatagtggaccaaattgggcaggaaggagagtgaagattttggtgtgcttccagcatccctctgagtttaatcccatgtaatctaacctcccaagcatttgagggtataggattgtaaatctagcatgagaccatccagataacttcctaagtggtaaagtaagggtactcacatttttcagtctctcattgaactataagcaatgtattctctcaagtctcaaactgtaggagccacagccgtagagcatgtatgtatttcatggtatcaggccagaattagattgatctaattaaccaagattcttcttgactggtcctcctccttagcattaggaagcaaagtcctagtcttaatgtggtgttagtgctgctgagtaactttttttgtctgtttatcaactgttgcaattttttgctgtggatacgaaagtaccccacacttcatttttttaggctcctggcttctgtgggtcaggaagccaggctggcatggcagggattgtctcttctttgttttgtctggggcctcatcagggaagacctgattgactggggatgccagtccatctggaggctgtttcacccacatacctagtttttgagctatgatacctctcaaggactgggcccagctgggactatcaaccagagagcctccatgtagaactccacgtggcttgggcttctcacagcatagcatctggcttctgagggagagtgccccaggaaggagcatctgaagagccaccattcaaagagccagaggctgctgagtgtcttctgagctggtcttagaagccgtgtagtggtcacttctgccatgttatctgggttcccagtgaggccctgagcccaacccggatgcaaggggaaggcaatggcttctcttcttgatgattggccgtcgggttactgtgcagaacatgtggggtgggagagagagctgtgggctcataccattgtagtctgtatacctcagtaagtctcgtacctcagtaactgtatgagatttaccaaaatgtttattgttattcgtctttcattttctccctcttctttactcaatccaatacttggtttttccttttgactgaaaactttataaactttttgattggagataaaaaagatagtttttaattctttcatgtgaatctactatgggcaaatgatattgtgagagccttccctagagaaaggagccattttcataggatgtccaagtttattttctggtaatgaactagttatttctttaccattagtgtctttaacatctggttaagggaatgaaggctggtatcctcctgattgttaagggatgagtcatactcacttactgaaaaaaatgtgagtgctttctatgtgtcagaaacattgataaatattggaatatgaaaatgaatcagacatatgccctgcctttaaaagagagcctcccaggctagttgaggaagcagataaatacttcgacagttgtaataccaggctttataaaggtaattgcaagatgctctgcaaagaagaggaacagctgaccaagacaaagtagggctggaggcagatggggaaagagctctcaaggaggctccttataggagagggtgcctgaacagagtttagggtgaacaaggttaaccaggtgtattcctttcccattgctgctgtaacaaatgactacaaacttagtggcttaaaccaacaccagtttattattctacagttctgtagaccagaagaataaaatgagtgtatagggtggtaatctctgaaggctccaggagagatttcatttccttggccttgtcagcttccagaggccacttagattctttggcttccagccccttcctccagctttaaagccaacaacatagcatcttgtctctgtctctctgcttctcttgacacattgccttttctctctgacttctctgtccttcttcctttaaggacccttgtgatgacattgggcccatccataataatctaagacagtctcccctcctgaagtcccttaatttgatcatacctttgcagatatcatcatacctttgcagatatgatcaaattaaggaacttcagatggggagattatctttttattgtataaggcagcatagtcaacaggatcaggaattagcatgtggacatcctggcgggtaggaggaacacatcattcagcctgtcacaccagataaaaaggagtgaggatgtcattttataccaagaaggtagtattttaataaagcttcaaggactttagtttgccccgaatctccagttttaaagagcttagggcatgggaagagaaaaattgggataggaaattaaagggagatcagaaaaggcccccttgcttatcccaggctcttcatagtgccacacagcctaaagggagcaaatatgctccccagtcacattggctgtttagattgactctattaataaagaatttgctcatatgttttgttctgaaagtcaattaacagtgggctcagcatgcagttgctttgatagagcagggtgtgtttggggtctgagatttgtttcagaaatcttaccattcatatttctcattccttgggctcctttctccaccgagagtcatctgcttcatcagctgccgtattcatttacttatcacgtcttcaggactgcccttttttggtggtcctgggggagcttaaaaaaaaaaaaaagaggaagtacagcagggtaacagtgcccagagccagaccagattgtcacattatctgttgtacaaatgtagagatgctttgcttcacaacttgactttaattagaccccttctgctccacgcaagcctgagtacaattttatgcaatagggaacctcatcctctattttaaatgtagcagccacttaaaaaaacaaacaaaaaaaacaacaaaaaaaaacccagggtgttagggtgttgctgccgtgttatttctattcctataaaaatgccgcttctaaaatgcatgccctttgccaactataaaagttggcatatgtgcccttatttcatattcttggaagataacgaggagaaccccaagagaaagcagtgagagctgagtgttattttaaaccctgcagaacttgagacagagactggtactgttccctaaacatgagctttcacttgggaagtatttctttgacgttttgatattgtctggtttaaggtacagaaggacactatgaagcactctgctgtgagctgatcagaaaatcggagtcaaaactatgacagctttggcaatatcaccaactctaaaaagcatttgaatggaagttttcagtctccgggcaggatttgattgccattctggcatttatttcgtgaaaggcctatttaaggatcttcttggtttgctcttcctgtgtaaaggagctgcttccctgctcttctactccctcactcctggacctcctgggctcaagtggtcctcccacctcagcctcctgagtagctgggactacaggcatgtaccaccacacctggctttatacatatatatatatatatatatatatatatatatatatatatatatgtatatgtatatgtatatatatatacatatacatatatatatacatatacatacatatacatatatatatatataatttcttgtggagacaagatcttgctatgttgcccaggctcattttgaactcctggccttaagcagtcctcctaccttgacctctcagagttctaggattacaagtgtgggccaccatgtctggccttctagctgctttttaaagtagttttatattgagtaaaaataaaaattattgtttttatgtgtcatggaattcttgattatagcttattttagcagttatttagtccagtactaagccctacacacagggttatattaaccgtcttattaaataagcatgtgtggctcacgcctgtaatcccagcactttgggaggccaaggcaggcggatcacctgaggtcagtagttcgagaccagcctggccaagatggtgaaaccctgtctctactaaaaatacaaaaaattagctgggtggcatgtgcctgtagtcccagctactcgggaggctgaggcaggagaatcgcttgaacctgggaggcagaggttgcagtgagtcgagatcgcaccactgcattccagcctaggtgacagagtaagactctgtctttaaaaaaaaaaaacctgtaggttcaactatagctgttcaaatagttatgaagtgctggatatgttaaccaggaagaaggataagataaatcatatataaataatatatatgtgtatcagtgtgtatgcatgtttgtctgtatatttgtacattaaatatatgtgtgtgtataataggagtaagtgtaaagatatatgtgtgcacagtaataagccctaaaaggaagcaaatgagaggatttggagtggcactgggacaactcctttgtgtgtgtttatttctgttgcttggactgtttggtaagtaataatccctcacgtggctagactatccctcttgtgcagagttagattttccctctgataacttttttttttttttttttttttttttttttttttttttttttttgagacagcatctcactctgtcaccacccaggctggggtgcagtggcgcgatctcagctcactgcaacctccgtctcccgggttcaagcgattctcctgcctcagctcccgagtagctgggactacaggcgagtgccaccacgcctggctaatttttttgtatttttagtagagatggggtttcaccatattggccagactggtctcgaactcctgacttcgtgatccgcccaccttggcttcccaaagtgctaggattacaggcgtgagccactgcgcccggcctccctctggtaatattttatatggctagatttgtcttttctaaagatgctcagttatcttttgtgtaacatctctccagactaccaccttttcttcaaaactgtgaaacagaatcagaactgtttggaattgccagcagactgttgagcaaatatactttttacagtgaccccgttacagggttaggggagtttgttagaaaataaaaggtttcaggccaggcgcaacggctcatgccggtaatcccagcgccctgggacaccaaggtggaaggactgctatagcctgggagttcacaattagcatgagcaacatggtaagaccctgcctctacagaaaatacaaaaattagccaggcatgttggtgcacgcttgtggtccccggtactcaggaggctgaagccagaggattgcttgggtctagggggtcaagactgcggtgagccgtgatcacaccgctgcactccagcctgggcgacacagcgagaacctgtctctaaagaaaagataaggcagccaggtgcggtggctaacgcctgtaatcccaaaactttgggaggctgaggcaggtgatcacaaggtctggagttagagaccatcttggccaacgtggtgaaaccccttctctactaaaaatacaaaaaataagccgggtgtggtggcacgtgcctgtagtcccagctactcaggaggctgaggcaggagaatcgcttgaacccgggaggcagaggttgcagtgagcctagatcgcgccactgcactccagcctggtggcagagcgagacttcgtctcaaaaaaaaagaaaagataactcatgatttccgtgccacagaagtttgtattgccttgagaaaggtaggactgactttaataggtatttagttgaggaccaaatatacactaaggtcaacactaggaggacagtaatttaaaactttaagaattgtgcatgtatttatatttttatacctaattgtaatttaaaccaaaatgttaggtgttattgacaatgaatgtgtgtattgagcttgactctctatgtgagtcaagttcaaatttcatttgaaatttaaactcttgtaaaacataagcacattttttattgatgtgggggtctctcgtcaataagggctttgtttgttggtttcttttaaaccagcaattctcttcagaaagaaagcatgagcagagttcagaatcaattccattttcttctttattgtcaacattagtgtatttatgtcatgtacataaaaaggcatatacatatgcagaaatagtaaggctactattagttaattttctatttaataaaaaatttgtttgtttattgtttccttagtgctggcagactagtatatattattttgttaattcttagatgcaccatctgaggtaggaacatagagggagagctcagagcaaatgggcctactgacgtctctagtaaatggcaactctgggatttttacacagatccatttaactcagagttcatatacagccttacataacatgtctcacattccaggcactttccacacatgttcgtatattgtcctcaattttccaccgaaaagcaaacctaatgggaatggttagagattggatagattattggggtgtttaaaattactggtaaaattcagaacagaccatactgtttgtacagggcccagtgggagaagtgggtaggtcctgagcagggtgatcaggaagggaagagacctgatttgatggagagaattctgggagcagagagattggcatgaaatctgtctcaaaggcagcataagtcagaatatatttgttctttaaccaggaaaaatatctgaccagggtccatgttacagaacaaaacatggcaagaggcaggcatgaatgaggttctgaggaaacagtggtggagagactggaaacctgtgattaaaacaaacaaacaaacaaacaaacacctcaactagaagatagatacaaatagaagggaaaaaagagaaagggaagaaattcacagttacataatactttacagtttagaaaatgctatatatatatattgcatttgattctgtggaaatctgcaaaaagccttttatgtaatttggataaaactttaggagtattgtgtagctctgcagaaaatacagtagaggggagagatgctggagtctggaagacaggtggttcagttgtcaaatgactcagccttggacccagtttgtggccatggcaatgaatatgaagccaaaaaatgaaagaaaaggcaataagagatagggtgatccaccgaatatgagaatggacacgaggagaataagaatctgttcaaataatatacacttaatgaagaggaaagtagcccaactatagtcaacaaatacaatctggggatttcttttttcaggcaaagaaaataaaactttttttttaatttatttttttagtgggggtgtaatgcccgaggtcagattcttagctgtgcaatgaaggtaatgaatgagagaacaagtttaaacagaggtgactagggagagagagagagagagagagagtgtgtgtgtgtgtgtgtgtgtgtgtgtgtgtgtgtgtgtgtgagagagagagagagagagagagagcgagagagagccaaatggggattgtaactaagtaactaaggaggaaaactcccccacagggaccccagtccagaaggaaaagagtgaagagacaaggttagaatgggctagaaggatgctcagaagagaccagcacagtacaaaggggaaggtggtcaagaggatgagaggattcctggtgggtctggtatattgtgatgtaagtttttgctttaggtgagaagttagtcaagtggtttttatatatcttccaagtctacaattttatgattctatataaaactttgtgtacacatgcctatgtatgtaacatgtattgtgtgtacctattcaaatagttccctctaagaaagattaagtgcttctttgactgcagatatgaaaacaaggtacctagataataaaatgataggtgctttcatttttcaaacaagaacaaaaactgacatgtttgaggccagttggcaggagagcaacaatcctaaaagagatcactatgactgcagacagtattgtgacttccggcctaagttcccttttatgactacttggaaggtggctgcgtcaatcccttggctcaagtttcatttcaaaaatctgccatgtgtctaaggacgtcgctgtttccctagactgagagtgagctggctgtgctggccatgctgttagtaccaccgcacgaggtactgttgaggacttgtctgtggaagaagcatccctggcttgtgtagcttttgaaagatggagcttttgagtcttgatttaagcttttagtttcccagctcccctgtcctaccccaaactgttctgcccactgcagctcaacagccattctttattcctttcaacacagtggtatatgtggctactgcccagctctttaattctatgtatcagtctgccaagaatatatagtcagactcggttttcattcacaattgactgaaacacactcactagaagaaaatagcccagtggttcctacttatggtccaacagtcactgtcagtcacccttcatcttgcagttgagctctctgacaagatgttccccgcaaactctgcgtcacaggggagtggaaatggccagtcatggtaacatgagctttaggctctgtgttgttttggcagtttggttttggcagtggaaaataagggctccttccctgccaataactgtactagcaacacatgtgatatcccagatttactggttcaccaccaagaacaacactgaatttttcatttcattttcaactattttccaggaatagatgtaaaattagtaaatggtgctttctatgtggaacgtgtcaagaacatgtttagcacattggtaaaagataatgatctttttgttccttgtgtatttgttcatgattgattgattgatttgattgttgttgcttttgaggcagagtcttgctcttgtcacctaggctggagtgcagtggcgcaatctcggctcactgcaacctccacctcccgagttcaggcagttctcatgcctcaggctcctgagtagttgggactacagacacgccaccacgcccagctaatttttgtatttttagtagagacggggttttgccatgttggccaggctggtctcgaactcctgacctcaagtgatctgcctgccttggcctcccaaagtgctaagattacaggcatgagccaccatgcccggcccatgattgtttgatattatggtgtcaggcgtcccagacaaatttgtttacttgggtggattcattcagtatgaatttctgaactttgaggaatgtgtgttctatatattttttttcccatgcggaggagatctctttctgtccctttcccatattcttgcttgaaatctaacattcacctggctttgggaaaagaacatcttctagccttataatgagtctaatgtgacagagtgggtacatcccagagataatcagagaacagttaggggctgtttccatccaacctgataagtaccagggattgtacctggccttattaaacagaagaattgcaaggaagtctttttttttttttttttttagaccaagtctcactctgctgcccaatctggagtgcagtggcaccatctcggctcactgcaacctcctcctctcaggtttaagcgattctcccgcctctgcctccagaacggctgggattataggcatgtgccacaacgcctgggtgatttttttttttttagtagagatggggttttgccatattggccaggctggtcttgaactcctgacctcaagtgatccgcccacctcggcctcccgcagtgctgaaattacaggcatgagccactgagcccggctgtcttttttttctaccttggaaaatggtggagggctcctttctatatgaagacactattggtctctgtgtgatgtggcttcatttttatgcagagatggtacatttagtagttctttgtatggtatggttgattcccaaacaatcttgcaaggaattttactattagttatccatttatttgcttctttagattttaggtttaagaatccatcatctttgtagaaatagaggctattctgtaatccagtagtttccaacttttggcccctggagccctttttatgctcttaaaaatcactgaggtccctaaagagcttttgtttatgcaagttatatgttgatattttccatattagaaattacaacaaaatttcaggccaggcatggtggctcacgtttgtaatctcagcacttagggagattgactcgtagaagatagctgcattcttagatctgcttctgcgtttagtcacttctgctgttgtttttgttgaagtagatgaagaaaatttagcctcacacagatatgtagatgaaatagaattatgtcaacagcattttcagataatagtgggcattcttctttgatactatacaaacactagacaagtagtaatttcttaaaggttagtcacaaagtagaatccgaaatcgtatcgatgaactttttccatactgttgcattaaaatctatttgcctatattgcaccttgaatgaatttataaatttgtaacaacattcagtgatcattgggaaaataatggtacactgagttatctagatcttctaataattggcacatttcctaatatactattttaacaaatcacatgcattatttttacctccaatctcattagaaaattctttaaatactgggaagcagtcagactcctcgtggtgggtacagttttcatgtgtttgcttaatttttatcattgataacaaatattgtcagctgttatctttaaattaaaaggtgcactttgttcattttcaagaaaatacctgccaagtgcataagtctgaatttgtcagtcatgctttcaagtaagaacaaagagtggctagttcatcttgcaactgaaataatcacagaaatgctttttcctcaagacaaccatacttcaatatgcggcagaaatgctttatgcagactccccatttcatcatctagagtatcataaagatgtgtatctaggggttgagatgtataaaattaataccttttactgcttcatcaatgatattcttaagtgaaactggctttttaaaactgagaatgcgtggctgtggtgaatacagggattactggtataatttggtgcactgccttgatgcatgctatggcactggcagtattcactcattgttccttttgtgccaccagtgccaactgccaactctgtgaaagtattaagtaacatcttagtagtattatacaaataatgctgccctcacaaacctcataaaagggcctaaagtacccttggtgttcaaggaccacactttaagaactggtacccaaatccattctctgctgtcatcttgggctgggtggaagtggttccaattggctaagcgcaaaatccttctgcttaagacccagaggtgactgtgggtgttagggtgaacttggggaaaagcaaagatgaaagtagaagggttgggaaatgagagaagcgagctgtagacaaactgcaggcatttgcctgttgttggcctgagatatttggtctatccaagagtccctgtcttcaaggtctctgcattcatggcacaccatgcactgattagatttgtagtgatttaggtgtgaggagagcatgggctgatagctgcctcttgcgcaggccccaagatctgaaattgctgcaggctttagacagctctagccacgtgctcttgctgtggtttagagaacatgcgataacccctagagatgtcattgtgtcccttcccttgctcagcttgacctaattggatatgctcaaaggatgaagctgtgaagagaaatgattgaaaataaagaacagtgttaggctccttcaactttgaggggtctgactggtaagtcatcccagagaggactgaaggcctttgtcatgtaatcctcaggtggctatttaaataccattctcaggctgggtgcggtggctcatgcctgtaatcccagcactttgggaggctgcggtgggtggatcacttgaggccaggagttcaagaccagcctggccaacatggcgaaaccccgtttctactaaaaatacaaaaattacccaggcctggtggcatgtgcctttaatcccagctactcaggaggctgaggcaggagaattgcttgaaacccgggaggtagagattgcaatgagccaagattgcgccactgcactccagcctgggtgacagagcgagactctgtctcaatcagtcagtcagtaaatatcattctttattgaagaaatggaaggtattttggctttctagtagaaatgggggtgtattagggctctccagagaaacagagacaacaggacatctatagatatatctgaagatataagaggaaacattatgggaattgctcacgtggttatggaggtagagaagttccatgctacgcatctgtaagctggaaatccagaaaagctagggtgtcattcagctcaagtctgaaggcctgagaagtaagagcaagtggtgtaagttatggagtctgaaggcctgagaaccaagagctccattgtccaagggcaggggaagaagatggatgtcccagctcaagatgagagagaattcacccttcctccaaattctttttgttctgtttgggccctcagtggattggagacgcccagccacattggagagggacgtcttctttactcactgtcacagacacacccagaaatatttcaccagctcttggacatcacttcaccgtctcaagttgacgcataaagttaaccattacaagtagccttgaaagactctatgtgtccttcctaatgaccaggagatgtgagtcttgcattgaagctagagaggttcaggctggacttgaagcatatttcggaaagagatcatttatgacctattgtaaggaggagttttactctctagaatttattgaaggtcatcttttttttttttttttttttttttttttttttagagaggtagtaaaaagacatttctcattgaaggggtgatgcgtcaatgagtcgtcctttggggattttacgatccttttgcttctgtctttgggttctttattcagtacagcaaaatatgggtgtggaaagtaagacagtcatctggctgctctgtgtgcctcctgccaaacatctggatatctggaaacacctggaaaagttactgaagttttcacaagggtgtttagcattatgcgaatgaaacctcaggctcatagtcatctcctggtccaggattgatacaaatgttgtatttatgaaggaggagagttgactaggttatagaatacatttagttgcttagctttcattagtttttgttttagcggagtgagataaggttgttcagtttcagagcatttcagctggatgaacatattcacagttaaatcccaaggagacatgagagccagcagcaggttggagtgatctgcttctgtcatggctgctgcatggtgtatgtgtatgaaatgtccaatcacttcaagagacaacaataacagaccattgacagccacagaacaccccagaaaagtggttttgtcaggccattatggccctcatatagccctcagactgctggtgcactcagtagatggtaaaagatggttttcacctaggactaactatgaaataactgtttacttcacaaggccctgaaaagaaaacagaacttttgttctcaggcaggccccgagaagggtcgtctaatcagtcataatagagtgtgcctctaaaacggtgccttcctgcagggagccttgcagatcacaggggcctattgtaagaggagaaaaagaaagtattgaggcaggcgccaggcaacaaggcaagaaggaaacacttaagcaaagggcctttaatttttatataactaacccagaagcatattttatagccatctcataagagtcaggcctcaatttggctacagactttgcatggttccctgggagctgttgctggggaaagccagagactgttactcaccttgaagagggacagagaggtggctgaagtctgggagtgtgttcacttcaacatctggctggcaagataatacccaaggtttttgtaaaaccatctcctctccactattagcctttagggaaagcatcccctaaccgccgcccaccctttgagatgctttaaactatagccacctttgcctccagggtcccagattgatccaaatggtttgggacactgttcacaaatgtctttcacagatgttggagagcatagttggagctttttttttttggcagaagttttgcttttgcttcaattctcctttacatgaaaatgaatcttgcttgtcctgggagtggcccacgttatctgtgcagggtatgggatttcatagcttcacaatcaggagtgaaccagatggggcaagagagtggtttgacctttatgtttggtattcagggccagcacagccaagtgcattcctctgaatttgtttctgtggagcttccatgccagtcagcttggccatatcatgttctattgccatgctagatgagaattttagacgttcaagaatactgagggagagaatttttttcaaattttttatttgcaatgaaacctttttttcccctcaaaagcaatcttatcagacaactaagtaagtataagaaagaagatctggatagtgagggtagaattctcaagaaccttacttaggctttccctttctcggccaagcccctgacttggaattcccccttactcccaaagctctgtaacccatatagtttcttctcctttatttcctctgtaaccctgatggctttctttcttttcttttcttttttctttttttttttttttgagatggagtctcgctctgtcacccaggctggagtgcagtggcacgatctcggctaactgcaacctccatcccccaggttcaagcaattctcctacctcagcctcctgaatagctgggattacaggcgcctgccacgacgcccagctaatttttgcatttttagtagagactggttttcactaccttggccaggctagtctcgaactcctgacctcaggcaatccgcccaccttggcctcccaaagtgctgggattacaggcatgagccaccgcgccggccgattgctttcttaaagtatggcttgcaaaccagtagtattatctaaggctctcttttcttttcttttctttcttttttttttttttttgagacagagtctcactctgtcacccaggctagagtgcaatggtgtgaccttggctcactggaaccttcacctcccaggttcaagtgattctcctgcctcagccttcctaatacgtgggattacaggcgcccgccaccatgcccaattaatttttgtatttctagtagaaacggggtttcaccctgttggccaggctggtctcaaactcctgacctcaggtgatccacctgtctcggcctcccaaagtgctgggagtacaggtgtgagccactgcacctggcctaaggctctcaacttgatagatgtgaaaactgaagtccagggttgtttgctgaatggtccaagctaacaacagggtagtggctgaactgtgacttataacccaggttttacagtcttgtctaatgtgccacatagtcccatttctacccttatagccctttacccccatcagtcttagagcttgaaggtgcaaagagaggcagttgtattaggcaggaccccacagggatgggcagataggtggctgtgttagcagactgaagtctctggtccaggattggagcctgatcatttttacattaactgggatcgtgaatttattcacttgcagccggtttatagatgatttataatgaagatgcctcttggttttcagtagggtacatacttttccagggcatatacttttatttgtctgctggtttacttaattgctggtagccccagctgctagcagtagtagtctaattcctgatagggcagtccagtgcacagaagggctccttgccgctctgctcggctcagtttttctgtagctcttaaactttctccccaccccacttaatagagtacatgttattgatttggaaactggtatcaaagctggtgggagaacgagatataccagtgaatataaaagtcaagaatgacacgtttcagctgcaagaatatagcttttttattaaaaagtttttgcaccgtgtattatctggcctttgtgggcagatggaagtgatgcccatcaatatagaatgtgtaatgatgtacacgtgcaaatatgctcctggctcttagaaacgttttgatgaagcgctcgagttcattcccatgcaggccaatgcatggattctgaaaataactgaaaattagtgtctcgttcctttcatcctcaccgattttctaaagaggccaccgcaaaggagagagcatgttccaccatgatggtcctgtttcacccagtgcgtgggggtgctccagatgtgagcagtatgaacgaagacaactttcctttgatgtgggacacaacttttaccaaccttccccaaacatatcttcctgtttcctgtgggattgtagtgtacacttgtttaatgattgctaaagtaatggagaaacaaatgtgaatctggcctgcatgcttcctttccttcctcagaaacaaagtggggctctggaatccttgctgtgcctgtggaatgtgtcaggaaacacaaccctgagttcattagttgagattggcagcaaagcagccttgggtctggtggagctgtggtagtaggggtccttctagtccttaccatggagagtggtcactctgttgctttcaaggtttcccaaagccggcatttgtattcataatgtcattttgtgcatttgggttattttcgccaagttcatagcagctgtaaataagaagatatttaagtctgtttttttttttttttttaagattagaggtatttctctgttttgtaacgcacatgttctcagtagggatttgtctgttgacagaatgagggctctctaaagaaacacatatattcaaggctcttcttaacatctacttcaggtctatctgccaggctagtgatgtgttttttgggatccttatccaccatgaaatctagtgttgcttgttctatatttgatgccatcttttaaagtaacaggctatgagtagtttgttgccgtccacatgtgcttttccagccattcaaaaccttttttttctaagacccaacatgcaccccttgattatttttgggttaccttattattcattgcacttatgcaggggcagtgggtccattcctgcggcattcctatgatatccaattatagtaactgtgtttgtgttgctcagttagaagttgaatgagctggagatttaatgatctagttaatcagtttataattggtaatcagaaagactgagggtttaatcagccagtgtgatatcatatgagccattggttcccagatgctggtccaacaaccacaagtattcacagatttctaggcccatctggggagattcttattcagtatgtctcaatatagactctaggaatctatcatttttcgaggttccatggaagtttctggtgcagggatgtcaaagtatgcatggtataatgactatgtcttttagtgataatgtttttcatctctgtgtgtctcagatactgctggaatgccttaactaccttctttaatggaatatgtttatatgggcattctgggctatgtgggagaaggaacctcaggctggccatcggggacctggttctagccttggttctgccactctctcaacctttcatcaggttagagaagtctaatctctgtgtaggtctaattcataaattgagagcatcagattatgcaaaaggcatttttcagctttctaacattcttcgaagagctttgcctccctaggaattgcttttgttgtcactgttcacgaacagctgttgcctcatttagtttagcgtgtgcctagcccctcaaccaaacatgaatcacggtctgcttctcaggagagctggtagctctccccgaattcaggatggcctcttttcctcttctgttactgccactaccaatcacccacaacaagaccaaagtacactgttttttttttgagacagagtctcactttgtcgcccaggctggaatgcagtggtatgatctcggctcactgcaacctctgccttctgggttcaagcaattctccttccacagcctcccaagtagctgggattacaggtgcatgccaccactcctggctaatttttgtatttttagtacagacggggttttaccatgttggccaggctggtctcaaactcctgacctcatgttatctgcccacctcgtcctcccaaagtgctgggattacaggcgagaaccaccgtgcccagcctgtattggggtttctgctaaagaaaattcacattgcagttctgacctttcgtataaaacctcagggttttttacccacagatccctttttgcaggcaagagatgcttgtctctttgggcgtaagatgtgactgatgtcatagtctagggagctgggcctgtactgcctcacccccttcaacaaacctttcatttccaggaacttgctgtagattgtctaggggggccagctgaggaggggggcagaacatggtaaccccttaaatctctggttgtcagccattgtggagcatcaaaatgatccatagtgcttttaaaattgtgcatgcccgtgtccccccagcaccacctgggccaattgaatcagactctccagtgtgggactggtcatgtgtgtgcgtctgtgcgtgtgcgtgtgtgtgtgcgtgtgtgtgtgtgtatttttgagacagggtcttgctctgttgcccaggctggtgtatggcatgatcatggctcactgcagcctcgacctcatggactcaaagtatcctcccacctcagtctcctgagtagctgggactacaggtgcgtgccactgcacctgtctgattttttaatttttattttcagtacagacatggtttcattattttgcccaggccagtcttgaactctggggctcaagcgatcctcccgctttggcctctcaaagccctgggattacaggtgtgagccaccatgttaggccaattttaaagactttactttagactctaccttccatgcactgtccctctgcattctgaaattattttttgttaagtcaggtataaataaattttcacggagagttgtcatgaaaatgcagtaaatggtggtctgaatctgttggaaatactgctttgagactaggaggccctcagaggctgaaggctgttcactttaacgttcccagcgtatggtttagagatggccaccactaaggatttacccccggtggtgcctgtctaccatggtttaatgcttcatcatggagaacaggaagtcattcatcgttttgtgaagtgaattttaacataattactcatttatcttctattcagtgcaatttaacaaatacgattgggaacttacaatgtactaagcattgatgtagatgctatgtagtgaactaaacagaattcctgccttcgtgggaatttctcttcaccaaaatatatatatattcacttggagtttcacacgactgaattaaatggctgcattatgaaataacattttagaagaatttttgaggattgacctgagttatccctaagatcacaaatggaatcagaaaatttggagtttagcatgtgaaacctggattaaattagcaaaatgttaaccaagggactgtgtcttactaatgcagcaaatagtcaggagtggtttggagaaatattttctgaaggtgaaatgaataaaccagtgggtataggactttgccccaaaaaagtcaaccaaggacattgacagaattaaagtttgtcctttgactttaaaaataagtcttcagagctgggtatggtggtgcctgcttgtagtcccagctacttgggaagctgaggcaggaggattgcctgagcccaggaggttgagactgtagtgagctatcattgtgctaccacattccagcttggaatctaaaatttaaaaaaaagaaagaaaaaaagtccccagagagtcatttgatagaaatcttttttgactctttttttttttttttttttttttagctccatgtattttatttcatgtatatgcaaatacctttgggccctggagttaccagtattttatgtttgtttcatctgatcaatgaaaacattaattagctgaatgcatatgtttcaggattctgggatgctacttcacaaattactgcagatttctatactcaccttaaatgggttaatatagcttccacggtgtctatttctgtattgtagtttatgcactgagattttttgattcagttatacatatgaacattttaaatgtgccttttaaagaatttaaatactcatatctttttgcatgtcttttttcctttttacaaaaggaagctatggtcgttttttttttttgttttttttttttttttttaccatgactgcattcttggattccaaatgtatgctaaaaaattcgtgagactgcaaaggcaaccaatgaaagaaaaacacatttgatatggatttcaaaatatcaagagaatctggaaaggaaaccaagatcagcttttggttgcagctcatatggctgtttgtgagttaactagcttagaagggaagtaaatagtttatgagagagaaaaagatagatattctggaaatcattattaagctgaaatttctgcatctaattttggaatgtttatgtttagaaagtcacatgcacaatgaaaatgtgtgtttcaggtttgtggagaaaaacagcgctttgagaagttgatggaacatttcaggaatgaagacaataacatagattttatggtgagttatttcagtattcaataaagcaaactcagtttcaatactttttttctaaatacacacacacacacacacacacacacacacacacacatatttatattacaaaggacagggaattgcaattaatatgctatagatccaatctagaatgtccctcttaatctgtatttctctttgatttccattttattccttacatacacggtatagtaaagacaaaagtactaatcatagcaaataaaggggaagccgtgcagttggaaacagccatgcctggtgcaaatgctgccattgtttaattgttgatgatgctgcataagaatccttaaggtagaagcaatcttgaccttttttatttttgcaggcccctgccagtgcccttctccagactatattcttaaaaattaaagtgctttggtttgtagagttgactgtatgtatctccaaaatgaatatgcagcagtgattttttttttcctccctgatctctttcctgctttggtaattctgtgagggtataatcatattggggctgtccttggcaggttaggtgacatacaagaacatgcggttccacagcagtcctgtcattctcgggtaagaacatcaaagtgagttgcagcacttctgcattcatacacgtaaatcttaatctggaaggaagatagaatctaccatagtgaatttctccagaagttttacgcttgagtgcacccagatctgtaggcgttgacccaatccagttgccctagggaaattctagacccaggagatcctaaccgggctgtaatttcccagatcacttctaacctgaagcagacgtaccaatgactccttaccttgcagagcctatgcttaggatgccaagtgaatttttcatttgaattgcttcagtgattataaaacatgaaacatagctttgcagatttctaaccctttttgtgaaaaaaaaaaagaaaaaaaaaaaaaaaaagtttggagtcctcaagttttatatgcgtcttagccctcagccccttccaaaaccagtgagaaagatgaaatcctttatagagaagattttctgttgcataaagcatgttatttgcttttcaaagtgtgtgtgtctatatatatatactttatatatatacatatatatgtatatatatgtgtctatatactttatatatatacacacacatatatgaaacaagggacatttttacactgacttttaaaatcttgttattaggattttttaaagaagttaaggctgatgctggccctggtgataaatacgtaaagagattggtgccttgtctcatgatgtgagtttctttcttgtgcctttttaggggaacttattcattctgttagagttgaggttgcaaactgtaggctttcatgctaaagccaacctacaggcttatgagttcagtctgacagtgatgaccctacttaaacaatttggacatgatgcataaaaaatacacatctgatttgcttggaaactgaaaatatttgagaacactaggcccctgttcctgcagagtgtcagctgctggagccaagcagcccctattgctttagtccaaagatgtcctctctagtttgtcacagtccacaccattccctttgcgtgacacacagcccagcctgctcatttatgatacctgccagacctccttgccatttgagtttctgctgaaattacaattatataaagccctttaaaacacctgtactatccatacacaaactaggttccattttctgtcagttcgtttattcacatatacatgcaatgaggtaccttatttagaggctgctattacacaagttctatgtgctagattcatgtgtcaccttcagatagttgcctcttaggcatatcataaaactcagtagatcatttagacctgttttccgaagagaaatggaaagatgccagaatctaaccatgttttctctccagaatatgaggcttttgataaactgccttgggaatgcaattaggttgcacaacctctgaaacaacatattcctcataacatataatataaatttttctaatgtagtataagacatttctaccctttttctgtatttttttgtggacaaaagaaaacaaaaaccattttgtttctttaaaaaatatttttctagtttgtattttgtacatgcctttgtaaagatatattttttaaagctcatttagtgatagaacccgagatgatttttatttttttatttttttttagtaagttgcagtagagtccttttgtaagctagagaggttacacatcttccaaagatatccaatgtataccatatcttcaaagaagaatctaacttgataaaaaaattttttaaaagataaaggaaattaggtttggagagagacaaggaataaggtggttctcaggataagtgtgactctgcatccctcaatcatattccctccttgccagagactctcctgggtgacagccatggagggaaagcattagtaagatgtttccaccataaatagactgatagtcactgtggaaagcaaaatagatctgttgaatgctgtccttttatttaccaaaccagggacaggttttctctttggcaggtctcagggccagtggtgaagttgtggggagaaagcagtaaatcccaggcttttagggaatgcaaactcgttgattatatggaaagatgggtcaaggatctgttactatcctgttgatagggaagagttcacagggaatttttagatgtggttaccttttggtgagattgtaggtgatttaaatgttcttctttaaaaaatgttctttgtaataattttcacattttgtacaacataactataataatttccacagtttatcttatatacctatatgactttcactgagatataattaacataccatcagattcatccaatttatttataatccagtgcctatttagcctattcacagggctgtacaatccttaccacaatttaggacacagcgtcacccccccagaaaaaagtcctgtacccattggcagtccctcccatttatcccaccctcagccctaggcaaccactaacctgctttctatctcaatagtttagcctgttcaggatgttttgtatgaatggaatcacacaacatgtggtcttctataacgggtttttatcatttaacatgttttcaagatcacgttgtaacatgtgttggtaatttattggtttttatggtttcataatattccattgtttggatataccacattttgtttatcgattaatggacattggcttctttctactttttggttgttattaatgatgttactctgaacatctgtgtaaagatttttatgtggacgtatattttcatttctcttaactgtatatctagaagcggaatcgctgggtcatatgataatgctgtgtttatcattttgagtaaaagtcacactttttaaagtggccacccttttttacattaccaccagcaatggatgagggttttaatttctccatatccttcccaacttttgttactgtatttcttttttattatagccatctgagtgggtgcgaagtggtgtcttattgtggtacctctgtgacttttgaatttaaaaataagtataaaatatttttaaagaggccgggcgcagtgggtcatgcctgtaatcccagcactttgggaggcccaggccggcggatcacgaggtcaggtgtttgagaccagcctggccagcatggtgaaaccccatctctactaaaaatacaaaaattagctgggcgtggtggcacctgcctgtaatcccagctactcgggaggccgaggcaggagaatcgcctgaacccaggaggcggaggttgcagtgagccgagatcatgccactgcactccagtctgggcgacagagcaagactccatttccaaaaaaaaccatatatatatttttaaagaaccaatgaaatgaaggaaaaggaaatcggtaagtgagccttttttatgaaattgaaagcacatgtctgcagttaaactgagaaaaaagtttggagcccatctaaccccttgacaatttcatttcaggtggcttctatgcagtttattaatattgtagtccattcagtagaagatatgaatttcagagttcacctgcagtatgaatttaccaaattaggcctggacgaatacttggacgtgagtatagctgtgacctttggctccaatataagaattgacttattattgcctgccctcaaaggtacgcttccatagcagctaaagaatgcctaaagctctatgcagtcaactactgtagtgctagttaaagggaactgagctgagtgatgtactctgccagagatgctggattcttgcagggctcctgggatctcaggtcatcttctgctagcagccttttagtacgggagtcagataacctcttgcagccttgctgcagctttcctctccttttgagcttcatctgggtcaagtctcattgcatccttcatctgggctattgggcaatttgtgttcttggttactccggggaccccatctgggcagagaaagtcaagccaagactgtagagtgatgagtcagtgcttagagcataaaaaaaaaataatgaggaaatggacaccagagacttcctcctgaagctgctaaattctgcttcaagtgtttgtggctttagaagttccacttttagttcttaggagaaggaggtttaaagtttccctttttctcactcccttgcagaagagtttagccagttccctgaagttcttcagttaagaaacagaaacttgtgaaaatcagaaatggtcttgaaaaggctgatggctcacacctgtaattccagcactttgggaggctgaggtggaggatcacttgagcctaggagttcaagaccaggctaggcaacatagtgagaccccatctatacaaaacaccaaaaaattagccaggtgtggtggtatgtgcccgtggccccagctgcttgggaagctgaagtggggggatcattggagtccaggatttctaggctgcaacaagctgtgattgcaccactgcactccagcttgggtggcagagcgagaccctgtgtctaaaacggaaaagaagtggacctgaggatccaggcagttttgttttcccttttgtataggaatggtctagtgatagagcaagaattgttgacctcaatttccttccttttttttgagacagggtttcactttgtcaaccaggctggagtgcagtggtgcaatcttggctcactgcaacctctgcttcctgggttcaagcgattctcatgcctcagcctcctgaatagctgggattacaggcactatgcctggctaatttttgtatttttagtagagactgggtttcaccatgttggctaggctagtctcatactcctgcctcaagtaatgcacccagccggtgacctgaatttcaagcctgtttccagctgtgaagaatatagaagtacttcctttgggcatctcaggaattcagttgcccatctttgttagagataaacccaagggattgcacagactgtaccctcagtttattaggagacggaatcacagaggtggttactctcaacctgaaggccttgcttcctagactggctgggctgcccttgaatagatgggcctactgttgtctaaagactactcagggagaggcgtaatagatttccattaaaatgttgtttgaattgctttcctttttatttaaaggctcatttatatcactggcagaatattgtacagaaagactctttcttactttgagatcaaggtttgtctatccctttttctcctatgctctaaaagtatcagtatttgaacaaaaattggatgtataaattcctagcggtgttttgggtttggttttgtggtgtctgagcagagcttgtttatgctgtagaatataacggcaggtacccacttatcactgaacacctgttattcattgtgaatctcatgaaaaatcccattaagctgcttctccttttgttctagcctttgcccttatttagaagccattctcacttgtgactcataaatgaaaacagaacactctctcttcagaataagctgtattgtagaattccagattaaacctaggggaaaatccatttttctgaaaatttatgtagagtggaatttctcttaaaaatgtaagattttttgtcaaaactctgtatttctttaacttcatcatgtgttgactctggaacctaatagaggtggttagaagagtaatgtaaatgtatgctatataaatgcttcactagtttacaaaaacccagccttgtaagtagccattgatttgttcaataaatgttgattggcatcatccatgcaccaggtattattctaatcactcatctgttccccagggaaagtcatgacttatgttacttgtagggaagattcactgatttatttgacctctaatttccagagctagctgagtccctgcaggatgcctagtttgggaggcagtgaattggggaaagctttctgatctgccttggggagccctgagctgttcatgctgtatactgacttagggagggatgtgtggaggttgggctctagcaatttgtgctaaaataatccccaaggctaagtataaactctgtcagtgtctgccccacctctcgcctaaccttcttcccctactggaaccactgtaactaaccaggtaagataccaaacactccagtcttttccactacacagatacccctcaggttttatgtggccatgactataacctgttaaagctgcttttaatttttctgttgtcccaatttcatgtatatcaaaatgttttacataggaatataactacatggggcagtaaggatttgggggaaaatgtgtgtgcatttgggagagcgtattcacccgaaagtcatctgatgatactgcttaggcagtcactccataattctcttaaggaagatgacatgttaagctctcttggaaagggctggactatttgtcgaaaagaaaacacatagactggctgggtgtggtggctcacgcctgtaatcccagcactttgggaggctgagccgggtggatcacgaggtcaggagatcgagaccatcctggccaacagggtgaaaccccgtctctactaaaaatacaaaaattagctgggtgtggtggcgcgtgcctgtaatcccagctacttgggaggctgagacacgagaatcgcttgaacccaggaggtgaaggttgcagtgagctgaaatcataccattccactccagcctgggtgacagagtgaaactccatctcaaaacaaaacaaaacaaaacaaaaaacaaaaaagacagactcttaggaaatgatgttctatttccatagatgagctaacaccacgttctctcctattctggtttttagaagctgaaacacactgagagtgacaagcttcaagtccagatccaggcttacctggacaatgtttttgatgtaggagctctactggaagatgctgaaactaagaatgctgccttggagagggtggaagaactggaagaaaacatttctcatgtaactatatctcagaaaaggaaaaattgcttacatttcagctggttgcaaagcagaattaatgtcagcttttatggtggtaaatttaaggatttggagtataggaataggccataccctgcaagagagagctatcagaagctgttctgtgttttttccaaaaagcagatgtgttatgtaaaatgaaatagaatctgttgctttgctttagctcacttacctgctcagtttctgctgaggtgcatttcctggcagtcttgcttacaggctcaagcagagtgggggtgtttgatgattggcattacgtaaatgattagagggaaattaaatatgagaatttggcctgaggcgaagaggtatcttcttatcaactatgtccacacaaacccatggacaggattagctggtgtctctgtgatgcatgtctgaacattcctgtcttacggtactcaaattcttaatagagtcatttcaacaataggcattttcaaggacatcggtgtgctttctcatatatcctgttctttgaagaatgtcctcagtatcgttgtcagctctatcacaggacagggtctcatttttctttgagggatttttcttgccatagactgatttgaatatgactctaagggcctttagagattatttgttcattcattaaccacatatttcagtagtaaaagaattaacagaaaaatggtgcttctcaaaaacccaagcattatgaagaccaaattcttttggtgagtctggtgagcactttccttgattatgaaatgaagtgtctccttttggaggattattattttctcctttgaacagttcatttatttttctccacatgttttttaaagagtgctgcatatgctcagtttccttcacctttccccatcactgtgaaaatgggtctcttcatggctgtgggtaagccaagttggtgagccaaaaaccctccctttaaaagtgccgctatgacccagctggcatccgcttaaaaagagaattttacaggcccagtatatcttcccttagaagatttgtgttatatgctgaacccaatcagtgtaaatctccactcttcctccttaccttgcctccctggttttctttacttgtaatgaatttaaaggagatgttagaaatcagaagttgctcagtgttagagccctatgtgaaaagcagctgtttaacacatggctcaccctgtctttctcctgaagcctcagccaacattgcatgaccatacttacatgtccacttttgtagcagcaatctatttgaatggcctcccccaaataacttttattattattattatttttgtgggttttttttttttttttttttggagatagagtcttactctgtcacccaggctggagtgcagtggcgcgatcttggttcactgcaacctctgcctcctgggttcaagtgattctcctgcctcagcctccctggtagctgggattacaggtgtactccaccacacctggctaatttttgtattttttagtagagatggggtttcaccatgttggccaggctggtctcaaactcctgacctcaggtgatccgcccaccttggcctcccaaagtgctgggattacaggcgtggcaaccaacttttattacttgcatagtttggtcaaaccaagcagtagttgtttttcaactggctacctagattgaaagaaccaagtttactgtgttaccaattttcaaaagctttaggctgatggccctttcttggcatggagtgggggatggaggtggactttccctcctctttctccttactttcctctacccttgctagcccctgcagaaatggagggaggcacactgtgtatgttgaacactaaggagcagacatgtgggtcttattaagaatcatgtctaagttatcaattcctggtagaagcaaatatgtattcagaaccatattataaacattaccatttccagaaaacaacttgcggaacacatgcagggccctggtccctaataatcttggagctgcactttctgagaactgagggctgatcaagatgatcctgtattgtgacagctttcttttcaaaattttacagttatctgaaaaactgcaagacacagagaatgaagccatgtccaagattgtggaactggaaaagcaactcatgcagaggaacaaggagctggatgtcgttcgggtaagtgtaatgatgacaactgcccagatgggcacggtagggaatgtactccagctttcgtccagtggaacgcagagtaccttcatttcagaggaatgcattgatgcagcatatttattggaaacctttgagaggtgatgctcagttgaaaactacacatagtcggcgttatgtatacacatgtgtgtgcaatcagatactgggggttcagtatttccttatcacagattttgggagcaacagtgttttcccatctggaggaggctgagttaattctgtggaacacccatttggttggaaataaaaacacagcatggatttaattcatgccacttatttatttttattaggacttgagcttctttgtatttttttgctttgcttccactcaaaaccagatttggtggttgctgtgtaaacagtgaaatacaacacaggctaggcttaatggcattcaccaaaaaaagggaggggatgtgcaaagcaaacccaatccattttattatcagctaatcccagctattttatttggccttagtattgtttaccttatgtgccaggtatttatggagtgccatccctgtgcttggaattgtgctgaacataagaacaccaaaatgcctggagagctttaaggcaaatggcttgcctttacaccactgctaatgaaattgcaccttttatgtgatggttatcgtgtctgtgtgtgtctgatatcctgacatgtcctacagttcagtccaggaaatatattttctggcacgccttcgagacagagttgtagcatatggactcaattcaacttcagactcttagattattagtaatagacagggtgtgaagaatgtttccctgcttgctggaggtttgtggtgagagatcgcttgtacaaggcccagcaaggaagttcagttccataaaaccctttcactagaacctctatgggccccccccttataaaaggaaccaggacagtctttgaattgaaaattgtaacttctttgttttctgctaaaaagctagacagaaataagtaattagtgaagggaagctttggcctgttttgttaaccgcattaccgatgggaaaatgttacaacaatcgctatcctgagcttggtcaagggggcgttgtgagggccagagaaagccattcagaaacagtcagcccctggttactcatgagtagattattccatgctttgcagatttttaatcccagtctgatttgtatccaagtctgatttagggcccttttgtctattgttagctgatatgtgtatctaagagttacaaatgaatgttaaaataaaaggaaggaaaacatgcaccaccagaacaccctcaggagattccagagtcagcattccgggtcatttctgctctgtttctttccacctgcagggaaaattgagttagctgcatttattaaatggaaagaacttcattaccaacaacaatagctagaatatattacatgcattactagcatacaactaataattaatgggactttataggttctagctgaattccaaagaattcccattcatatgagtatctttttttctctttatcctcagtttgccaatctgatgctactaagtatgaatgttatgtgaagataaactcttgaccttggactttattgcaggaaatctacaaagatgcaaatactcaagttcacacattaagaaaaatggtcaaagaaaaagaagaagcaattcaaagacagtctaccctggaaaaaaagattcatgagctagagaaacaagggaccattaaaattcagaagaaaggggatggggatatcgccatactgccagttgtggcttctggcacattgtccatggggtcagaagtggtagcaggtaactctgtgggacccacaatgggggccgcttcctcaggacccttgccccctcctccaccaccactgcctccctcatcagacacacctgaaacaggtaagaagccttggcaggaggactgaggaagttttggaatatttgtatttcttcttttgccaactgtccacttctgtcctttgtccgtttttgttggcatgttctttaagaattggttttcttgagtagttcttaactgtttacattttgagattaaatttataaatcctcatttcacatatgttgaaatatttttcccacatgtcaatgaggacattttttggtttttgaaaacagtcctttgtccttttaagtgtgttgttttcagatggctttatatgcacatggcttattgcaggaaagccattcccgtattttcaaagtccatctgtttcttttttctttgctagtgcaaaatggtccagtaacaccacctatgccaccgccgccgccgccccctcctccacctcctcctcccccaccgccccctccgcctcctcctctcccaggccctgcagctgagactgtaccagctcctcccttagcacctccccttccctctgcacctccgctgcctggaacatcttcacccacagtggttttcaactcaggattagcaggtaagagcacagaattcaaacccaggtactcatatcagaaatgctgtcttatctcggagagttgaagctattctttcaaagtccaggtctcttgcaatgatgtgtatctcttcctagtataagaaattcctgctgatgtagccgatagagggaacatcatcacgcatgggaggcactttgctctgagtagtctttgtcacaaccacaccccacaatgggaggttctgatctcctacaccatcttcctgccttccactggccccaccgagagaatggaagagagacaagctacctgcttgaggatcagtgcatttttgtgggttcagcagatactttctggacacctgtagtattcaaagctcagtattaggcacagacattgagtgcttctggatctttttttttttaaatggtatttttgatgtcatctataaaagggaaacatgcttttatgtgtaattgcctgacgtaggcttccaggcatgtcttctgagcattcgagaacatcagaatttgctagagtggatttaaacttcaaggaggaagtgctgccaacagccgtattatcatgccttaaaatgctgccaaataattcatgtcctcttgccaaccagaagatagaaaacagcatcctcacctcaccagaaataaaatgggaggtaggggttagagcaggaggaagagtcactctaatgccttgaaatctaagctctttgttttgactcacggaaacaaagatgacgctacgagccgttttctcagtcctgaagtgtttccctggcatctggaattgctctaagctttgccatccctgtgacgtggggtaattctgcctcctcatttacttcagcctgttcatgaggtctcttatttacaataaagaactaccactctaatagcctccatttccaaggctgtgatagttctcagagccttttgcccaaagtctaaaagccagtcttagctgtaaagatttcccaatctccatcccttccaggatcccatctgcagctctgccagccggtcactggggctcattcatcccaatgactggagcccttttggatgccccagagtcacctagaataaattcactccacatcaaatccatggttttacttccaccccgacttctatataaaactgtcagggaaacaagattccagttcacagtaaggtccacagtaaatcggtgacttatttctacccttcaagatcttccccgtctaccactttcttctagaacttttattacttctgaaggagaaaagttggagcagagtcatcgtggaactgatggactatggaatataaacagacaaacaagaaacctcatatcaagccccgggaatgtgttccatcaccaggctgttgtcagtaactgggtgtggaaacccattatcgtcccgtgcacctggccaccctgattaggcactcttggtagcccccaaggcgcacttgctgtgagatgtgtctgctgtggtatctcatttggggctgcttcctttgtctctgacaaacgctgatgtgtgatttagcacccacttccacgcacctgagcactaacatagacctcagaaccgccttagccgagtgagagcccagaggctgagatgtgtctagagcttccttccaaggggccatgtcctgtgtgattgatctatttattaattgttttgcttgggttcttcccactacttgattttaaaaatgtgttggctctgtcaattgcctcaatattttaaggtgtagagctctgtgcttggctgataaccaactgcttttagggtttgctatacttggaagtggtccctgttgtggctcatgcaatttagaggactgtaggtgggaatacaggaactctttatttccataagtgtccactaaatgattgtgagggatgtcttggaagcattataagatccttgtgagtctttgatagctcgagatcaggcaatttctccaaggcctttaatctttctttattattcatccttatttagactgttaattcttagtgattgaagcccatttggtgagatgttttgctagtgtgttgagtaactctctctctcactctggaaccaagaggccagacagaatcaggatgcccagtagaatgaagagacagagctgagctaatattctgaagcctcctgggaagtcagaaacctatgacatcacttggcctctggacccacaggcaacacgagggtcttatctcttcaatgggcaggtgtgttcttggagaccaagacagaagaccaagaggagagccccatagtttatctagttgagagttttctttgtattttatagagaaaatagtagtagtgtgaaatatgcatttgaagaagaaggcttccttcctctcaagtctgtgatagaacaacctggctccctttcccccggtaggtcacctgagacaggctgctgagcaggtggaacctttgccgtctgtctgggaggatgtgctcggatcctcacaatgcgaatttggactttggttgattgtttttcatgtaaaaattattcctatcctatggaatgcctagcacagttcagtattgctgtttggtaccactacgatgaaataatttttttcttccctcttctaaaaaggataattttaaaaatgaaatagttgagtcttggaggcaggcctgaatggaaatgaatttttggctctgtgccgccttgtgaaatgtgtccaagaagcatgaaattctatgctgagtgcgtgaactgctgagccacttgactctaaccatatctaattttttttgtattttctctgttctttctgcttccacaaaagatgggccaatcaagcttttctgtaggttgctcctcactgagtgtgttgagtatttgccatgtgtttctgttggtcacactgtgccttgacatctttccactccattttgctttgatccattgcattttgactttgtgtctgcgggaagtcttggtggtggctgatgatgattccaggtttgcccacacattctagttgaacctacataagagactattgtccttgaagcagacatcctggattcatatgccctcttccatttcctctgagaaaaggtttttttttttttttcttcttcttcttttaatttttatatttgtatctgagacttcaactctaagaacaaaaaaaaggtgccaggtgccccttttccattccctccctcatgctggtctctggcccactccagggagcactcacccgcctttagcccgagccatggggacacagtgtgtccagtggtcacctatgtgctttcctcctcttcccactcccaccctggttaaagccaggaaaacctttccaaggaggagaactttcttgcctgtgttctgatctcaggcttattcctgaccttgctaaatagttagaagggtggttgcaaatggcaaacttctagcgagcgtcatgagcctaccatgtctgtgggaggaaggtaggacgccattggcaccaacctgtcacctcaggttatgaaaagactcctctgcggcccttctgctgctccccagatccctaacattgccgaagtgccagaggcaatgctagggcaagtgctagaggaaagtctgttcctttgtcccatcgagaacatctgttttcctgggtagcgtagacaaaatgctgtacggtgaggaatctgacactgtggcgtagtggggacaaaggtgtcatgtttggtggtggagaggcctggtttggctaaagctgtgtctgtttttctgcatgcttttgtgtggatttatcagatgacattcctgctgtttaaatggcctttgtaactctggaggaatgagaggcactgtctgtctcagttaacgccaactgaggcaggcaggcaggcagccagctacaagcttagtcgtgtgttgcttttattttgttctgcactgaagcgctgaagttctcctccctgtcttgctaataatgacaaatagtgaagctcccaagtagtgtggtaggctacccagaacagactgacgaagctgaatgtgtatggctaaatggtttgggaagacttctttatgatatataatagataaatataattttaaatggattaccttttttggcatattcccgcacagtgagaggagttggcactccccatagtcccttaaagatacatcccattctctctattaagaggttttcagtatttttaatgagtgtgtagatacctcctagtcaaacacagctgactcctgggaagaacttgcttttcaaaatgaagggcaagggactgtggctatttctgagtctgagaatccatacaattccttcccttccctcccctcccctcccctcccctcccctccactcaattcccttcgcctcccctcccctcccttcccttcccttccttcccatctcaaaaaagaggagtttcctcccttcctcccttccttcctcttttttgagatggagtttcgctcttgttacccaggctagagtgctatggcgtgatctcggtgcactgcaacctctgcctcccgggttcaagcgattctcctgcctcagccttccgagtagctaggattataggtgcacaccaccacaactggctaatttgtgtatttttagtagagacagggtttcaccatgttggccaggctggtcttgaacttctgacctcaggtgatccacctgccttggcctcccaaagtgctaggactttgagccaccacgcccagcaatttcttttccttcccccccgccccttttatttatttatttttaagacagagtcttggtctgtatgtaccccttttttcactctgttgtcttaaacattttcttaggctgggcaagatggctcacgcctgtaatcccagcactctgggaggccgagtggggaagctcgcttgagttcaggagtttgagaccagcctgggcaacatgtgaaactctgtctctacaataaatataaaaattagccaggcatggtggcacacagctgtggttccagctacttggaggctgaggtgggaggattgcccgagcctgggaggtcaaggctgcagcgagccatgattgcggcactgcactgcagcccgggtgacagagcaagacctcaaaacctattttctcatttaggccattcatatcccttagtctgcttgaaataacccagcagccaatatatcttcattatcggaatcacccacaggaagtcagccttcatgacgttgtacttctggtagtctagtcagccactgtctgcagtccctgatcatcttctaaggtttgtttgtaaacatgtggtctgcaaccaagaatttaggatgtccaaatatggcaagtttttgccctctctgctatctagtaacatgagtaataatctttgctctccaacactttttatttgtcccaaccattgtcctaatattgtaactgtaatgcagcaaattagttgcctgagttaaaagaaaaaaaaaaatcaacccttggcccttaagacgtcttttaatacaatgatgtgttagtcaaccaaatgatgacctcaaatggctctggccaaggccatgtgtgttgttttccagctttaaaaacctacttgcgcgcctcttgccaaccttcctccagtgtcaaagtgtcatctgcaaggactgttgtctgattgttcctgagggtcgtaggcttttggtgggatcttaattccattctctttgatgtctttagctgtgaaaattaagaagccaatcaagacgaagttcagaatgccagtgtttaactgggttgctctgaagcccaatcagatcaatggcacagtcttcaatgaaattgatgatgagcgaattctggaggtatttttctcattggttagaaactagaggtgcactctgtgcagcaaagccggcatgggtgttctgttaacctggaagtgtcagagataaagtactagtgttttaagtcccctgatgtaaagaagaaacatgtatgtaatattggagaataacatttgacactgttttgtaaggtggctctaaaactgttcaaagagttatgttaaattggaataaatgcttttgagcatctttagtgtatgccacagaatatagatctgacataataattccttcccttaattgagagaaagacataaaaacttttggactgcaagtgagctcaattatcacactcactgccttatctgatggataattttaatctgtggcagctgtctgtgcaagctaattattgaaaagtaattgaattagtgggttagaatcggtagtctaatgttcacttatttttttattttattttatttttaaattattattattattattttttgagacggagtctcactctgtcgcccaggctggaatgcagtggcgcaacctcggctcactgcaacctcttcctcctaggttcaagcaattctctggcttagcctcccaagtagctgagattacaggcacacactaccatgtctggctattctttgtgtttttagtagagagcgcatttcatcatgttggccaggctggtctcaaactcctgaccttaagtgatccacccgccttggcctcccaaagtgctgggattacaggcataagccaccacatccgacctatgttcacttttgtgtatgtgccagaagttgtactataacaaaaacaagaaaaatagaggaagccatggccaaagacaagtacttaatagaaaaagtgacgtttttgcttaagaaactaactggtggcttccggacttcatttttaaatataatccaattttccatggtcattcctctctatcttaggatttaaatgtggatgaatttgaggaaatattcaagacaaaagcccaaggacctgccattgatctttcttcaagcaaacagaagataccacagaagggatcaaacaaagtgacattactagaagcaaacagggccaaaaatcttgccataactttaaggaaagctggaaagactgctgatgaaatatgtaaagctattcatgtgtaagttcaggaaaattatattctagttagtttatgataaaatgaaaatgagaaagttatgaattagtagatgacaaatatttcaatagtgagacaagacctaagataaaagctggagcaatttttgatatccacacttgagagatctgaactctgtgtgtgctacttcaaagttgaatatgatgccaacacgaaagaggtagaccagaaatcaccctggggagtgttgtattagaaccagtaactaattgttttagaagaataacatctggattgtgacatcatttattatctgggtctactctcttatgcgggcctccagcaatgcttacataaaaggaaagttgagctgagcgtggcagatgttaagaaaaggtagaaaatgtcagttttctctggagtatctggattttatccagatttgttgaatacaaatttgatggcatttgtggaatgatacagttcaatgccagatgcaaatatgatacagatgcatattttaattcgtaacaacaggaatgtgaattgttttgctttcagtactttcaggacattttaaacaaagttcattttttactcttgaactgcatagaaggcattggttttactcctctattagaagaatccttctattcttcttgtggccatggtgactttcaaatgtgatgaagacattattaaatgttttaggaactaattatttataaattgattatcttatacattttggttagaggcttcgaggtgtaaatgaccctaagaaatcctttgttccaattttgtgtcctcaaccagggtcataatctggtagtccagtgcctcctacagtctgttctgatttctgtcattgaatcctgaagtgcagcctggctttaaatctttatatatcttgtttgtcatgatgattaaatgtaattctattatttagctgaacaaagattgtccagagaataatagagaatagagactgtaacaaatacttcatttgttcaaattaagcatatatccaaaaagaacttcaaggaatgtatgcacttaacctaaaacattcaataatacaggcatttggatgcatttttttccaaagaagaaaaaatactaccagactattggtttaattgaaatattttacataattcaccagatattctgtactaatgtgtacagtgttaatctcctgaattagctgtacttcacaatgcctgtcaactatgtgcttgaaccatgaaaccatcagatgctttggccttggttctacctcttcctattttcatttactcctgattccagaggcttagagctatgccagtaccctaaaaactgaggatggcagttgtgacaaggtccacgttttcaggaagaaccagttaagttacctgaggcatagtcaagaaccagcaccagggtgggacttcacaggacagctggagaaatcttagactcgttgatttggtgtttgatgagctgtaccagatggatgatggatggatgaacctgaaaagatggatgaacttgaaaagggggtaggaggtttttctctctaatgctaatctctccacatctgtctttagatttgacttgaagacactgcctgtggactttgtggaatgcttgatgcggttcctaccaactgagaatgaagtgaaagtgcttcggctctacgagcgggaaaggaagcctctggaaaacttgtcagatgaagatcggttcatgatgcagtttagtaaaatcgagaggctcatgcagaagatgaccatcatggccttcattgggaactttgctgaaagcattcagatgctgactcctgtgagtggactgactctggcaggggagggggtccaaagaaatgtggaatcgttattttttaaagtctctcccagaatcgtactcagtgtgatgggttctaaagactccttcccagaactttctaaattgcatttttatttcaaccatcttttccacattatgtatgcaaagtaaatttgaaaaatggggaatgttcatattccatattgccattcttccgaaagaatgccattttttgtgtctacagatgttctctagatttcaaaaggacaggggacaaagaaacttggttcttttctcaaacttggttcctctctgaagatactagtcttctggcagtgttggcaagactgaaaataagactttcatttctaaaaatgttgcctcatctttagtgagcagacttacaagcttttgctgaaagctttatatttaccataagagttttctttcttggaagtttgttataataaactgtggtgatatagacataatagccaaccatctctcattcccttgtgttaatctggtggagatttatgaatatcataaacttcagttctctcccaattctgtttctaaatagactttgttactgattatagtagtcagttctttcccaattctgtttctagataaatttgttggtttctgcttatagtagtatgtctgttgaaaacatgttctgagaacttctggagggtgttatattcccctcccttttttttcatttttgatgcctccttcattgatttaaaaatattaattgtatgacatgattagaggtggtaggcaggaaattgagttctaccagaagcagctgtggactcttaactctgagtcttagtggttgtagattggttacagattttgtgataagcaagttcctatgttacttgctattgtgaacagtttcagtaaagatcgtgcatgtaacaatattacctgagacctagcaagacaattaaatttgttatacttagaaaaagtagactctcaccatgaagcctgtatgctctaaatgcaggcctgttttcttctgtcttaatatttacttgccaattagtttcccatttttaacatgtcttttttcccctttttctttctttgattggaatctagcaactacatgcgattatagcagcatctgtctctataaagtcgtcccaaaaactcaagaaaattctggaggcaagtgcagtttttcttgtaggtatgaaggactacttcagctgcgttcagtgcctgatgtgctgtactgatgggcttctgttttcaccttcttttgcagatcatcttagcccttggaaactacatgaatagcagtaaaagaggagcagtttatggatttaaacttcagagtttagatctggtgagtggactaaaagaaatttgagagctgtttgaaggacagatggctggcagagatgaagttagggtggtggaggatgttttgatgaatattttctgctatgggaggatcaactggtactaattttctggaacaccatttgacagagagcacatagaacctataattactcataccctttgactcagtatttccatttctaggaattttttctcaagtgtctgaattttgaatcctgtattttatttataattgcaaattaacaatctaaaggtctaactgtgggaatgattaaatgtgctgtaacactagttaatacagtgaactattattcttccaccgttagcatactgatgaagagtgtcccaagaaagatttgtgtttagaaaagaaagcagggtatgctttgcatgtacagttgaatctcagctaagtaaactatgtggggagaaagactgaatggaaataggttaaaatattagcagaggttggatggaatcaggaaattttttcaaactgctttttgtaagtacttttctatattttcttaaatttttgttgttgttgttgcatgcagggtgctctaattttcagagtcacctaactaatgtgaataagactagagaaaatcctccgtggactccctccagactgtgcaggcctaacgtgattgtcacatgagaaggctgggcagtgggttgagtcccccgaccagggagctagttatttaatatggagtgtctagtcagtcacagttctggcctccagcagatcatgatcagttaagcatgtctgtttcaggtcttcacaggctaggaaataagggagggcctaagctaaatgtaaaaactggagcataggagccctgctgtgtaggaggcacctgcatgcacctgctggctgtacatccccatttctcctctggctttttactttgaagagcactaaaattagagccgtcctgcttttaaggcaaggaaggtgggatagcagatgcagggctgggagagttcatgtaatcagtgtcccccttatccatgggggctgtgatccaagacccccagtggatgcctgaaacctcagatagtactgaatcctatatatacactgttttttttctagagatgcatatctgttataaagttgaatttataaattaggcacagtgagagattcacaataactaaaaaataaaataggccaggcctggtggctcacacctgtaatcccagcactttgggaggctgaggcgggaggatcacctgaggtcaggagtttgagagcagcctggccaacatggcgaaaccctgtctctactaaaaataggaaaattagctgggctaatttttgggtcacaggcacctgtaatcccagctactcgggaggctgaggcaggagaatcgcttgaacgcaggaggtggagtttgtagtgagccaagattgtgccactgcactccaccctgggcgacagaacgagactccatctcaaaaaaaaaaaaaaaaaaaaaaatagagcagttaaataaaacacgttacttgaacacaaacactgcaataggcggcagttaacctgataacccagatggctactaagtgattaatggcaggtaatgattacagcgtggatccacttgacaaaggggtgattctcggtctagggtggatgggaatggcacgtgcgaggttttatcatgctgctcagagtggtgcgcaattcaaatctgatgaattgtttatttctggaattttccacttagtatttttggatacctgaaacctgtgggtttcctgaaaccatgggaagtaaacctgtgggtaaataggaactactgtagaggaaagctgcgaatcattcttaggtgcttagagtcatccctatagttaagcatgtgccctggttggaaagtccttgagccagttaagcatcaatggactggttcactaaggaacaaatggaatcctgaccctcctctgggaatgctccagcctgttgggcgactgttactcagttaatgactctgggtgggaaatcgtcacctgaggggtaagtgtcttgttaccctttactcttgtacctaacccacgttcccttttgttttcagctcttagatacaaagtcaacagacagaaagcaaacactgttgcactatatatccaatgtggtgaaagaaaaatatcaccaagtgtccctgttttataatgagcttcattatgtggaaaaagctgctgcaggtacttgatttcagctattaccgttcgtcttgggtatttaatgcctttaattgtggtggagccattccctgcttaaacacttttcagaacccatttaaaaagccaaggctaagaagtcagacacactgagctggaacacatcggccgtggtgttgtccacccctgagagcagaagagcacatgggtgtaaaggtgatctctgtgtcctttctgtaagacacaggccactgagcgtcatgtcccttccctcttttattcactgccctttttattctgctgctattgtatgaaatgtgagaatgagaatctgagaatcatcacccaacaaacacttttaatttgattttgtgccattctacttgctcaagtgtggcagttgtaaacattttgcctttgcctggacactagttaaattattagcacttcttggttgctactttgctaagacagttatacattttgtcatttaaatcatctgtgactctaagatagctgggatgtacaaggtaatagtatctccattattataggtgagaaaattgagatttttcgaggttaaatgtcttgcccaaagtcacatgagtagaaagtgatagaaacaggactagaaacctggtcttacttctcatgaagtgtattatccaatgtaccatgttccctcaaaagcatattcgattagcaaaaggaatgatatgcagattgaccttacagtcatttataggctgtgattctcaaattgtgatatcgaaccataagcagccagtgtttattataaattcagattcctgtggggtacctcaggcatctggaattttggagggtgaggccttctctaactcagccatggtaaatggctgctgcttctgtgttctcactaaagaacactctggtctaccctctcgtacaagatttctcatactgtattacaacaatttgcatgtccattgcaatctgtgctcttctttttttttttttttagacagggtcttgctctgtggcccatgctacagtgcagtgacatgatcacagctcactgcagtcctgacctcccaggctgaaacgatcctcccacctcagcctcctgaggagctgggaccacaggcacacaccactatgcccagctaatttttaaaatttttgtagagatggggtctccctgtgttgcctaggctggtcttgaattcctgggctcaagtgatcctctcgcctcagcctcctaaagtgctgggagtacaggtgtgagttaccatgcctggccaatctgtgcacttcttaagggtatatcaggttttatttatctttctatttctctcagcccctgaaaattggatgttggaaataaatgaatgaacaagtgaacaaatgaatgaatgagatgatgcactgttacagggacaaatgctgcagaagctgtggtggagactgagaggcagatggagatgactctctgactatgaagaactatatgacgcaggctggatagacctagagcaagttcggggctcacttagacagtaggcagaatttctgttctgaccaaatgattttcctccttttaagtttccctttgcctaaattaattacacctcacaattctaattaagaaaaatgttaaaaagctattataatttctacctgaccaatgggtactaattcattttgtttggtccaaatggtgtcatttgaaaaacatcggtggggaaaatgggagactgggttgctccctggcagaactgttctttctgtttgctctctggtgcccaggttgcccaacacagattctgtattccttcactcatgtgttcactcactccttcatttatccagtgaacacctttgagtgccctccatgtacttggcactatcataagtattagagaatcaaggatgataagacagtgtgagtctactgagggaaaaacctactgcactgttttagtaggttggtgcaaaagcaactgtgattttggaccgtgaattatcaatcattataactaggctcaaacatctttattatggccgggtgcggtagctcatgtaatcctagcactttgggaggctgaggcgggcggatcacttgaggtcaggagtttgagaccagcgtggccaacatagcgaaaccctgtctctactaaaaatacaaaaattagctgggcatggtggcacatgcctgtactcccagctacttgggaggctgaggcaggagaattgcttgaacccgggaggcagaggttgcagtgagctgagactgtaccacttcactccagcctgggtgaaaagagcgagactccgtctcaaaaacaaacaaacaaaatacatctttagtaatcaaaacaggaaccattaagatcaacacatttttgccaatgagaaataagtttgtttattcctgtagtgaaaaaaatctgtgcttctagattcaacaactcttggaaagcattttccgcatcctgctggttgtggaagcattttccctgcaaaaagttgtcgagatgcttgaaaaagtggtagtcggttggcaagaggtcaggtgaatatggcggatgaggcaaagcttcatagcccaatttgttcaacttttcaagcgttggttgtgcaatgtgcagttgggtgttgtcgtggagaactggaccctttctcttgaccaatgctagctacaggcgttgctgtttggggtgcatctcattgatttgctgagcatacttctcagatgtaatggtttcgctggaattcagaaagctgtagtggatcagaccagcagcagaccaccaaatggtgaccatgacttcttttttttttgatgcaagtttggctttgggaagtgctttggagctgcttcttggtccaaccactgagctggtcattgctgattctcatataaaatccattttttgttgcatgtcataatctgattgagaaatggttcgttgtgtagaagaggagaagatgacacttgaaagcaacgattttttaaaaagttttctctcagcttataaggcacccacttaccaagctttttcacctttcaaatttgctttaaaagactgtagaatggttgatgttgagttcttcagcagcttcttgtgtggttccaagaggatcagcttcgatgattgctctcagttggccattgtcaacttctgatggccggccactaagctcttcatcttcaaggctctcgtgtcctttgcaaaacttcctgaaccaccaaatgcattgccaaatgcattgttgatgttgcgagttgtcttcactgctttacaacccgttttgaactcaaataagaaaattgcttgaatttgctttttgtctaacgtcatttccgtagtctaaaataaatacaaacagcaagttaatacgtcattagcaaaaaaagtgagaagtgtgcattaaaatgatgtataacataaccacattgatttaagaatgtattccaatatcaaacagcagatttcagcaaatactgcagttacttttgcaccaataatttgtccacgtgcagagttgagtcaggcaagggggcccagagctggtactcaacgtcctaaagaagctgctcaggaggctgtgggggagtgcctgccccgggaggggccacactgcagacagaaaggttcacactaaaccttgctgaatagggaggggttgttagctgtgcaaggctgctttgggtcctagtaatcaatacaacctatggtcaaccgacaaaaggctgccccctgctggagagtcagagaaatgcaaaaagagttgtaatcccaacactttggaaagtcggggcaggagtttgaaggtgcagtgagctatgatggaaccactgcactccagcctggatgacattgtgaaaccttgtctctaaaacacacaaaaccttaggcttgctgcagataaggacctctgagcctacgggcccacccataggctattcttgtaagagaaatggaatagttttgtgcaagtgtgggatttagagtccacatttgttacctgaactcctctgccacctactagcagtgtgaccaagggcaggccacagaacctctttatgctgcttttgctcattgacaaaatgagctaatgatgcaaatgaactagtgcatgcaaagaatgtaatgtagtgcttataatgcttctttgcattaaaagatctctgtgccaaaagctggaagctaggtttagggcccttgagtaagcctaagaatctcctgagaacttggcccagcagccagattcgctgtggttgtgacttccccattgagtttcactgggatgttctttctctgctttagtctcccttgagaatgttttgctggatgtcaaggagctccagaggggaatggacttgaccaagagagagtacaccatgcatgaccataacacgctgctgaaggagttcatcctcaacaatgaggggaagctgaagaagctgcaggatgatgccaagatcgcacaggcaagtattggtgcccctgaaacctgtgaagaggctgcatccattaaagctgcctgtggtgcaggccctgtatttggggagaaatgttccatttccctctgtttgtggagggtagctttcttgttgtaactattatttattacggggggaccattcccagggttattcttggaagggccccgtcctcattgtccttttctaatctggggctctttaccctgtcccctccccctcccctttcacttcaatactcactccagtgtgggtgctgtattcagttcagcccacatgcgtcaggcctgtgctcggcaaagcagtgtttcctgtgtagtgggtttctgtagatcttgtccttgaaaatcttacactatactgggggttgctgatagataggcaggcctgcaaaacagaatgaacagtacgctatcagaagaggcagaggcaaagttgggggatggggactcagaaagcagattcagtggaagggcctctggtttggggcaatcttgtatcatggaagagttcaggcagagactgagtgtcccctgtgtgaggctgtcatagggagtgttgaagcaaggaagtggaatttagggtcagagtgaccaagatcccttttgaccttgttggttttaaggggttctgccacggcctttggaaactcctgtaagaaagatttccttgttttgtatgtggggtgtgtgcgtgtgcatgcatgcatgtatgcctgtgtgtagaagtggcaggaggtcctgcagatgaattcctgtgccccactattgcattcctcggattgcctctgctgaggcgtttggaggaaacacggaggcgttaggcaatcttgggaggtaagggaggtgcagcaacgcaaggccatgggagcctctgtcttgtggctgctgctttgcatcagcgttccccctagagcatccagttcaaatgcctaactaatgaaactcaagaaaaatttgcttcttcacaggatgcctttgatgatgttgtgaagtattttggagaaaaccccaagacaacaccaccctctgtcttctttcctgtctttgtccggtttgtgaaagcatataaggtatatgttaaggccctccttgcccttatttctcaagcaattgccctccttgagatgtgtctgagtcccaactctctgcagaggcctcccagttcctgtggacagcagatctgggtggcattcacgagatagcagtccctagctctgtggaggctgagggacattatggtccctttctccacctagccagtcctctgcctcagccagaaaacaaagctcttggcagcccccttggggcaagggagatgctcaaagacattgctgccccattgactgttcacctaggcaggcaaggtgaagtacttgaaaatccaggcctcttgtggaattctttaatgggtagaagtgagctgtgggctgtggtgaaggtgcatgatacagctgaagttaaggagagcctgcttgtgtaagtcatagcacagggcttaggacctcttagaccagcatttctctagtatggactaaaggatggtgcttttaaggatgggcactctctgtttctttgtgtggatcagtaagtggcccttcctttaaatgggaggccctcttggacataatccagggctgtggtcttgaaaaagcctatgacgcaaagagacatgtatcagaaggatttgtccatttgagaaattacaagaaggctgttagaagattttagctgaccttggcaacacctcaatctatatcctccaggcgtatcttcatgtagcactgataacactggtggaggtaggaggaatgtttattgcagaggggaggagggatgtggcagggttctccacacttttgagaagtcctgttggaaatagggggacacttccctaacaccactaggggctgaaggctctggaaaatcattattgggccttttactaaaactcagaaagtcaaaatattcttagcccatcttccctcagcatggcttaatgtagcagtagagctataagctgctggtagaaggaacgtctgtggcagtcagggtgaacagaaacacagcacaaactccgtgtgccagactcaggatttgctcgtgatgagaaggctgcgggccaccaactgctgccgtctgcagtgcttggtagcccaagcccactggctggctgtgtttatgtgctgtagagatagtctgcgatggcccttgtcatgtgctgtgccatttttttcacataaaaacatgtaagtctaaggtcaaaagagaaaatatattttaaaatcggctaagacaggttgggaagtggctggggtttgtctcaaagcctgaggcatcagcagggatatgcgtggagcagaggaaaaaagaagctgcccttggtggtctgggctgtgttggaggtcccagcctgtccatcagcgtgctccttccacctcactgttcctccctgtgatttttcacagctgattcagtgaagcatgtgccaggcagtgatgtgactgccaggatgtttttcttgccctatacgtgatgaatagcctcctagcctggcactcacctagggactttgtaggcagaggttggggttttaggacatcatccctctcatatagaccaaaatgaaaacaaaagcaatggagacccaaatgtaaactttattactgataacagctgggctggaggatgtggtgtctgtgaccttctgcttcagctgcaaattaggtagatgacctgtccatcagttcacagcttgacaactagaggtctcttcggggaggccggcttcaaaagaaagagtgcccaagagggctgagctgaggtgagcctattcactttcttctagattcatcagactagtcacactgccttccttgggaaggagcaaggcatgggagagtccaagagtgtcactctggtgaggccccgaaaagaaatgagggttttcccctaacaataggcagaaggcagaagaatcttagatcctgctatcagaggaactctaggtaggcagactgtctctgaaaggaaaacaaaatcactgagcacagctgccaggatggtaggtgcccaccagtgtgtgggacagagactaagagaaagttcaaacagggagcgatcatcaggaaaggacttctggatgaattgaatctcagctcccagcttttaaagagatgtgacaggtagcgaagcccagaagcagagctaaatacaggcataaagtgtagatcttctcaaccttccatttattgtaattctcaactcactaaggatgcttgaagaatgactttaaaaaatcttggctgctctcatttccattaacatcatctttctggttcttttgatttacccagcaagcagaagaggaaaatgagctgaggaaaaagcaggaacaagctctcatggaaaaactcctagagcaagaagctctgatggagcagcaggatccaaaggtaagaagtgccgcactcatgagacaggtccgtgaggagaggctgagagggctcttcagagcaagccatacaaaggaccagcaagccaggtgtgcccaggatcctgaccacttccttctggtgcctggacacttggcaaatggaaatatgctcattgattactttgttctgcaaccactggaatgaggctaagagcatgtttgtgtagcatatccaagcgtatagacatctggaacttagttggatatacagagaggccacaccagatgacccagtgaccagagggcttagcatccagagaaggctttatgcagatgcccattggtgctggccttgatagctggagggacttgctagcaggaatggagggaacatttcatggagggcaacctcgttagtaggtaaagagcataaaggctggcagtccaaagttttcttcattgtgatccttggcaacacagtttaagacatctatggtcattaccagttgcctcttgttgccgtagactccagccttcttgttgctgccaggtgaagttttgtgtgttcgtcagtggaagtttttgtttccttcccagaagcttgagttctctgcaactgagcagaatgtgggatgtgtgtgtgtttttggccgaagctgcttattagtaacataatgctcaggcacattttggattttcacaaactcctaatgggtgctggcctcactaatctctgcccttctttcttctcagtctccttctcataaatcaaagaggcagcagcaagagttaattgcagaattaagaagacgacaagttaaagataacagacatgtatatgagggaaaagatggtgccattgaagatattatcacaggtaaaagatatttcttcactgtggcccatggagatcccactggcctcacctagactgggatgcatgcagattttgcagcttcttttgtccagggttgtcaagttcattagttgactttattcacacccagagtgatgcagagaggctttgaagtccatttacagcagcatgtatactgccccaatactctgcattggaaccctgtaagtttcagcagagctccttcatttaaaggatttccattgttattgatatgtcatcatgctccattttttttttcctcgtggccacacctagccacctgcctgattaataaacactgtggacaagacccattcagcaatgtactaatcacagtccatggatgctctttaagagcctctttactcattcaaagtaactgaagtcagtaggtactttaatttgggtgagccaacaggcttccagcccagggttgggaactggttttatcagccaagaattgtgttaacccagcctggttcctgtctgattgaattagcataatgctatctcctcgaaccaattctcccaaatttctgtacttccttttacagatcagagtaataacttgggcactagtaggagaggcagcaagtgacttttccttcatgtctgttgcacatgaatgttgcttataagcttccagatgcttatagctttttataatgggacagtccaataatatgcagatgtactgaaaatagtatgatgaggtcccatgtatccctcatccatttcaacaattacgaactcatggccaatcttgttacatgtacactctacctacccccatatccaacccttgacaaccaagacgtagaatttcacttggaaatatttcagtatgtatcttcaaaagataaggactcttaaaaaataaaaacaaaaacatactttacaccattatcacatctaagaatcccttaatatcaaatatctagtcattagttcacatttccccaactgtcctgatttttaaaaatagaattcctagactcttgatgtctcatttcttttttttttttgatggagtctcattctgttgcccaggctggagtgcagtggtgctatctcagctcactgcaagctttgcctcctgggttcacaccattcttctgcctcagcctcccaagtagctgggactacaggcgcccaccaccacgcctggataattttttgtatttgtagtagagatggggtttcaccgtgttagccaggatggtctcgatctcctgacctcgtgatctgcccgcctcggccacccaaagtgctgggattacaggcgtgagccaccatgcccagcctgtctcatttcttgttatagcttagtgaacattgtacattgggatcctaaatggtcaaaaccacaaatttttttctcaacagctcaaacccagggaaattaaatacataggttaggtgattaggtagattagatagattaaaaaggaagtcaataatgaattcccttccagattaaagcagtgtaggtcttagatagtaagtggctgatgaaaatgccattctctacacatggcacacacactctgcacaaatgtgcctattggtatctcagtgtacatagtgcagtggcttatagatgccccccagataaaaccttcattgtagcactctccttgcctcctccatgctgggggagaaactccaccctgagcaagaccaggagcagagctccttcctaggtaagcactttttggtctcagtgccataaaatgaagttgtagttagggaagcatccagccttgctcattaagaacttggagttcctggctgggcgaggtggcccatgcctgtaatcctaagcactttgggagggtgaggcaggtggatcacttgagatcaggacttcgaaaccagcctggccacatggtgaaaccccatctctactaaaaatacaaaaatcttagccaggcatggtggctggtgtctgtaatcccagctacttgggaggccgagacaggagaattgcttgaacctgggaggtggaagttgcagtgagctgagatcatgccactgcactccagcctgggcaatagagggagactctgtctcaaaaaaaaacaaaacaaaacaaacaaaaaccaaagaacgtggagttcctttttcattagtatgtcctccatcccaattacacctggcgttataaaatgaatgtacattttctatttgcttgatctaagtcattaatctactagaagaggggaatgagtatctgtttatagggcagtttttatcctccttggagtatttttcattttctgatccaccccaaagccccagataaattcctttgtacctttatgaactaacttgagtatatattgccttccccctttcctgcccatcttccccacccccatccccaggtatgattaacaatgcactaaccatgtactaatgcaatagatcttggctttttattctcttctgtttgtgttgtttggctgtcattttcaatgcagtgctgaagactgtgccctttactgctcgcaccgccaagcgtggctctcggtttttctgcgaacctgttctcactgaggaataccattactaaactattactctttctcacctgatgctcttaaaaggttgctacaggttttttgatgtcttatgtccccctctgtgtgtctgtcagggcccaccaacatgctagcatggaattgccatctccatcatgttatattttgtgttgttctcatgctgcatggttttgcatttcaattattattgctcactcactggccactttcaatacatgtatgtattcacattgctgtaacagtctgggtgtgtttgacagctgaattcatagaattgttcacagaaattttcagaaaaatagagcaaaaatattaagagcacttctttgagaatcagtattggtaccaagtagattgcttataagatttttgagctaatgtccttcaacatatccattaataacaataactgctatacctaacatgtattaagaacttactgtgttcaggttggatgcagtggcacacgcctgtaattccagtactttgagaggctgaggcaaaaggatcacttgagcccaggagtttgagaccagcctgggtaacatagggaagccccatctttacaaaaatcagctgggcatggtggtgcacacttgtagtcccagctacccgggaggctgaggtgggagcattgcttgagcccaggaggtggaggttgcagtgagtggagatcccaccaatgcactccagcctcggcaacagagtgagaccctgtctcaaaaaaacaaaaacaaaaaacaaaacatactgttctaagtaggtttacagatattaacctagcccttttatcctatacccagttaatatgctttgatagcataatcacctgccatatgaaagtgctcaggaatgcgaagtgctctaaagtgcaaaatgacttgcagaaggaactgtgaactatgcacagctgcaaatcaggcctttcttaactctcttatacgtccatagcatgatggaactcgtaatatgagcttaacacagggagcccttttaacctagcttgtatatgtagatataggcaatccatagctttatgtcaccctactttagtaggccacctctattccttctgaatgtcatgcccatgttcaactatcagtaattccatgttggagcaaagctgtgaggcaggacatgaatacaaaggcttaggtcctcccactgtcttatctcattcacgcatcttcaccggtagctctgttccatgtcaaacccaggctatttcttctgtgatcagatcatatcttgacctgcttctttggtcaggatgatggcaccagaaatactaacagcaaatatcattggaaaatgccactgtttttaaattgggggggaaaaaagggtcaaacttttcaaagtaacctcctgggcacagtttttgatgcctaataagaaacgaacttctctccagtgtctagttgattagaaaagagacaagggaaacacatactctaattggacgtagccattgactcctgtgctgagattgacatggaattgggtatgtgtttattttgtggcataactattctatgaattgcacttatgtatgttcttctatctctgatatcaaaggacatagagtgtcattgcctgctctgcagtgtacttacccaccagtgcttattaacaggctagaaaactgtcatctgcttggctgatgtttgctgtcagttttgctgttggactatatctatctttctggagccaatcttcaaagcagcttggaactgggtggtcagagagctgggtgggaagatgcactcatccttcccttatttgatctaacatttcttgtagtaatggcttctcattctcttcctctgttggctaacatgcctgggaatgttgagcactaagttgagttgctttccattttcatcccattttttcttaaccatcattttgtgtttttgtttttttctgtttagccttaaagaagaataatatcactaaatttccaaatgttcactcgagggtaaggatttcttctagcacaccggtggtggaggatacacagagctggcaagcatcactttttacttagcttcctcctctctctgtatgcagatcaatggttttcaatctatggctgagggtaatactggtgagaatctgaccagggagtttttgtacctcacattccaatgatgcagggattgagcctctctgttggactctttctcggcctgcttttaagttctaagtgtgatggcttgggcaagggtatttgctgatgattgtatttgctttgagtgttgggctgtccttcccttacccctgtcttggcctttgagttactcagttaaacccattttgatctgaagcgactgaaagcaggtcctggccaggtaacattacagcctttgaaggattaagatctttagaactaattgctcagaggatgaagaaccacaaagctgcatatgaggcaaaagtgtaattctggcctttcattaccagtgtgggctaggaagcagaggcttgagaggattggggtatgcaaaactattttttccttaaatttaagagtagaggctgggcatagtggctcacacctgtaatctgtaatcccagcactctgggaggccgaggtgggcaaatctgttgagttcaagatcaccctgggcaatgaagcaaaatccccatctctacaaaaaaaaaaaaacaaacaaacaaagttagccaggcatggtggcaaatgcctgtagcccagctacctgggacgctgagatgtgtggatcccttgagcccaggaggtggatgctgcagtgagcagagatcaccactacactcgagcctcagtgacagagactgtcctcccctcacaacccccgcccacccccccagaaaagagtagggcagggtcacacaaattccaatgagtcaaggagccaggaaggtaacaggcctggtaggaactgtgctgaacctagagcacagatcttagctccaacttctttttgctgtgtaggaactggggcccggttttgccagatcttccagtttttcaaaagaagccagaaaccctggtctttatgttaattaccaatttaaacaccaggaaactgtacatgtgcggggggtgggggggcacagtggagcaaacattctgtgggtcaaatgtggtccatcagctgcattttcaacttgttgagtagataaagggatacaaaagattcaatttggtttaattctgttatttgtttgtatttccctttctaaagatagcatgtattctagcagaagtcaacaatactaagttaatgaaagggaagtaaatactaattaaacaggaaaagtataaagcctgctttacttttttcactatgccctgacttcatcaaagggaggctgcatagcctagcctgctggctagctacctgacttactcaagaaagcatgccttcatactgagttcttgtataaaattcctctgctcctcccacttcatcctgacagagcaatgcctatttggactggtatgcagtgattgactcattcatttaacaaggattttcttatgcaggagggcccacacaactacttcttgctgacgtaacataaaaaatattgggtggtagagctcggtagtccccacttctcaggaggctgaggtgggagaatcgcttgagactggttcaagtctggcctggacaacataacaagaccccatttcttaaaaaaaataggtggcagaaaaggatgccagggaatagattattattttggtttagatttaatggttaattgaacatcattttgtttaaaatttacaaaataataaactcagctagcttaatggaatgaaaataatagagcccttatctgcaaactgaaggtctttaggttcttgttaaaactgcgaggaaaagatgggacaggacagtctgctttattaattttgcagtttaaaatttattgcagttactatttattcattcaggcttccagaataaaaacaaaacaaaaaaattaagctacagctgcttctaatttaagaaacatttcaaaataagacttcagctagactctggccagtgacagaaataatctatgtatttttctctcaaagtcctagaatcctaccagtattacatcctgttttgtttgattgtaaatattgaaggcaaatgttttatgtctttgattcaatgctcagtgagtttgaagggcccattagctgacttttctacacaagctgctttgattggctgccagctggcctttgtcctgcttagacacatgctattaaaggttgctattctctcactggcactctcccctttacagatcttagaaaccaaccatacagacgagccgatgcggtgaggagaagcgtcaggcggcgctttgatgatcagaacttgcgttctgttaatggtgccgaaataacaatgtgaacctgagactggcctgcatgaatacagggtgtgcgtgaatgaaactgcccacatgaactttatgtgctacgatttaactgcagccttgaacacacacaaaaatattcttaagggctcagatttagcaaacacggaagaattttaaaatgagctctcctttcaacccttgttaacaagtgcctaaaaatggaagtacctgttcagattaatcaaagcaataggatttgatttgattaggtatctttttacaccagtatgttatttttaaccaaaatgtaaagttcttattaaactcattacctgccattgtgattgtcccatcatggcccacctggtttcctgatgttgtaaataacatcaatgcatctgctgtgggtcctttgctgagatgtcttcgaaggaattttgttttagccatatccatcaactttgtattttacttgcaatttggaagaaggaaagtcacatgatgaaactccttttgtctataaccaggccctggcaaagtgcaaacaggatgcaactgcagtggcacaaaggtcactcaatcctttgtttccagtttcacattctactacttctgcgctagagaacgatgctctgtgagaggcattcactagtatgaatgtggggatatagtgtataagacttatttgcagtactgtgttcttcagctagaggcagctttttaaataatgcaagtgtatttattagcattaaaattaacatctcagtaatcagcattagcatttctgaggaccattattaattctgagaacagaaattggtgccttgcaaggaagtttactagctctatcaacaagcattcaaggttacatctgctagcagagtagtgttaggaacctggccttactctcctctgacaatcgcaattttttcttattttttataaattcaagaagatacacttggcatcgtgtatcgaggctaagtttttcatgcatttcccagactacttatggagaattgcagtttaagttgctgaaaagtattaacatggtattaagcttaaataatacgtaatgggactagatggcccactaagccactgttattttccttcctctctggcagggcacttgatccattccaaagtcaaaaactggactgaagctaaatttgtacttttcataatatacattctgcttctggcttatcttcttggtacatcaatatattaattgtaaagtttattgtatagtatttaaccgctgaagttcctattttatgttgtgcttatgtgaaccccttggtgaaggtcccttttccttggatgtgtagttatatgatctttttaaatgtacagatattttgctataaaatcggtgcagttttttatggtttttacacttctctttaattcccacctaagcctctgggtaatattgtaaatattgttttaaaatgcatcagcctatgctatacaatctgaatgttattttaacttatagttttttttaatatatatatttaactataaggacagtttagggaacaagttacctaccacatttcactttagtgtacctatttacagaaagattaaactgccacctgcgggcacattcccataaatgtgtactttactttaaaaagaacatgccacgattttgtctttctgtggactcaacattcacttcgattaaaaatagcaatttgaccaagttggacttccactacaaagcagctgttttccaaagttcaatgctgacatatatgtatattaaaataattgcctatttattaatctacaaatagacaacgttggcatgttcttttctgtttgtctattaatgggcctgcttcttagcaatattagaatgttttataaaagcaattcatgttacttttctggtcttttcatggcatatgagcaaataataaactatttacactactattctgtaatatgttgtaatctttcaatggtacaatttagggggttttagcaatattatgtagacttaccttctagaaacaaatatatcttgctatttgaactcagaatccaaatatacttggtaaacgtcaggaaggattcctccctatgtgaactcttgaccgcttgctatataaaacatagacaatggatcttggaagtgagactacatctccaaaattgcatttataaacatacaccttctaggtaaacagcacctttgtttggtgaaatgccacaacgcccccagcagccccaccaaatgttacaattaggatgttgtacaaataaagataataggctatatattaactgcatagttaaccctgcacccaataaccataccagttggcaaggcaaacaagcagtttggcccccattgcacaaacagttgtaataaaactcccagtcatcaaaagtttatgtgtaacatttcatatgttctttttatggaaacaagaaaaattttaaattttagaatacctttcaagtggcttaaatttagaggcatatatattatagtcatttaaggaattataatttatataattattgtcacaactaccacagcgtactttgcatttgtcacacacaactgcttacagattaaaggcaataatctttattcctcacaagaagcctgtgaggtatttaacactgttgtgcacattgggaaactgactcagcaaactgacttgcccagggtgcaatctaataaatgcctataataaagccttaggtcttttgttcgcaattcagtgcactttccactaaaccagttatacaatgtgttagaagctttattttatgagagaaaaagtcttgcgatcagtaaggatctctacttttgttttaccatcagactggtgcctaatggtaaaagaaaaatcttttaatattccacaaattcagaatgttttcaaactcaactacagcagttaagttcaaatgaggcagatagagtaacattcatctttcttttaaaaggtatttaccaatgactttgaattaaatactcacgttccccactccccatcatctaacactgaaattcactgcagtgcccagtggccatcctgactcaactctgctctcaatagaatagggcttgatacccatcactgactctgctttggttcaacatactggaatcttctctgtagaataaggtgattttacactggaaaataaatagatgatacatttcttatactcgctccataatccacattttgtttgttagacaaggtctggctctatcacctaggatggaatgcagtggtacaatctcggctcagggcaacctctgcctcttgggctcaagccatcctcccacttcagcctcccgagtagctgggactgtagatacgcacaaccacacctggctaatttttctagaaatagggttttgccgtgttgcccaggctggtctcaaactcctgagctcaagtgatctgcctgcctcatcc
